United States Patent Application Publication US 2006/0134663 A1 - sequence listing, part 9

SEQ ID NO: 22957 - DNA, 180919 bp, Homo Sapiens
aagctttccactatattttgaaattcctttactaaattttttcatttccagaagttctgtttgtttgttttaatatagctgtctttcatatcctgaatggttttcctggtttctttctgttgagtttcaactttctcttggatatcattgagcttccttacaatccatattttgcattctttatctgttatttcagaatcctcattttggttgagatccattgttagaaagctagtgagagcctttggggctgtcaaaacattctgtctgtttctaccaccagagttcttgaaccgattcctcctcatctgaaagtactgttgctttttatttttgaatgtgctattatttggatgggaattttatcttttttttcccttgagggtatgactgtcatgtatgctgtgattatttgcttcatttcttggtgctttcagggggccaaggctctgtataggttccttggttatagacagcttttgtgcagtgtttttctaaaatgttgcttgttttagcaatgtattgggagtatgagctgactcactatcttctgtggggctgagtgtggaagtctcaggaagcttatctcatacactagcactatgcccttctgatagcgggtttttatttggtggagcagttcagtctccagtctagtaagtggcacttaataagagccaactcaccctcagtagccaagtgataaggagaggcacctgccagatggagggtggttggggagttcgtgttgggatatgctgaagtcttggggtagggacaggtgaggttgagagagtcacagcaccaactcatcaccctgggcaggcaggaacacaatctgcttccctatcatgcccctgccacagggcctgcaatattcagttcatacagacattgtcctttggctcctggctgcagtgtgactgagttctgcagaaaaacccctctggtggctaccactgaaaggggctcagggcaaagcctcttcccccggtccagctctgtgacttgtctgccctccattgcctgcttctcagtgtaggaagagggagatgggccctgacttttgtgcatgtccaggtagcacaggcttattttcagtgggggtgcagcttctgcaagtggcacctggaaaggctgtctccacgtgtgcttgcaccagcctccagtggggaaagcctctgctgtgtctgcaacagtggatgagggagaaggaaatgatccctctccacacctattctcggccaccagtgcctcccccttcagtgatcaacaccatttccacatttcctttgtcccaagggaggctttgacaggctgcactgcatcctcccctagggatgcccacactgagggctagatctcaggggaactcacagctctccagggacccactgatcccctgtgggtgccaaattcagagtgagttctggagtatgtttgcaggggatctggtaatgcaacgtaagggccgaggttccctggcagggcagtggcccataatgggtgaacaacaagtatggcatctgctgtttcaggtaggacctgagtggagtgcagatccaccagcacaagctggccagccaattctctcaccctggaaagttaccaaattgccaccaacagaattgtctgtggttgtgagggcagaggggctccccaacagcttagtggtcagcagtttattgcagggatgaagggagcagagaagcattcccactgaccttttccatgggaccccaagttcctcataggtcaatgtctgccagactcttgctgctttcctttcttgtgccccagcttcttcccatgggttctctgacaggtcctggctgtcttccctcagttttccatttggatcatgaccattaacaggtaacttcgatcttctttctgaaaagaactcgcatccaacattcctagtcagcctttttttttaaattaaattgaaaataatttgcattttataaatatgcatgatagcagaactgactatacatctatacaatggagtactactcagcaagaaaaaggacccaactactgatacatacaatgatatgttttgaatgtgtgtcttcaaccaaatctcatattgaaatgtgatccctagtgttggacctggggcctggtgggaggtggttggatcatgggtgcagatttctcatgaatgatttagcattattctctttgatactttcctcacaatagtgagttaattatcatgagatctagtcatttaaaactgtgtagcacttcccccctctctctcttgctcctgctctggccctgtgatatgcctgatctcctctcaccttccacaatgattgtaagtttcctgaagcctccccagaagccaagtagataccagcttcatgctacctgtatagcctgcagaaccatgagccaattaaacctcttttccttataaattacctagtgtctgatatttcttgataacaacgtgagaatgatctaatacatacaaaagtatggataaatctcaaaagcagaatgataaacaaatgagtccagactgggaaaaagctacaaacagtattattccatttacataatagaatgtataaggcaaaactatagagacaaaagtcagatctggtttccaaggactggggataggagaaagtgactacaaaaggaacacaaagggactttatggagtgatgggaatgttatcaattttgatggtagtggtggttacatgactgtccatctgtcaaaactcatcaagttgtatacataaaaatgattaactatatctgtatttaaattatatgtcaataaacctgactccctgccactcccccaacacacacacacacacacacacacacacacacacacacacaaaatcagaggactgcagatatgggccggggggtgggtaaagcaaattgaactaaactccaaaaagtgatgcactgaactttaactttcaatagctatgtctgagttaacatgacagattagaattccaaggagccccaaatgcagagcaagactgtacccatctgccaactctttcctacaagtccccaccaagagcatcattagcatactaagggctgggggcaacagagctgagagagaaacccttgagttgtgttgggcctccactaagttcaaaacaactacattccagaggcagggaacagaaaatagaaaggagttttgtctattcaaggttcaccaaattttcagctactgaaggtagagggcatggcaggaaatctgagataaatccatccaaggcactctaggctactgaaaataggggacaggaaagctaagaggaatcattctggaacacttgggccttcagctactgaagtcaggtgcaggagagtttaaagaaatcctctgggggcattccagccctttgaaaaatttaaagtagctgccttccaaaatccgtggtaaaagcaaagcaaaatctcttgaggtgcagaaagctaggaacaggactataaagagaaattaccagtgaccctgatgggcaaatagacagtaaattttttttaatttcctatggttcagaaatctggcaacacaaagagatcttaagaatcttgctaatactcaggtcccaagccctgctgaagggaaagtcttgagcctgtcctcaaaacgtttaaagcccagtgcaaattgagtcaaactaaagcccagatttagctcaactacagattagactgaatcagtcccttactctagcagcctaaaagaagaggtatgcctattttgggtgtattatttgcttcaatcctaattgtttttatatataaaatgcccaatacaataaattatgagacatgcaaagaaataagaaaatgtaacctgtgatcaggagaagaaatagctaatagaagcagagacagagatgtcctggatgttaaaatgatcgaatggggactttaaaatatatatatatatatggtaaaaatgataaaagatttggtagaacaggtggccaatgtgaacgaagggatgagaatttcaccgcagacactgaaatctttcaaaagaacccaaaaaaggaaagctggaaatgcaaaataatatctgataaatggttgcattagctaggctaacagcagacgagaccgggcagagaaaaaaattggtagacttgaagatggttcaatagaaagactctaaagtgaatcacacacaaaaacatgctgaaaataaaaaagagcacatccaagacacataggaaaatataaaataaagtaccatacatgtacttagaatactaggcagagaggagtgagagaatggaaagaaaaaaatattggaaatcataattgacaaaagacatacatcagactacagatcccaaaaccttggaaacctcgagcaagataaatcaaataaaatgacagttaggcacaacataagcaatggctgaaaaggaaagaaaaagagtaaaccttaaaagtagccagagagaaaagatacattacatatagggaaacaataatacaaatgatgtctgacatttcaccacaaatgatgggagcagagacaagagaacatctttaaagtcaagttagaatttctatgtccaactaaaatagccttcaaaaatgaaggtaggggctgggcatagtggcttactcctgtaatcccaatacttcaggagtttgaggtgagtggattgcttgagtttaagaccagcctgggcaacctagggagactacgtctctacaaaaaaattaaaattagctgggcatggtggtgcatgcctgtggtcccagctatttgggaggctgaggtggagagatgactagaagcccaggagttcaaggctgcaataagtcttgaacatgccactgcactttagcctgggtgacagaaggagaccctgtctcaaaaaaaaaaaaaaaaatgaagacagaataaagacatttttagaccacaaatactgttaaaagaaggtcttaagtccgaagggaaataatatcagatagaatgtaagacatgcaaaagtaataaagagaactaagaaaaggaaatatctaggtaaatattaaagattctattttagcatctttacataaaataataatattatataataatatcaaccatttcagcaaaaatagcattagtgttattttggtttataagacaaaagtgcaaatcatgggatggggaaaattgttgaatactgtggtaagagcctcttattatttataaggtagtataaaatcaagcaaaaaataaaaagagatactaaaagatatttgagtcacaaaaaaataagaaaagaaaaggaacaaataaagtaaaattttaaaggcaaaaatatagaaaaatctcaaaataatcatgctaagtacaagaagccagatcaaaaaaaatatgtactgtgggatcccatttatataaatttctgggaaatgcaaaataatctacagtgacagaaagtagatcagttgttcactcaggaggagttggtagaagacaggaattataaacgggcatgaggaaactctctagggtcatggccatgttcattattttgattgcagagatggtctcacaggtatacacatatggtaaagcttatcaaattatactctctaaatttaggcagtttattttgtgtcaattatatacctcaataaagatatatacacacatatacatacatcttatatgccaaaatgttagagttaaacccaaccgtatcaataattacattaaacatgactggattaatctcaccagactagttttcaaaaaaagcaagacccaactatattttgtttattaaaaaacgaattttaaatctaaagacacacaaaggttgaaaagaaaaggattggaaaatgtacaccaggccaggcatggcggctcacgcctgtaatcccagcattttgggaggcagaggcaagtggatcatgaggtcaggagatcgagaccatcctggctaacacggtgaaaccctgtctctactaaaaatataaaaaattagccaggtgtggtggcgggcacctgtagtcccagctactcgggaggttgaggcaggagaatggcgtgaacccgggtgatggagcttgcagtgagcggagatcacgccactacactccagcctgggggacagagcgagattctgtctcaaaaaaaaaaaaaaaaacaaaaagaaagaaagaaagaaagaaaaaggtacaccatgcaaatggtaagcatcagaaaattgtattaatatcagacgaagtatacctcaagaaaaagaatattactaaagaagaagagagagatttcctaataaaaggatcaactcatcgagaagatatgagtcttaatgagtataagaacttcaaaatacatgaagcaaatattgaaagaactaaagggagaaacaaaaacttcccaatcatatctggagattttagtacccaactcttagtaactgctaaataaacagaaatcaataaggatatgtaaatcttaacacaatgaaccaaatggacctaaccgacatttataggttattacatccaacaagtgaaaaatacatactttttcatatacacatggaaaattcaccaagacacactgtatgctggcccaagaaacaagtctcagtaaatgttcaagaatcaaaataataccgagtatattctctgactataatggaatttgattagaaatcaataacaagaagatatttaacccccccccaaatatttgcaaataaagaatgtaattctaaataatctgtgggacaaagatgaaatcacaagggaaattagaaaataactgaatgatgaaaacctgtcacatgaaaaactacggcattatgaagctgaagcagcacttagaagagaatctgtagcgttcaatgcttctattcaaaaagaagaaaggtgtaaaataaaagaatgaagcttccaccttaagaagctaggaagagttgaggaaactgaacccaaaggaaacagaagaaagaaaataataagattgttattcactgaaacagaaaacagactaagaaaaagaaaatcatcaaagtcaaaatgagtcattggaaagattgataaaattaataaactcttgctgcttctcaaacattttccagtaggttattcacaaatttgcattagagaccagcagtggatgctctcagcatgtaggtgtagccctcttgccactcgtaggggagagacatggagggacacacagcccccaagactcaagagatggagggggaacctgggacacccagacctccaggaactcattagacatgcaggacatagggataggtccctgtggtgttttctgcatggacccacagcctgtagggagccaaggaagagccaccttcatgcagagaagaggaaaggaaaggatagcagagggaagtcaacccgagaagaaactcatgaacaattttttaaaaaatctaggtcttggggctgggcgcggtggctcacgcctgtaatcccagcactttgggaggccgaggcgggcggatcacgaggtcaggagatcgagaccatcctggctaacacggtgaaaccccgtctctactaaaaaaatacaaaaaattagccggacatggtggcgggcgcctgtagtcccagctaccccggaggctgagacagaatggcgtgaacccgggaggcagagcttgcagtgagccgagatagcgccactgcactccagcctgggcgacagagcaagactccttctcaaaaataataatatcatcatcatcatcatcatcatcatcatcatcatcatcatcatcgtctaggtcttgggatttgcgggatgctcctggctctgaaaataaactgtctctgagatccccagggtagagaaacatggggaggttacaggcattctgctgcaggattgtctcttctttattcacttctctctcttaccattgcttcctccacagaggagactggaaaggtctatgccaactccagcaaggtgtgggtccaggaatacatcagcaactggaattaaaccccggcaaggtctggacccagcaagaaaagtgctagagatgtgaacagattgggcacagggacccaaaacaggcaaaagtctctgcaacctcagaaactgattccagatctgggggtctaacttcattttaaatgtacgtatgctattttacttataatccctttttgattgtgaattgtgttgtttactaaatgttctgggaagtcagatggccttctcttgtctccctccacctttccccttcagtcacaaagggattgactccatttcatggctgcaatgagctatctaggcagacattgtaagaaattcatcaaaccagcacatatttattgactatgagtagccagtgctgggttcaggctttgaaagaataaaatattcctctctttctttcttccttgcttcctcacttcctcccttcctaacttcctccctccctgtctccttgtctccctgtctctctagctccaaatttaataaacactagtttgaaaagtattcatattagtgaagatgtggagcaactgacatgcacacactgctgcagggagtgtgaatttgtcctcccaccttggaaaataccattgtcatcttgttgcagcaaaggtgtgcatggccgatgacctagcagtcacactcctagagagagccacagttacccttgcacgttcacagcaggaaacatacacaagaatactccaatcagtgctgttggcactagcaaaaataaaaggggcaaatggaaaataaatcacggtatgttcataaaccaaaatattaccaggaacgaaagcaagcacattacagctacatatagtaaatagtgtgaatctcaggagcataatgttgagagggaaaaaaagctatggaataaaacatataataattccatttatgtaagtttgaaaacagcccagagcagtggctcacacctgcagttcgaacacgttgggaggccgaggtgggcgaatcgcttgagcccaggagttcaagaccagcctggacaacatgatgaaaacccatctctacaaaaataatacaaaaaccagccaggcatggtggcacatacttgtagtcccagctacttgcgaggatgaggtgggaggatctcttgatttcagggaggtcgaggctgcagtgagccatgatcgtgccactgccctcggcctgggtgacagagtgagatcctgtctcaaaaaaatgaaatgaagtttaaaaacatacaaagttaaatatattaatattcaaatctatatggtgaaatgatcagaaaggcaagagtatattataaacattattcaggagagagatcactctgtggaaatgaccactcagggaccatcccaggcatcgggtacagggatgcttgttgtattgctactctttattctcagtccatattttatgcctagttaatatcaaaatatatattatatataatttaaaatacatatatattatatataaataaatattatatatatattctatatatatttatatataatatataaataaaaatatatattatatataaatatatatataaacaatatttatatatatataaacaaatatataaataatatttatatatatataaacaaatatataaataatatttatatatatatataaacaaatatataaataaaactatgggcgaggcatggtggctcacacctataatctcagcactttgggaggccaaggtgggcagatcacctgaggtcagggatttgagagcagcctggccaacatggtgaaaccctatctctactaaaaatataaaaattagcaggcgtggtgtgagatgcctgtaatcccagctcctcgggaggctgaggcaggggaatcacttgaacccaggaggcagagattgcagtgagccgagatcgtgccattgcactccagcctgggcaacaagagcgaaactccatctcaaaaaaaataattaaaaaaaaaagctagccagacgcagtggctcacacctgtaatcccagcactttgggaggccgaggagggcggatgacctgaggtcgagagttcgagaccagcctgaccaacatgaagaaaccccgtctctactaaaaatacaaaattagccaggtgtggtgatgcatgcctgtaatcccagctactcaggaagctgaggcaggagaatcacttgaacccggtaggcggaggttgtggtgagccaagatcgcgccattgcactccagcctgggcaacaagagtgaaactccgtctcaaaaaaaaaaaacctgtaaaaatcaggctgtagaaaagaacagttattattacctcatttttgtttaactgtatatctgtattatacataatgactacatacaaaaacatgacttgaaacttacacatcaaaatattgatagtaaagagatttttttcatttatttgattttcttaaaaattctgttaaaaagcaggcatcttttttgttaaaaattattttaaattgcatataagaattttacaatgaaattgaaattgtacacaacttgtgaaaacatggaatatgactttttttggtatgatcccacgtagggagaaagcaaacagggaaaaaagatgaagacacatctaagaatgttattgtgggatcacaggggatttttgctgacttctttttgcttaaatattttcaaaatttttccatagtgttgcttttttaatagtgaatgatggtaaaagtgtttgctttgttttactttaggaagaaggtgccagaggcttactgtttgcttaaactcacagaaggccctatgcatcttgtttgcagctgaatctccagtgctctgctcatggtatgtattcaatacatatttacagaataaatgaatgagtaaatgaataaagagtgttaactgaacagatggaagggataaagcagaacatgtggtctccaatttttattcattcattctctgtccattataggctagaatggggataattcccaaagatacgaagaaatcgaagcccaagatgggtggcttctcagtcccttgacttggatgaagtcctctctatcagctgagaaaacacatggtagagattgatgatctttgcagattcttgggaggcagacaggttgtggaatattgaagatgagaaaatagcacccagctttccaaaaaaggagggagaaagaaaatagacgatagactccatcaacttcagagtggtcagctgcctctagactagtcaagattctacatatacctatacaattctttttttttttttttttttgaaacggagtctcactctgtcgcccaggctggagtgcagtggtgcgatctcggctcactgcaagctccgcctcccgggttcacgccattctcctgcctcagcctccccagtagctgggactataggcgcccgccaccatgcccagctaatttttttgtatttttaatagagacggggtttcactctgttagccaggatggtcttgatttcctgacctcgtgatccgcctgcctcggcctcccaaagtgctgggattacaggtgtgagccaccatgcccggcctataattcttattttaaaaaacctcttgttggcacttcagaaaggaagtagtcactgcaagtcagcatggtgcagttaggccgaatcaagctggaccaaccccatttccttctctggaagcaatgaacatctggggaagggtgtagacagagggcctcatagtcaatggtcaatagaaaatactctggaatcagccggggaaacaattaaattcaggaaacagatacagtcgtatgttgcttaacgatgggcataggttttgagaaatgcttcattagacaatttcattgtacagacatcacatacttacacaaacctagatggtggagcctgccacacacctatatggtacagcaattgctcctaggctacaaacctgtgcagcatgctactgtacagaatactgtaggcagttgtaacacagtggtgagtatttgtgtacctaaacatacctaaacatagaaaaggtacagtaaaaataaggtagcataatttttgtttaatgtattgctgctgaacaaattatggtattataatcttataataagatgtgtagtaggctacaccatctaggtttgtgtaagtacatgatgtctgtataatgatgaaattgcctaacaaagcatttctcagaacatatgcatgttgttaagtgtcatatatgtagtctgtcattgataaaaacatcattatgtggcacataactatatacactgctgcatgagccagtgtgcaaaaacaactttactaaaataagaatagtctaataaaaaataaagccataattctccccatgcctccttctgcaactccagcctttctcctttgaataggggaagtggggccagtcaagcaagaccgcagctctgggaggagggtgaatgttatttaccaaaacatgggaggcagatgattcagtaacttagatgtgggaggccagaagttggcatagacacccaagggatcatatgattcaactatacaccaacgaaaaatgactgcatgtaaaaattggtaaaattttaataagatctgttttgttgataatattgtagaggccgggcacgatggctggttgggcgcagtggctcatgcctgtaatcccagcactttgggaggctgaggcaggcggatcacttgaggtcaggggttcaagaccagcctggtcaacatggagaaaccccatatctactaaaaatacaaaaattagccaagcatggcggtgagcacctgtaatcccagctactcaggaggctgaagcagaagaatcacttgaacccaggagacggaggttgcagtgagccaagatggtgccactgcactccagcctgggtgacagagcaagactctgtctcaaaaaataataatgataatgatattgtagaactgtcaattttctagttttgatgatcataatgcattttttatacggttgtatatgaagttttataagcttcccattgggggaagctgagtcaagattgcacagaaactttatgtactatttctgcaatttctatgtcagtgtaaagttattttaaaataaaaagttaccataaaaacaaaagattctttatgacctgaaaaaattatttcctcatcattattgtaacttaaacagttttattatcttcaaaatcaatatttggagtcataaagttgtaattcaatatcgggtaatttctaaacattaactctatgtgagattcatgagggtgccctgagactgggctagaaacagaataatcaaggtggaacaggtctgggcgtggtggcttatgcctgtaatcccagcactttgggaggccgaggcaggaggatcactcgagcctaggagttcacaaccagcctgggaaacatagtaacacctcatctctactacaaaattttaaaaattagccagacatactggtgcactcctgtagtctcagctactcaggaggctgaggtgggaggattgcttgagcccaggtggtctaggctggagtgagccataattgtgccactgcactccagcctgaatgacagaacaaggccctacctaaaaaaaaaaaaaaaaaaaaaaaaaaagcaaagtaaaacctcccgtgaaaaaagcaagagccagaatgggctagttcttgggctgctccttccctggtagcttaaattaaggagagaggctctcaaggaaggacaaagaaagggcttgatgcatgggaaatcacaattttgaaaataatagctatcacttattctcccatgtggctttcacaggttacctaatttctctatgccttggtttgcttctctataaaatggagatgataataacatctacaatgcaagtttgttgtgatggttaaattaattaatacatacatttaagctcatagaacaccacctggcacagaataaatgcttaataaaaatggtagtcatgccaggtttgtgctttacatacattatttctaatctcacaactaccctgccagagagaaagcatcaatctcctcttcacaggtgtggaaactcattcagagggtaaatgacacttgcagccaaacgagttagtaatgttggtgaagaagttaagtcttgggacttggaattgacatcccggtttcaggtctcagccacttaacaatgggttaacgccaacaagttccttaaccttaccaaggcttgccaagtttatgttcctaatggaacaagaacatcaacctcttagagtttaggggagaattaaataacacattatatagaaagcacctaccaaacttaggagaggcaaaaatccatctccattttcttaagatcccacctggactcaagaattaaattgacatatgatagattaataggagaaaagtacacaaatttagttaatacaagttttacatgacacaagatccctcataaggaacagaaactcaaagaagcagttagggtcagttacttatacactgaattggacaaaaaataggaagttgtgaaatgtgataaggcaaaggggctgcgctgggtgattaattgggtacagaaatgactaaggtgataaggtttgtttgtgtagacttctctcggcttcagcttcccatccttaataagaatattatttttctttcggtataaggaggacatctttcacatgggcatttcatttcctgcctttgataaagacaataaaggtcaaaataaagaaggatcttcttgcacctgctgggttctttttttacatgcctttaatttaaaatatgccagaacagtgaattttgggcggcatattcttaactccttcacaaataaagatccttattttttctcctacacaaaaaaaaggatagtggatttggtcaagcgagagtgaggttcctggtagggataaagtgtgagtgggtttattattcaatgatgatgaacaacttacacaagagaaatggcagattccagtggctgtaggtaatttagtattttggctttaggtgtgtttcttgtctgagtgaaaggcattgcctcccattcttggtgcacggagtagcatgtctgagtctcctagagcatggcttagccctacttccacctgcttctttccagatatgaatgacaacatcagtaagtgctgctacatcacctggaggatcccatgcaagtatgtgatacattattatctgtctaattcatgaagtgtgtcccaaacccaccaccctgtgagtctcactccattaatcagactcagtgggatggagactgttgagagaagcaccaaccgtcagagcacctgccaggtgttgcagacacagggagaggcagtagagggccagcctgggggctttctggcctgggctggagtcttccaggtggaagcagttcccagtaaatggagcagcatggtggggaagggaaggagaaggctgaaaggaggctgctagaagtggggtggggtggacttgggagtccaagtgaatggaatcagtgctgcattgcccaataggcaaccggcaggtgcttaggaaatcaacaaataatgcttttgaaagaatacaatatttgcaacttcatgcatgtacacagtgatcaaagtggctattatttaaaaaaatcaaaagtcccttatacagtcttatcattacttttcagttagtattgggtatttgaaattacatgctgaaacacagaataacctttttagagcctaggaccactcaggtcttgctctgaccctggttggagctcatccttcgggaaggagacaaaagcccccaaatttaccagagaatggaagaaagatgggatgatccctcctcagcttttgcattcctccatttttgatccttctaccccttgactcataatttagacacaagtaaatgtctcgcctgcttgggtttgaggtaaacattagttcagggttaattggatgagctgaaacactctgagcatggagagaaaggatctagtcatggccaaccgctaatcccacagcccccgccactgcatggtagctgtcctgccctgagattaatccccaatgacagttttttcctgatctcctccactgtgctgaattccattctattctgaagcttggctctgacaccctctttggggtatgtggaggctcagggacccagtgagctgttggtagcaatattagacattgacttgtgaacatgttacttgagctttggagaaagtaaagaaggatattggaagaaagctgtattggacccagctggatcactggactccagcaagtcaggctggagaggagggagttggcacgtgaagcaaaaagcttagaaggacccatgaggtggggactagggcccctatatatggactttgggtggccttgaaataatatgcagcatattagatatagatctgctccttgaaagttagattgtatggccaaaccgcaaacccaaatatggatttcttacttctaggcatttgtctctcatggttctttctatccatggagtttgcaaactccactttctcttctgctttctctctcctgctttctctgtctgcttttcaagatttctgtcaaatgctacatcttctccgatcctcccagaccaaagtggcccatctccacctcctctgacacaccacagcctgtgacaccctcattccacatttattgggcactgctcccagtgccagatactggggtaacctagacatgtaccatcccagccctcaggagcttacattctagggggtggaatgggaaagggggaaatgatcctcaagcgaacaagtatacaaagtaatttccaatggtaaccaatgctttgaaagacctaaaacaggctatggtgtgtgggttctttaggaaaggtcagaggaggcctctctaagaaggtgacaattaatctgagccctacaagatgaggaagattcagccataaaacaagccagaggtaggaaagcatccaggcagagaaaccagaaaaggcaaaggccctggggtgattgtgtttgcctaatgaaaagaaggccagtgggactggaagttcagcgagaacagtagacctgtcagagccttgtaagccaaaggttgtcagtagatgggcatggcctgatttgggttttagaaagagtactctggcttcaggacagagaacgggtttgaggggagcaagaagggaagcagggggaccaattaggagaccattgcaatagtccaggtaaaagactgaactaaggcaggggcactgagaatggagaggaggcaacagattgcagatattctttagaaagaaccaacttattgatggacgcatgagtgcagggggcagagggatgctgctcacttgtcctctgtccctcattgcctggtatggcagacactcagggctattttgtaaatttcaatcccaactacagttaacccagtggcagagcctatgcagtattcctttccatgtgtccaggcagtcaccatattctttccagctccctgggttgcctcatctctaacagggtcctgctccctcaaatcctgcctggctgccaagagagaagtatagatcataaaattcaacctcatccctcctctccagatcctgaggcttggcttttactctatggctttgtgaaaagcagaagcaataatccaaccacatgtcttcttaacaaggaaatattttacttttaaatggaagggcgcagttattaaagggtcaaagaccaactcaaggcagggatgggctgggtaagttagggactctattctttgaatcttcagaggcccaaatacaggaaatgtcagggcaaagaaaagaagaggaaagaaaaggttggtaggaatttgacaggtctgtttgtgactgcttaagatgatgctaaggcctttttgggaataatatttaaaattctaaggaaattgaacacttaaacaaaggatttttagcaaagcaattttacttttgcgcagaggggtgtttctccttggccagtcgccatgggagcacacttgaataaaggggcatgaaagcctttatttctgacgcaagtcttgcttttgtatttttttttttcattggccaggattgggttgtacgctttaaactaattctgtttggctaaatatttgaacttttttgtttcagataaggtgggcatgtaagagagagaggggaaaggggaaggggtgtctgtaatgagctagagagttagtctttttttttttaataaggaaaggaatgtgagctggtactgctaacacctggtattgtggcgtgtctgggcatgtaacaaaggcagaaaggaagaaaaaaagacaaaaaggaaaaaggggtggggaggtactattaaagaataaaggattgattaggctatttgaagagaaacttcatcatatcttatagcctgaagctgacctggccatgctttaaaggaaatgaacccaaagaagggctttggatttaaaggaaatgaacccagagaagcctcgaagggggcttctctttccagtgcattcccaggagcagccctagatgaggccactgcagaccaccgctaagcttttggcatgagtctcacactcccaggaagagaggcagatgcctcatgataggcataaatcaacagcccctgcgtatgtgtcactgatagcttgaacgaggacaactttggggggaaactatatagcagctttcattttggtctcccgttgtgtctttaattttgagggctggttcttcctctgcccttgtataaaactcaaggcaggacccatgatttttctagttgctctcaactaataccaaccagtccctgatatgtgctagtacctcctgcctcaagacttttgcacaaactacttcccttacctttgtctcccttttcctcacttgtcaacttagcaaacattgctcattttataattctcagcttaaatgctactttctcagagaggcattctctgggcccccaatatattcttttccatggtgttgcttatcacagtgtataagtacatgtttatttgtgtgattatttaattttgtctccaggaggaaaggaacataatctttttggctctttgtgtgatactcttggtgctgagcagaatgcccagcacgtggtagatgctcagtaaatttatattaaatggatggacggatggatggatggatggatggatggatggatggacagatggatggatgagaggtggatgggtggatgaacagatggacagagggacagatggatggatggatggatgggagatggatggatggatggacagatgtatggatagatggatggacatattgatgaatggacagatggatgggtggatattctaacaggaagctcccattgattttacctttttcctcaagttccaatatggctcggcacagcactgttaccgatcctgtctttatttaagtgtttttgtgttttgttcattgtgattttttcagtagtaattttgattttttaaatagttcactaaaatattacttatttttactactgaactttttggtgtccccttgggttttcaacacaagcgcaaggctagtgcctcatttaccaccatctggtcctgacctgcccatagtaagcacttaataaatgataatgattgttaaaataatcactgttgtaacaagaagagcaagatataataagacaatcacaggctttagagtcaggcaaacttgggctccaaccactgaccttggggaacttgggttccaactgctgacctcaggggtgaaaaaagctagcagggcctgaaaagaggaggaaggctgggtacttcccaagggagaggaagacttctggacacctatcaggtgtgcagacacagagagaagctgagcaccttttggcctgggctgagccttcaaagagatggaggaggtggtcccagtgggtagagaggggccaagtctgggacaaagaagaagaaagagggaactgcctgaaaggatcgcatgaatcaccgtggaggacactggctcaggtgtgtatagggtcctggggaatagggagcaacccctcggaaaggagacttgcccaaagccagaagtctccaggattccatggggaaggtaggaacttgtacagagtctcaactcctcagcctcttgtgcctcatcttcatcatccaaagggtgcagtacattagtgacaactccacagtgcctgaagccatgactacacaagacccagtgaaaaatgaaagtgttaggccccttgttaaaaaactactaactcctaaacaacaacggcagcagagcctgaaaccaagagcaaggacctgtgtaattgcacaggtcacacgcccatgatgccagccgtgatctagagctcacagcacagtcgccacactgcagttgaggtatcccagttcaggatgcagcaggagcagagcccaaggctcctaccccatcccctcacctctgccagcccttgggaatttctctgcccaggatttaatcccaggcccactttctctcagctctcactcattgtgccaaattatgactcccagccctctgggggcccaaggaagccataggctccaggtctcagtgtagatttggtatcagagccttggagaaaacaccaagggctgttccatgaaaattgtgctggacacagcaagaacttgagcggtttctttgggccctgacagttgggacctcagaactgaaggagaggagagtcagaaccatgagcacgaagccagaaagagcccaggagtggggaatgaaagattctttatactttgagtcttatgtgacagaaagctctctcaaaatttcctcgagcaaaaccagaaatagtttattagctcataaattcagagtggatggcaggcgtacagctcagggaaaaccagccccagggcatgcagttccacaggatcctggtatcaatggcattgctcttctgaaggcagaccacaggacctccacttcctgaaggagctgctgcttttctgtcattaaaatctgaaaaatccctgggaaggaccccagttgtctgactggggaggtaggtgcacatctattgcaaaggaggaggtaccgtgatgggcaagagcctcacagaacctaatagctacatgggcagttcctccaagaagagggcatctttccagaagaaaggaaggtgctgaaaaaaacaaacacatgccccctactttacttaaaaagaaaatacttgatcacagaacttgtcttaaagtattgatagccatgctaaatgttaatcgtacccttgagcatttatcctggagaatgaagacttacattcacataaacaaagcagtacatgaatgtttattgcagcattatttataatagcccaaaactggaaacacccagatgtccttcagtggataaatgattaaacaaactgtggttcaaccatatcatggaatactattcagcaataaaaagaatgaactattggcacatgcaacaacctgaatgaatctccagagaattcagctgagtgaataaagccaatcccaagaggtgacataccatatgattccatttacataacattcataaaatgacaagattataaacatggagaacagattcgtggttgccaagaattgaggaaggggtgggatgggtgggagggagataagtgtagctatacaagggttacatgagggagccttgtggtgaaggaacttttctgtatattgatgatatcaatgtcaatatcctctactatattgtactatcgttttgcaacatgtcacttttgggagaaactggtgtcaaagtcaaacaaaatatagagatgaatctctaaatttaaaatgtcttatttgggacgcaagaattacaattcaagacatacatactgtctgggtagtctttagtatgtccaaagaccaaagagtaagctagaggttttattaaaaagagaaaagttacatattgttttgcaagaaagttcattggcactagtaaagttttaggaaactggcaagttgtgattggtgagtgatagcagtgggtaagactagtcttagaaccacagcaggttgtttcagtaactattagataaaatgggtttcaggatagcacaggctgaaacttcagcagccaggcttgcagaggactacattcttggagcaatgttatatgtcccagacaggcttgcatgcagagaattacattattagaccagtgttggttttttgtttttgtttttgtttttttttttttgagacagtctcgctctgtcgctcaggctggagtgcagtggcgtgatctcggctcactgcaacctccgcctcccagattcaagcagttctcctgcctcagcctcctgagtagctgggattacaggtacccgccaccatgcccagctaatttttgtatttttagtagagacggggtttcaccatgtctattgggctggtctgaaattcctgacctcgtgatccaccctccttggcctcccaaagtgctgggattacaggcgtgggccactgtgcccggcctagaccaatgttatatgccctcagtgttttctccccctggcatctcaactctgttttagttgggtatgacaagaatgacccaattgtatggtcaacttttacactgtgtaaagagtacactacccaggatctctctgtattatttcttacaattgcatgtgaatctacaattacctcaaaataaaaaagtccaatttaaaaacattaatgatcatgcttatgtgtacattatttgtatactatagacacatccaaaatgtgcctcaatttgatcatgtccatgcctttgtcttaaatagtgaggtctagtattagagagaccttggttcaaatgccagctttgccctttactacccatgtgggcatatagcaaatattagcaaattactctattgctgtatgtctccatagcctcatctggaaaaagagctaatgactgtgcctatttcacaagattgtagttaagatttaattatataataattgtaaaacataaaacagtaagtagcccatatctcattgcaactatttactatccttattggcagttacagctgactaggatcttcttcctcccttccctgccttttgaagcagtatacagtctctgtcctatttctgagacctgcatcaaatgctatccctttcagaaatgtttctcttcatcccagtccaaagggatgcatctggacctcctttgaaatctccaatgggcacaaaggctccacagctctggatggcagaaacttcctcaatcctctatctctaccctaactagaataaagcatctttactaagatttatgtagtccttctctaacaagtacctagtttaattaaaagcaacaagcctcagccgggcacagtggctcacacctgttatcctagcactttgggaggtggaggtgggaggatcacttcagcccaggagttcaaaaccagccgggggcaacatagcaggaccccatttctaaaaaaaaaaatttttaagttagccaagcatggtggtgcatgcctgcagtacgggccacttgggaggctaaggtgggaggaccacttgagcctgggaggtcaaggctgcagtgagccgtgattgtgccactgcactccaccctggtgaacaaaggaagaacctgtttcaaaaaaattttaaaaataaagcaacaagcctcctcttgaataaggaactattacttttgcgttcagcaaatttataaaaaagataaatctatccttatggcccaaaaggaggattatcagttagcttttgctacatcataaatcaccacaaaatgtagtgacttaaaacagcaaacagctattctcacaattctgtaggttggaggggtagttctcccggtctgagccagctcagccagggtttgaaggcctaggataacctctcagctgggacagctgggatgtctggggacctttctctccttgtggtctctcctcctttggtaggctagcataggctggcacatgcggtggtataaaagttctcagcagtgaaatattaataatgcaagtatcaatgcaccagcacttttccggcctctgttttcatcacattttctattgtctcattgtccaaagacagtcacatagcaaagaccagattcagtaggcgaagggacttcccaagggtaggcacactgggtggtaggaattactgcacccatttttgcaaacagtctatcaaaggaaggaattagttaaatatttaaaccaagatctaatttcagataaccagtgtgagttaggagaaacatttggcgcaaaactgaaaccaattcatttgacttggtatcaccaaatacacatacagtggctggtatacaggaatggtcagaagatatttaagggactccatctctgtgcaaccctagagcagtttcaattgcatggcatagcgcagactttagctacaggcctctttaaggagacattgtttggattggttttgtttctctaaaaaggacctgggcccagtcttacacaagaaacaagaagatgagttggcaggctctgttattccccttatcacttaagaagaaagtttttctcgtgtaataggccatttaagatcatgcacaaggattcccaggcaagatgcctgaataggaacagctctggtctgcagctcccagtgagaccaacccagaaggcaggtgatttctgcatttccaactgaggtacccagttcagctcattgggactggttggacggtgggtgtagcccatggagggtgagcaggagcagggtggggcattgcctcaccctggaagcacaacacagtcttacaagcctactctggaccaagcggctgaccccttcttccaacccccttctcactatctcttttgcctaataaagatggagggctatgtaaagctcagggcccttgtccactagaggcaaagtggcccctgactaaatatattcttttgtctcttgtcttttattcccacgttcaccccctttgttcagtccccctaggtctgtataaattacacaaggggtcagggaactccctcccctagccaagggaagccatgagggactgtgctgtgagggacagtgctatccggcccagatactatgcttttcccatggtcttcgcaacccacagaccaggagattctcacgggtgcctacaccaccagggccctgggtttcaagcacaaaactgggcggccatttgggtagacactgagcaagctgcaggagtctttttgtaccccagtggcacctggaacaccagcaagacagaacagttcgctcccctagaaaggaggctgaagccaaagagccaagtggtcttgctcagcaaatcccacacccactgagcccaacaagctaagatccactggcttgaaattctcgctgccagcacagcagtctgaagtctacctgggacatgcaagcttgatggggggaggggtgcccaccattactgaggcttgagtaggcagtttcccctcacagtgtaaacaaagccacctggaagttcgaactggatgcagaacccacctcagtgcggcaaagccgctgcagtcagactgcctctctagattcctcctctctgggcagggcgtttctgaaaaaaaggcagcagccacagtcagggacttacagataaaagtcccatctccctaggacagagcacctgggggaaggggtggctgtgggcgcagcttcagcaaacttaaacattcctgcctgccagctctgaagagagcagcagatctcccagcacagcactcaagctctgctaagggacagactgcctcctcaagtgggtccctgcccccatgcctcctgactggaagacacctcctagcaggggtcaacagacacctcatacaggagagctccggctggcatctggcgggtacccctcttggatgaagctttcagaggagggagcaggcagcaatctttgctgttctgcagcctccatcagtgatacccaggcaaacagagtctggaggggacctaaagcaaactccagcagacctgcagaagaatggcctgactgttagaaggaaaactaacaaacagaaagcaatagcatcaacatcaacaaaaaagatgcccacacaaaaaccccatctgaaggtcaccaacgtcaaagaccaaaggtagataaatccacgaaaatgaaggaaaacctttgcaaaaaggctgaaaattccaaaaaccagaatgcctcttctcctccaaaggatcacaactcctcgccagcaagggaacaaaactggatggagaatgagtttgatgaatcgacagaagtaggcttcagaaggtgggtactaacaaactcctccaagctaaaggagcatgttgtaacccaatgcaaggaagctaagaaccttgataaaaggttacaggaactgctaactagaatagccagtttagagaagagcataaatgatctgatagagctgaaaaacacagcacgagaacttcgtgaagcatacacaagtatcaatagccgaattgatcaagcagaagaaaggatatcagagactgaagatcaccttaatgaaataaagcatgaagacaagattagagaaaaaagaatgaaaaggaatgaacaaagcctccaagaaatatgggactatgtgaaaagaccaaacctacatttgatttgtgtacctgaaagtgacggggagaatggaaccaagttggaaaatacacttcaggaagccaggagaacttccccaacctagcaagacaggccaacattcaaattcaggaaatacagagaacaccacaaagatactcctcgagaagagcaaccccaagacacaaaatcatcagattctccaaggttgaaatggaagaaaaaaatgttaagggaagccagagagaaaggtctggttacccacaaagggaagcccatcagactaacagtggatctctctgaagaaaccctacaagccagaagagagtgggggccaattcaacattcttaaagaaaagaattttcaacccagaatttcatatccagccaaactaagcttcataagtgaaggagaaataaaatcctttacagacaagagagcctgccttacaagaggtcccgaaggaagcactaaatatggaaaggaaaaacctgtaccagtcactgcagaaacataccaaaatgtaaagatgattgacactatgaagaaactgcatcaatgaatgggcaaaataaccagctaacaacataatgacagaatcaaattcacacataacaatattagccttaaatgtaaacaggctaaatgccccaattaaaagacacagactggcaaattggataaaagagtcaagacccatcagtgtgctgtattcaggagatccatctcacgtgcaaagacacacataggctcaaaataaagggatggagggatacttaccaagcaaatagaaagcaaagaaaagcaggggttgcaatcctagtctctgataaatagactttaaaccaacaaagataaaaaatgacaaagaaagacattacataatggtaaagggatcactgcaacaagaagagctaactatcctaaatatatatgcacccaaaacaggagcacccagatttataaagcaagttcttagagacctacaaagagacatagactcccacacaataatagtggaagacttaaacacctcactgtcaatattagacagatcaacttgacagaaaattaataaggatattaaggacttgaactcagctctgggccaagcggacctaataaatatctacagaactctccaccctgacagaatatacattcttctcagcaccacatagcacttattctaaaatagaacacataattggaagtaaaacactcctcagcaagtgcaaaagaacagaaatcataacagtctctcagaccacagtgcaatcaaattagaactcaggattaagaaactcactcaaaactgcacaactacatggaaactgaacaacctgctcctgaatgactactgggtaaacaacaaagttaaggcagaaataaataagttctttgaaaccaatgggaacaaagacacaacgtaccagaatctctgggacacggcaaaagtagtgtttagagggaaatttatagcactaaatgtccacattagaaagtgggaaagatccaaaattgacaccctaacatcacaattaaaagaactagagaagcaagagcaaacaaattcgaaagctaacagaagacaagaaataactaagatcagagcagaactgaaggagatagagacacaaaaaaccctgcaaaaaatcaatgaatccaggtgctggttttttgaaaagattaacaaaatagatagactgctagccagactaataaaaaagaaaagagagaagaatcaaatagacacaataaaaaatgataaaggggatatcaccactgatcccacagaaatacaaactgccatcagagaatacgataaacacctctatgcaaataaaccagaaaatctagaagaaatggataaattcctagacacatacaccctcccaagactaaaccaggaagaagttgaatccctgaatagaccaataacgagttctgaaattgaggcagtaattgatagcctaccaaccaaaaaaagcacaggaccagatggattcacagccgaattctaccagaggtacaaagaggagctggtaccattccttctgaaattattccaatcaacagaaaaagagggactcctccctaactcattttatgaggccagcatcatcctgataccaaaacctggcaaagacaaaacaacaacaacaacaaaggaaatttctggccaatatccctgatgaacatcattgcaaaaatcctcaataaaatactggcaaaccaaatccagcagcacattaaaaagcttatccatggcttcatccctgggatgcaaggctgattcaacatatgcaagtcaataaatgtaatccatcacataaacagaaccaatgacaaaaaccacatgattatctcaatagatgcagaaaaggtcttcgataaaattcaacaacacttcatgctaaaaacactcaataaactagcattgatggaacatatctcaaaataataagagctgtttatgacaaacccacagccaaaatcatactgaatgagcaaaagctgaaagcaatccctgtcaagaaatgacaatatgttgtgtaatcaacatactgattggtgaatattgtgaaatctattccttatattctttcactaaaaaaatatgcatctaatactgtgtcaggctcctctgtacaccacttccattctatcagctttatctctgactctagccaccactacagcagccagttgcacccaggctctgcccagctcaagacggtataatctgacagcacctcaccttgtccatcatgcacaccccacttttcctgcaccggggattctctgatgctgaggtataagaaggatcagctcattactcaggcacgtacaacctggaagtctggacaagtagttcctaccacacctgagtttatgtcaatgaagtgacttttggaaagccttagggatgagaactggttgccatgggagccaaccatgaaaggattggaaatttcagcctctacccctaaactccagggaggggagagaggctggagattgatctgattactaatggttaatgatttaatcaatcatgcttatgtaataaatcttccataaaaacctaacagaatggggtttagagagtttccaggttggtgaacttggaacagtgttcagtggaggcactgagaggatggtacacctggagaggacacagaagctccaaacccactccccatgcctttccctatgcatctcattgacctggctgttcctgagttgtatgctttataatataaccctgtaagtaaactgttcttctgagttctgagagctactttagtaattatggaatctgaggagggggtcttgggaaattctgatgtgtagccaagtcaaacagaagttgtgggtaacctggggacccactatttgagattggcatctgaagtgttgccagcctcacgggaccgagcccttaacctgtgtggtctatgctaacaccaggtagtctcagaagtgaagcattgagaatagtagtagagaataaatgggagttttcttttgaaggaataataagattctggctatatttttggaattagggccaaaaatacttattaatgaattagatatggggtatgagataaacagaggagtcaaggatatctccagacactggacgaggactattcctttcccagagactaagcgcagggctgagaaggaaggcaggctaccccaacaaggcgacattttagctcccatgtgctcatccttgccctacactctccccattatattctagagtagctcagcttatgctagacaatcatgctgtgtgagtacacatcatgggctgtacattacgggatgtcgtatgagctgtgtttaccagcagagatcacagctctacaagttgaagtgttctctctggtggccccatgtgtacaggctatttgagcatctgaaggtggttagctcctgaggaaaaaaaactccactgtttagaggatgaatgaatctcccagagggaagtatccatcataaagtatttgctctctctgcctgtacttattggaacaactcgggaagtccacaaggacagtccaagtcatctttgtcgtctacttcctattgcattctcagccttgtttcctttttagaaagagcctgttaactatcataagtcaaaaaacagcattctgacctctgccctgtaacttcctcttcttcttataaatacaagggcagaactggcatcccgagaagccaggaagcagtgagcccaggagtcctcggccagccctgcctgcccaccaggaggatgaaggtctccgtggctgccctctcctgcctcatgcttgttactgcccttggatcccaggcccgggtcacaaaaggtgagtccagtgagctttctctcagatgaccaggttcatggtaactcaagctctgtggcagagacacattgccctcctgtaactactctccatcccagacgtggtcatggtactcatttaaaagcagcaccagagtatagacctggttctgtctgcaggctttggaccctgggaggggaatatacacatatggctggtccaatgtggggccaatcatttcccttttcacagcaaaaattatttgataccttcccttagcagacataggactattaagtgctagattaaaagaagtgtagtaaaattacaaatttgtagaaagaagcatagaattgtatgatgctaaaactgttacataccatctagtagtatctatcatatcattttggagaagaaatggaacaagccacacaaatgactcaaccaaggtcacctaaccatcgtatttttttgtttaacaaatgcacttctagtacttcctatgtacagggcaggcactgttctaagtgtcttacagatattaacacatcagttccacctaacaaccctgtgggatatgtattagattttaaaaaatgcaaattttttacttttgtagggaagaaacaaaacatcaacttttatatggtttttcatattattattattgacattttacaaatgagaaaactgaggcacagaaccttagataacttggtagatcacacaactattaagcggtggaattaaaatatgagctaattaggaagtagttatggaacgacaaggccatttaagatcttttttttaccttacccaaaccatattgagcatattaaaatatacccacatgtctcattacatataattcatttaatgtaaccatataagaaataagttgaaaacactggaaagcaattgggggactaattcggcagctgaatcgttattgccaagtctttatgtttcaaaatgttaagtaaatatcaactttaaagccagctttaaaattattaatagtatatttaatataattgttaaattatattaaatgcatagtcattaaattatattaaaagtatatttaatatccttattaaattatattaaaagatatttaatatagtcattaaattatattaaaagtatatttatttttaaatatatgaaaagtacacatatattatattaaaagacacatgcacatgtatctttattgcagcactaatcacaatagcaaagacttgaaaccaacccaaatgcccatcaatgatagactggataaagacaatgtggcacatatacaccatggaatactatgcagccataaaaagaaatgaattcatgtcctttgcagggacatggataaagccggaaaccatcatcctcagcaaactaacacagaaacagaaagccaaacaccacatgttctcactcgtaagtgggagttgaacactgagaatgcatggacacagggaggggaacatcacacactggggcctatcggggagtggagggtaaaaggagggagagcattaggacaaatacctggtgcatgcagcagccctagatgatgggttgataggtacagcaaaccaccatggcacatgtatacctatgtaatgaacctgcgcgttcagcacaggtataccagaacttaaagtcaaataaaatttaatttaatttaactttaaaaaaagaaaaagtctatttaatagttattacattatatttaaaatatatttaatagttattaaattatattaaaagtaaatatttattatattttattttattttgagttggagtctcattctgtggcccaggctggagtacagtggcaccatcttggctcactgcaacctctacctcctgggttcaaacgattctcctgcctcagcctccctagtagctgcgattacaggcacatgccaccatgcctagctaatttttgtattttttttttttagtagagacgggatttcaacatgttggccaggctggtctcaaactcctgacctcaagtgatccgcccgccttggcctcccaaagtgctgggattacaggcgtgagccaccgcacccggccaaattttaaggctagctttattctgtgagacagtcaattgtggaaataaactaactttaaggattaaaatttaaaagaaaggaaaaatgtttaaagcttagtttcatttgcctaacaagcataaggcagctccacaatcccatttccaaagcacttggcgctagatgaattttggaatgcagaatttctcaggttttaaaaagttaatatgatatgatgcagcaattctatttctgggtatatatccaaaataattcaaagcaggtacatgaattgatttttatacacccatattcatagcagcattattgatgacggtagccaaaaagtagaagcaaactaagtgcccatcaaaaggttagtagataaacaaagtgtggttcatacatacaatggaatctatttggcctcaaaaagtaaggagattcccttgaatgttgaagtaagaaaaaataaaaatttaagtaaggagattctgacacatgctacaacatggataaacatcaaggacattatgctaagtgaaataaaccagtcacaaaaggacaaatagtgtatgattccactcacatgaggtacttagtcaaatccacagagacacgacacagatagtgattgtcagggattaaggggaggaagcatgaggagttgttgtttaatgaatacagagtttcagtttcacaaaatgaatgaacggccgtgaaaactgcatagttatttgagtgtatttgatgctattgaactgtatacttaaaatagttcaaatggcaaattttacgttatatatatatatatataaccacgatttaaaaatgatttagtaaaaaacttaaacatatattgatggtacttatccctgatgaggcctgggaacagtattttaatcaaacacagcaacctcctgtaacaaacacatgaatatttctactaactgggataaataatgaccataatagctgcacttcacttaaagggatactgtgccaccatatgagctgatgaacacctctctgtttccagagccctgtggattccagaaatgtgtagagagacttgtagactgtgtcacatcatgtagacattccattaactgaaccatgttagattttgaggtttcttttagtatttcagagtcaacacagtgttttcatgtctacattttcaaaaggtccctgaaaaatctcagggccctaaaggaataaatgggccaggagtcaggcctagagcccagacaggtggtggtggtccagcttcagggacctttctgcctcaggaggaggatgagcaatggggtgggtggagatgctgaaacaatgctgccgcccagtgatttccttccctgtcctgtctgcttcttccagatgcagagacagagttcatgatgtcaaagcttccattggaaaatccagtacttctggacagtaagtgatcagatacggcatatatttaaaagcagccagcaggtgcaggtctgcactatgggatccattgtccctgtttacagaatgggaggagaatgagagggtcctgagggtggtgaacatctccaaggaagatcaggacgggctatgggaaccccctccatagatgccttctctgttcccctctggctgccccaagagtctgctcctttggggcagaaggtgctctctgatgcctgcaggtgtctgcagatgccttccccttctaggggaaattttcctggtcctgctctggcccaccctgagtgccctcagacacacagctcaactctgatgagggtctgaagcagggagatgccagcaagtgctggtcacggaggaggaaacatctcttctgagccatgtgccttctcaccctccacagtgctctggaggagaaagattggtcctcagatgaccctttctcatgctgcaggattccatgctactagtgctgactgctgcatctcctacaccccacgaagcatcccgtgttcactcctggagagttactttgaaacgaacagcgagtgctccaagccgggtgtcatgtaggtgccaagctcaccaaacatgtgttgagggagaaggactctgtagcatcttgcagggaggacctgatagactggtgtccatcagggcccaccctctggatcctgccaggtatggggcagctgtgtccttaggaagatcctgcagggcatcggggatgagacactcccagggggaaaagggtggggaaggaagaagaaagcaggcacaagtctgcccaaggatgctcccatgagtcactagggagtcccacaggctgagggggtctcaagagcacaatggccctgagctgccatcagcagagaatgaaaaaaaaaagaaaaaaaaactggctatattgactgggaaatctgaggggcagggagaatggggccccctgtccccatgtgctggacacacctcagtttgtaacttttctcccccttgttccctagcttcctcaccaagaaggggcgacgtttctgtgccaaccccagtgataagcaagttcaggtttgcatgagaatgctgaagctggacacacggatcaagaccaggaagaattgaacttgtcaaggtgaagggacacaagttgccagccaccaactttcttgcctcaactaccttcctgaattatttttttaagaagcatttattcttgtgttctggatttagagcaattcatctaataaacagtttctcactttttttgtgtgatagggtctctgtcacccaggctggagtgcactggtacatcttggctcactgcagcctaatctcctgggctcaagtaacccacctacctcagccccacaagtagctgtgaaacagggtgttaggacagagaaaagagacatacaaggtggggaagctcgacagcaacataggtttattggacagagaaacctgtggaaggggaacaccagcgagtgctggagcccccgtcctgcgtacagactggggcaattataggtctggacaggggaggtggggcagtgtggctagctgcctggcaggatgtaataagggagccatttcctgcagtcaggcagtgtggcctgggatctgcttggcaaaatgcttttcatggcctgagcccctatggaagtttcctccctgatcagggtgtacaaaatggcaggggtttacttgatggcgccacttgggctaacagaggagagttccctgacttcctcacaggacttgtgacggggtgtggctcatttgcaaggctgctgcacgttcaaatcccctgtgggagggggaacatgcagacaggcaggtgcaggagccagggcgagcgcttttgggctccatccccatggtagcatctaggggtgtgttacaattagtgctctttagcagttgcttttcgtggatggctattccactcagtggagagtcagggtgacagccttttatattctgctctcttggtatccgtctttgtctggcatctaggaagaatcaggtcacatcaacctgaaggatagtgaaggtggggattttactgagtgatggagttggctctcagaggaatggatgtggagctggaaaggggatggagtgggaagatgatcttcccctggagttcagccatccccggcttatctgctttccaaccgtcctcagccgaactcctcctgacattcagatgctccttctcttctctcctctgccatgccattttgctactctgctgctcttctgttcctctgcttgtagagcttggggtttatatgggcacaggataggggtgtggcaggccagagtggtcttggaaaaggcaacatttgggcatgaaaatgggaatgcttgctcccatttagggccatggatttccaggcttcagggtgggcctttgttggggaactgccctcttctacccagtatttccttgcctgtatctgtatcatttccaccctctaagaggcccatctaattgccattagaatatggacaatgacctatcttagctacttcctgctgacagaggacattgtttttggggaaaacagaagtcagattcctcccagaggtctatctaaggatccctggggaaagggagtcatcatccaaggctccggttgcctgaccatttggattttcatgacctcaaatttgagagaaaaaaacaagttttataaggtgttaagtatgcatgggttaaacgtgtattatacaaagaaataatctagtgccaaagattacagaaataggaaatgtaacatactcacaacattgtaccctgagctgtttcaccctggtgaaagaaattaagacttgtatgggtgtggttaaattttagaagagagataactgttcttgccaccaaagattaccgaaataggaagtgtaatatactaacaacattgtaccctgagctgtttcaccttagtgaaagaaattaagacttgcatgggtgtggttaaattttagaagagagataactgttcttgccacatctgtaggagttaacagatgcaccttaggaattctggggtttgtgggtttgcatggtgacccttaaagcttctgcctctttcttgtgtctccctatctgtactgtaaaagaccaaggtggcctctttcaggaggtctcctaaagtactccccgacgccagggcccatttctgcaacttccctctgatatcaggggctgcctgagtaatacatttatcatttaggattagttgtcccatgatggaatcgggacacagagacctatgctttacaaaggtccctcttagcctccccaagaaggcagtgggattttcattaaatccctggtctctcatggatatcttgatatagtagagaggcttagttctaatcctacaaaagccctctattatgcacacctgaaactctcctcttgcattctcccatcttgtcattgggatcccatttagggacattcattgatactccttctcttccagttggataatattcaccccctttcctgggtgctacgtatgatacaaacctcatccccagatctctctgtcacttgcagagtggcctgcttctcagtgttagtcagggtttggttcaaagtaacatgacgtcttcctaggagagctcaaatacttgggttaagttctgaaaagcctctatatatctctcagggtcatctgaaaacttgccaagatccccctcaatttgcttcaagttctgtagagagaagagtacctggaccttatggggtaaattcaccaggcatctgttggaggggaaagaatgagactggggcttgtctagggtgagaatttctaggagggggcaagtgagagactgaagctggataggggggatggggtggacctggcggagcagggctggagggagctggctcctctgctggggatgcctctgggatttgtttttttggttccctgggattgccccttgcagcctctcccgagatggcaaaccggtctggattaattctacattgtcagctaaggtctggattgccctgcacggtatagaaagcctgcacatatgggcctcagagcatttgccctcacgtttacagaaaagctccaactgctggatgatatcgaaatgaatggtttcttcctgaggccaagccagtccttcataatttgcccaaacctttgtgcagagggctatgagccattttcctccagagtctgagggtcaaagcagtcccagtggttcaggatacactctagaggagtataagctgggggtggtgaagacagctgatcgcccattctgaaagacaagaaatagaggtgaccctcatttccttcccttcttttagtgataactcagggtttgatggagagaaagcaggcatccccgttttctgtctttttgtccccatgtaccagtgaccttggcagatgccacccatgggtgctgaagcggcttttactcatgttaacaggggggcctgggggggtgagagtatccactcttacacattatgccctatttcccttgctgccaacaacctttgagttccctgggcctcatctatgtcatggagcatggcctcctttcatgaagcaaggttttagtcagcaggaattggcccttcccatttacattgtgcctgttgccaggctttggatccctcagatctggttttcctttctagggcctcaacctgaaggctggaattgagtttcagacaaaaaaggtatttcaggggctgcatgaatctgtttagatcaagtctcaaaggggccctgccgaatttgcagctattggccagcaggggtcgctcctctgttattttccctattaaaagcagcgtgccggggaaaggaaccctctcacttagaaaagaaaaaggaaaccgcttatactactaaaaaagagggaaggaacttcttgctctgtgcaaatgggttcctttattgtattccgcccctggttcagaccagtaaggacccctcaaccatgggaggagaggctctgctggtgcagtgagtgggaggcaccggccagccagctgcactagggccccagcggcagccaaggttttctcccgcccctcgtggccactgggtgcagctcatgtgcagagctgggaggagaggggagaaggcggggaggggaaaaggaggggaagggagaaggaggggagtcactcatgcactgcgcacacctgcggctggggatggcacctctaagaagaaacagaaactacattgttgtgaattgcacatctgatggctgaaccaagcataccttgtacttagtaacatctcggtagttgcagcaaagcccttaatactataaaagaagagataggagccatttcaagccatgaaagaagataccacagcaaagtctggggttcttggcctacagagttcagtcttggagccttccagcaacaaaagatggcttctgttgccccaggactttattccatcccgtgcaacagctagacctccatgaagagaaacagagccaatattccttttacccaaaggaaaaagagaggtggcagaatcttggaaaagaggcagatccgacagttctaaatctgtactcatccttgtgctgtatcccagacgagcccccagatgaaatgggagagttccctgaccccctcacgggacttgcgacaggggtgtggctcatttgctccactgtcacacactttaccccttataggagggggaacacacagatgggaaggtgcaggagctggggcaagcacttttgggctctggccccatggtagcatccaaaggtgtgttacaattaatactcttttagcagttgctatctgcagacggctacttcgtctcagtggagagtcagggtgacagccttttataccctgccctcttggtacccaggtccttgtctgacatcctggaagaatcaggtcatcgttcaagaagacttgaacgatggtgaatgtggagattttaatgagttatggatgtggctcttatgggatgaatggggagctggagaatggatggagtgggaagatgatcttcccttggagttcagccatcccgcggctgatctcctcttcaactgtccccagccgaacttctcctgacattcagacgctccttctcgtctctccttctctgccactgccgttctgttcctctgctcatggagtttggggtttaagaggtaaagaggcagaactattggatctgtctcttttccaagatcctgccgcctctctctttcctttgggtaaaagtaatatgggctctctttcccttcatggaggcctagctgtcatatggacacaggataggggcgtggcaggccagagtagtcttggaaaaggcaacatttgggtgcaaaaacaggaatgcctgttccaatttaggggcgtgggttcccaggcttgagggtggggcatttgccagggaactgccctcttctacccagtgtttctctgcctcccgtccatatcaactgggactacaggtacatgccaccatactccactaattcttatttgttgaagagacaggatctgattatgttgcccaggctggtcttgatctcttaggctcaagcgatcctcctgcctcagcctcccaaagtactggtattacaggtgtgagccaccatgcccagcctttacttgaattttaagaggaaaaagaaactaaaggaattactgaactttggataatcattatcttcaaaacaagggacatcataatacaatttttacaaaactaaaaatattactcatccaatttagattgaatatgcatcaaagatgtatttaactcattagtgagagaactattaaaataattcaaagatcatttgagtaacagagatttgtatagtttactggggatgacgttctgaaataagtttgttaaattagagcacacattaatatcctgtggatagggcaataaaaaaacctgtaacctctgggattatcttttttaatagacagaaatcatttgcatctggctacacacaagtttaaaatttaacatgtactttctcagaatgtagggcctgatcaatggtaaacagaaatcaatcaaaagttcattcccctacagatttaaggaatgccgggttgggcctgttagtcaacattgtaatatgaccttgaaaaccatgcagtcatccttttacctgtttttttttttttttttttttttgagacagagtcttgctctgtcacccaggctggagtgcagcggtgcagtctcagctcactacaacctccgcctcccgggttcaagcaattctcctgcctcagcctctctagtagctgggattacaggcgcatgccgccatgcccagataattttcgtatttttagtagagacagggtttcaccatgttggccaggctggtctcaaactcctgaccttgtgatccgcccgcctcggcctcccaaagtgctaggattacaggtgggagccactgcgcctggacccttttatctatttctaagttttttattagatataaatttagttagcagaggaagttattcgagttacgggtggcaaatctgtacaggtctgcagcaacctcaattcttccctcctcaggaaaaagaattcaaatgaggggcctaagtgagaagagactgaggcaagtgttagagcaggagtgaaagtttattaagaagctgtacaggccgggcgtggtggctcatacctgtaatcccagcactttgtgaggcctaggtgggagaatcacttgaagtcaggagtttgagaccagcctgttcaacatggtgaaacaccatctctaataaaaattagctgggtgtagtggcaggtgcctgtaacccaagctactcgggaggctgagacaggagaattgcttgagcccaggaggcagaggttgcagtgagctgagaccacgccactacactccagcctgggtgacagagtgagactccatctcaaaaaaaagagagagagagagaagatttagagcaggaataaaaagaaagtaaagtacgtttggaagcaggccaagcagacattttggaggtcaggtgtggggtttgaccttttgaatcagggttttacatgttggcatacttctggggtcttgggtcccttctcccctgattcttcccttggggtaggaagcactagcacaatgccctacttgggaggggagcatatgcagtgtgtttactggagctgtacgcatgctcacttgaggtgttcttccctttactgatggaatgcccccagaaggtcctagatgagttaaactccaccattttgcctcttgacgcgcatgcatgagctcactcgcccaactcctgggatcttaccaggaagatgctgatgaccattttcaggttttttctatctataggcacattgcctttccctggtgctggctgcaaccaattattattctagagagacagttaacaacctcctgaccatcacctgatggtcacctgacattcctggttgggaggagcctctcctgccctgtttatgtatgactagctacctacagtaacaatttctaagagatttcgcctctaaacttaaagaacattaagaaaaacatttaaagatatagttaatattaattttatatacatctctattaaagtatataaatttatatgtataattagtacaccttggaaaactgtctcataaaattcaaaagacagcactgaattctaaacaattccaaacaacaaaacattttttatttaaaaaaaagtttaagctctatgcttacttttagtgtgatttgtctaagaaatcaacaggagaaaactgatcaataaccaaataacttttataacactaaatcacaactgtgttagaaaaatgccctgagaaggtgataaaagcttgaaattattataacccttaagaaagtaaacacaaattcatattacatcttatatcctccctactaaaagagctaatcttgaagttttaactacagtttaggaaacggtgttttggctgggtgtggtggctcacatctgtaatcccagtactttgggaggctgaggtgggaggatcacttgagcccaggagttggaggttacagtgagctatgatcaagccactgcatcccagtctgggtgacagagcaagacctagctcaagaaaaaaattaaaaaacaaaaataaaaactgtcttttatcatttgcccagatgacacaacattgtcatttacttaatatttaacccatgataacctcatgtagattcttattttccagcaatttttaattgaccttgttaaatcaactttagcctaaagctgccttctcacttattttaagttcagcctaatctgtacatagtgaactgtaacctgaatcgaggtgtaaacaggctgtaacctactctcgtgccaatcactgagttttgtccagtcaaaggggaccacctattcaaaccatgtttgaataaggtaaacacccagctgtaataaattcagctgttgctgtacctcacttccatttcctgtgatcacttttctttttctgtctataaatcttctaccacgtggctgtgctggagtctctatgaacctactctggctcaagaggcttccttattcgcaaattgttctttgctcagttaaactctgttaaatttaatttggctaaggtttttagcaaccttttttcttattaaccaagagagtaatacttgtcttcctttcattatcatcattctgcatttgtacttgcagactcacaccatttgttttatactaatgaaaccaactttgcaaaaattataacagtgagaaaaccatgacaatgggaagatctgatctagcccactctcttcttgcctttagctttcaagctgccagacatttagtttatagtttagatgattagcccttccccaaaactcaaccacttttgtaaagctaatgagagactaccaggctaggaggatagaggagcctgaattttgctaaggtgaaagtgcagacataaatgattgccagccattattgtggaggtcacaagatatgcaacttcccaatttctcctgcagataacatcactactgtagaacctaagtttggccttctgagataccttttcaggtttttttttgcattgagatactgatgatggttccacctggacccaccaacagctcctgcggcaccacccagaagccattcagcctacaggaggtgaatttcccacacctctatgattgcaccccccaagcagtcagcagcaagctccctttgcctagccacattcatctcctcccccaaactacctttcaaaaacttttaacctgtgagccttcgatgagattgatctgagtaataactctttactgcaatgcgatggtttttgtgcagcaggtacggtatctatctcaccgttggagacattcttcaaggaccttgtaactgcacacttggaagtttgttaagggggtaaatctcatgttatgtggctgatttgttttgttttgacacagggtctcactctgtcacccaggctggagtacagtggtgtgatcataggtcactgcagcctgcagcacgcccaagcacaagaaatcctcctgcctcagcctctcaagtaactgggactgcaggcccgtgccaccaagcctgtttttttttttttgtagaaatgaggtctcgctttgttgcttaggatggtctggaactcctgagctcaagcttaagtgctgggattacaggcatgagccactgtacctggccatgtttttttttaatgtctcacacacacacacacacacacacacacagcctgttgtatgggggcgggggaatgaggagagccattaaataaataagcacttaaaatagaatgtgactggtgctatcgtagatttaagtaccagatagatgctgtaccagaaacactgaaaagggacacctggcccagcctcgtgggagcgacagccaagaagtctttctggcagagctgactgctgagtagagttaatgggttgctaggaattagtattgcacagggccaatttacccattaggcatttagtattggggtcctgaaaaaaaaaattaactccaaaagaaaaaagtataaaatctaaattaataggtgcatcactatttaaacttaatatgcatttaaatgccattacattagaaactagaggagttgtgcatataaggagaaccctattctgaaggactttctacactcatacacaaaccttggagttgactcaagtccatgagaagccactggcagattctgtttgaaaaatcacagccaagttcgcagattagagaattccctctggtggccaccctttatcataggctttggaggcacttgaaggtccaagatggggtggttagaacttgacgtggcatcatcagtgcctgggaaggtcttctagcctctaatcttgagattttccagttctccattttcgtggccagcttgactcattcttacctttgaagtccctttgtttgggaggccgaggcaggtggatcacctgaggtcagtagttcgagaccaacctgactaatatggtgaacacccccgtctctactaaacatacaaaattagctgagtgtggtggcacatgcctgtaatcccatctactcaggaggctgaggcaggagaatcgcttgaacccagaaggtggagtttgcagtgagtgagaatgcaccactgcactccagcctgggcaacaagagcaaaactccgtctcaaaaaaaaaaaaaatccctgtttcatagtaggtagttattcagacatgagcagggcgggagagccccctgccccaccatgaatgtcagacaaccatcagatgatggtcaggcagttgttacactgtctctctaaaacagtaattggtcaaagccagcaccagcaaagacagtctcccaatagatagaaatatctcaaactggtgatcaacagtttcccattaagatctcaggagtcaggcaagtaggctcaagtatgtgcactaagaggcaaaatggcagagttcaactggtatgtgacctaggaacacttgactggtcaagaaggaatgcctcaagtgagcatgcgtacaactccagtaagcacactgtgcatgcagcccctccctagtgctggcagaccactgcgcatgcggaatgccagcatataaaaccccaatccaaaggtcaaaccaggcacttgaatctctccagtcacctgcttggcacttttccaagtgttctttactttcattcctgctctaaatcttgtctcggtctctcactctgccttatacccctcagttgaattatttcttctgaggaggcaagaactgaggctgctgcagactgatatggattcaccactgctaacacctcctggttggaactacaggaatagaactggaaagggaaaaaaggcagcattcaccacatcccaatcctgaatccaagagtctaagatagtcccccactcctatctcaggcttagaggattagattaatctcctggagggaagactcttccttgaaacatttttttttatctgcctgtagctattgggataattcgggaaatccacagggacagttcaagtcatctttgtcctctactttctgttgcactctcagccttgttctctttttagaaactgcatggtaactattatatagctaaagaagagcattctgacctctgccctgggacttcctggatcctcctcttcttataaatacaagggcagagctggtatcccggggagccaggaagcagtgagcccaggagtcctcggccagccctgcctgcccaccaggaggatgaaggtctccgtggctgccctctcctgcctcatgcttgttgctgtccttggatcccaggcccagttcacaaatggtgagtccagtgagctttctcccaggtgaccaggtccatggtaactcaagctctgggacggagacatgttgtgactactctccagcccagacatggttatggaacttatttaaaaagcaccagcagggtatagacctggctctgtctgcagcctttggaccctggcggggaaaggtacacagatgactggtcccatttggggccaattatttcccttttcacagcaaaaattatctgattttttcccttagctgatattttagctggaacaaaagaactgtaattaaattgtaaatttgtaaaaagaatcatacaattttatggtgctagaactgctatctaccatctggtgtaaaattatgatttgtgagaggaaaaggaaccagccaggtaagtgactcacccaagatcactgtctcacttgttcctgtggaatcttaatttgtggaggtgaatgtcaacgcaaagaggtcaatgacattgaaaaaagaatgtattatttacatttcccaagagaaggaggtacaccgtgacacacggggccccaagggaagcatccagggcaggagtcacgggcaggagtcacgggcaggagtcacaaacaggagggaagggacaacctatgccagaacctttattggggtttctcgggggaaagcaaggcagcacagagcatacactttagggctgggtagtctgaataagcctttcaggctttggggtatagggatagtctctagctgtctagtactcatccttaggatgatttagagcagtggaaatactggcttggtgtgtgtgagttagcaaaggaggtggatgggcatatgggctcaggattttttgatttgtatatgaaaggtctaaacccttagctatctctatgaattggttagccctgcaatgggcagtctctcccgagctgtcaagatttttttttttttttttttttttgagatggagtttcactctgtctcccaggctggagtgcagtggtgcgatctcggatcactgaaagctctgcctaccaggttcaatgaattatccttcctcagcctccagagtagttgggattaaggcatgcgccaccaagcccagctgatttttgtgtctttttagtagaggcggggtttcaccatgttggccagactagtctccaactcctggcctcaggtgatccgcccacctcggcctcccaaagtgttgggattacaggtgtgagccaccgcgcctggccactgtaaagatttttttttttttttttttgagatggagtctcactctgtcgcccaggctggagtgcagtggcacgatctcagctcactgcaagctccgcctccccggttcacgccattctcctgcctcagcctcccgagtagctgggactacaggcgcctgccaccacgcccggctaattttttgtatttttagtagagatggggtttcaccatgttagccaggatggtctcaatctcctgatctcgttatctgcccacctcggcctcccaaagtgctgggattacaggcctgagccaccacgcctggctgcatttttctatttagcataatacaggtatgcaatcccttatcaaaatcctatcaggctagatgtattttggaatacagaatttctctggtttttaaaaggtaatacacgctaggcatggtggctcacctataatcccagcactttgggaggctgagctaggagaattgcttgaccacaggagttcaagaccagcctgggcatcatagcaagacctcatcactacaaaaaggtaaactattagctaggcattgtggctcgcacctgtagttccagcttctcaggaggctgaggcaggaggatcacttgagcccaggacctcaaggctgcagtgagttatgatcataccactgcgccccagcctgggtgacagaaaaagaccctgtctcaattaaaaaaaaaaaaaaaagtaatacatacctagatggtacttatccttggtggggccaaggaagactatttcaatcaaacacagcaatttttctgtagcaaacacatgaatatttctgctaactgggatgaataaataccacaatagactcacttcacttaaggggatactgtgccaccataaacgctgataaaacctctctgtttccagagccctataataaaaaattattccagaaatgtgtagaaaaacttgtagactgtgtcacatcatgtagacattccattaactgaaccgtgtgaggttcagttgcttttagtatttcagagtcaatacaaagttttcatgtctacattttcaaaaggtctctgaaaagtctcagggccctaatggaataaatgggccaggaggcaggcctagaacccagacaggtggtggtggtccagcttcagagcctctctgcctcaggaggaggatgagcaatggggtgggtggagatgttgaaacatactgctgccacccagtgatttccttccctgtactgtttctttcagatgcagagacagagttaatgatgtcaaagcttccactggaaaatccagtagttctgaacagtaagtgatcagatacggcatacatttaaaagcagccagcaggtgcaggtctgcactatgggatccattgtccctgtttacagaatgggaggagaatgagagggtcctgagggtggtgaatatctccaagggagatcaggacagggtagggggaccccctccatagatgccttctctgttcccctctggctgccccaagagcctgctcctttggagaagaaggtgctctctgatgcctgcaggtgtctgcagatgccttccccttctgggggaaattttcttggtcctgctgtggcccaccctgagtgccctcagacacatggcaaaaccctggggagggtctgaagcagggagaggccagcaagtgctagccgaggaggagaaacatgtcttcagaggcttgtgccttctcaccctccactgtgctttcgaggagaaagatttgccctcagatgacgctttctcttgctgcaggctttcactttgctgctgactgctgcacctcctacatctcacaaagcatcccgtgttcactcatgaaaagttattttgaaacgagcagcgagtgctccaagccaggtgtcatgtaagtgccaagctcaccaaccatgtgttggggaagaagcagcccacagcatcttgcagggaggacacgacggatgggcgtccatcgggttccaccctctggatcctgccagatacagggcagctgtgtccttacgaggattctgcagggcatcagggatgagacactcccagtggagaggagatagggaaggaagaagaaagcaagcacaaggcttcccaaggacacttccatgagtcattaaggagtcccacaggctgagagggtctcaaaaggacactgtccctgagctgccatcagcagagaaaggaaaaaacaggctgtgttgactgggaaatctgaggagcagggaggatggggccccctgtctccatctgcccacacctcagtttgtaatctttctctcccttgttccccagattcctcaccaagaaggggcggcaagtctgtgccaaacccagtggtccgggagttcaggattgcatgaaaaagctgaagccctactcaatataataataaagagacaaaagaggccagccacccacctccaacacctcctgtgagtttcttggtctgaaatacttaaaaaatatatatattgttgtgtctggtaatgaaagtaatgcatctaataaagagtattcaattttttaactttgcttgagttttaagaggaaataaactaatataaaactgaagcaactgctgagccccaacatgattaaatacaaattcaccttatatctcatcttctcccttctactgaaatagctaatcttcaaagggttggctacaatttcaagaaagtttcttttactccatcatttacccagttcacaccattttctactttacttaacatttgatccattataatcccataacaattcttatttttctcataatttccttttgatatttttctattaacccaaagagaaatactttttgtttccttatcattccacatttgcacttgcatatttacaccatcggtttcatggtaactacttcattcttcgagacagtcttcaaggaccttctaacttcctattccaacttgcagaaatgctttctggacctgccaaaataataataataataataataataataagtcatactgggatttcttctcatcacacacctgagttcattccaccatgacacgtagcccaaaacttcctcttcctcttccttccttcctaaaagggtttatttttcattttgctagaatatctttgaactgccttctgctttaaaagatgacaaaagcaaacactctcctttgctccatgggtgccagggcaggcatccccaactcaggcttggccaacctatgctccctttcagagatctgagcctggaacaggtgttgcagagaagcagaaaaagagaggactcacaccagttgactcttgtggcatgattttggatgtggcattggagctggtctctctaggattctacctcggcctcccaggttcaagcaattctcctgcctcagcctccctactagctgggattacgtgcctgccaccagacctgactaatttctgtatttttagtagagacagggtttcgccttgttggtcaggctggtctcaaactcctaacctcagatgatccacccacctcggcctcccaaagtactggaattaacggcatgagccactgcactcagcctctacctacttttcaagccttcctgatactacctaaaatctttgcagtaaagtcctttttgcttaatcaaccagagtcagtttgtatagctttccaacaaaaaactccaactgatatgaacaataaactttctgggactttgaaggtctaaaaactttggtctttaagtgtgaaaatggttcaactgaatatgaaagttcatgttgaaaataattttctctcagaataatgtagacattcttcaattgtcttctagcatctcagacagggccaaaattccaaagccaattgatttcttattccttagtaagaaaaaaaatttttagaccctctgggaatttttagaatttttttctttttctattgtctttatttttataatttcaacttttattttggattcaggggttacgcgtgcaggtttgttgcctgggcatattgcatgaagtttggggtacaactgatcccatcacccaggtactgagcatagcacccaatagtttttcaaccgttgcccccttccctccctccctcctgtagtagtccccagcgcctattgttgccatctttatgtccatgtgtaaccaatgtttagctcccacttacaagtgaaaacatgtggtatttggttttctgttcctgcattaattcagttaagataatggcctccaactttatccatgttgctccaaaggacatgatttcattctttttatggctacataagaagtagctcatggtgtatctgtaccacattttcttatccagtcgacactgatgggcgcctaggttgattccatgtctttgctattgtgaatagtgctctgatgaacatacgagggcttgtgtctttttctgtacaatgatttttattaatatatatccagtaatgggattgctgggttgaatggtagttctgttttaagttatttgagaaatcaccaaactgcttttcacagtggctgaactaatttacattcccaccaacagtgtatatctgttccctttttctctacagcgtcaccagcatgttatttttttgactttttactaatagccattctgactggtgtgagacagtaactcattttgggtttgatttgcatttctctgatgattagtgatattgagcattttttcatgtgtttgttggctgcttatatgtcttcttttgaggaacgtatgttcatgtcttttgcctattttttaatggggttgtttttggctgttcaactgtttaaggcacttacagattctggatattagacctttgctggatgcatagtttgcaaatattttttcccattctgtaggttttctgtttactctgttgatgagtttcttttgctgtacagaagctcttgagtttacttgagcacttgtcaatttttgtttttattgcaattgcttgtggggatttagtcataaattatttgccaaggccaatgtccagaatggtgtttcctaggttttcttctaaggttcttatagtttaaggtcttatatttgaattttgaatccatcttgagttattttatgtatatggtgaaaaataggggtccagtttcattcttatgcacatggctagccagctatcccagcaccatttattgaacagggaatccttacccctttgcttatttttgttgactctgtcaaagatcagatgactgtaggtgtgcagctttatttctggattttctattctgttctactggtctatgtatctgtttttgtaccaataccatgctgttttgtttactgtagccttatagtatactttgaagtctggtaatatgattcctctagctttgctttttgtttaggattgatttgaccatttggactctttttattggttccatatgaattttagaatagtttttctagttctatgaaaaatgacattggtagtttgatagaaacagcattgaatctgtagattgcctggacaatacagccattataatgatattgattcttccagtccatgagcatggaatgtttttccatttgttcatgtcatctatgatttctttcagcagtgttttgtaattttcattgtagagatctttcacctccttggttacatgtattactacgtttgtgtgtgtgtgtgtgtgtgtgtgtggctattgtaaatgagattgcattcttgatttggcactcagcttgaatgctattggtgtataaaaatgctactggtttttgcacattgattttgtgtcctgaaactttactgaagttgtttatcagttccaggagacttttggcagaggctttaggactttcatatcattggtgaggttgtcagcttaatgtctggcagacagagtaaggggatagggatgggagtagttttcttgtccttgaccagaagttatccagggcactgcccaattctctctctggtccactgtcccctccaagaggttcccacagcaaatatccttttttattttgaaaactgtgcttgtagctttatcctggggcaaatgccctacctgactatcctgaatgggaactagcaaggtcatagcttattcactcaatgcaaatgtcttctcccagtacccactgactctgatcttcacattatccagggttctgctgggaaaatcctctttttctatgatcttctccttgacctatatgaggatacatgttttttcagccttcttgtgatctgccatcaagctgacccatgttctttttttgttctttcttttttttgagatggagtcttgctctgttgcccaggctgaagtgtagtggcgtgatcttggttcactgtaacctccacctcccgggttcaagcaattctcctgcctcagcctcctgagtagctgggattacaggtgcctgccaccattcccggttaatttctgtagtttttatagagatggggtttcaccatgttggccagtctggtctcaaactcccgacctcaagtgatctacctgcctcggcctcccaaagttctgggattacaggtgtgagtcactgcacctggccccatgttctttatataaaacagaaatgtctcaccttatggtagaccaatgtcatattttctgactccttactgctactatgagttctatttatttttatatttcttctgtcatttcaacaagatttacagagatgaaaaagacaaacacagatgctcagagttctggcttactttgttttgtttattgagacaggctgtcactctgtcacccagtctggagtgcagtggcacaatcttggctcattcaccttggctcaacctcctgggctcaagtgattctcccacctcaggcccttgagtagctgggactacaggcgtgcaccactccacacccagctaattttgtttatttttttagagacatggtctcacttgttgcccaggctggtcttgaactcctgggctcaagtaatcctcctgcctcggcttcccaaaatgttgagattacaggtgtgagccaccacacctggcgtctggcatacattttgatccagttatgaccttttatgtctctctcactgctccactgaatgctgttgaattcagaagctttgagttgaaagcagctcactggtacctaaatatatgactaggggatggcaatccggaagcttctggattctccatggagattttgtctcagagccttagaaaaaaatttaaatggttattcaattaaaattgtcctagacctaagtaggattcatgtggtttcactgggttctctctgacaggtcaggtttttagcttagaaggatgaaatgaggagggagagcgtctgggcagtgtggatgccaaagggccacttatgaaggtgttgggtcatggcaactcaacagaaatgagggatgaaaaccaagactttccattctttttttttttttttttttagatggagtctcactctgtcacccaggctggagtgcaggggtgccatcttggctcactacaacctccacctcctgggttcaagtgattctcctgcctcagcctcctgagtagctgggattacagggacccaccaccacgcccagcagatttttgtatttttagcagagacggggtttttccatgttggctgggctcgtctcaaactcctggcctcaaatgatctgcctgcctcagcctcccaaagttctgggattataggcgtgagccacccaccagacccagcccaagattttccattctaaccaagcatctagccactcacagaaggtctttgaggtcttgaaggggaaaaaaacatgctatgtgcaggttaattgcataatacatactctgttctcgcagttcctcagaaacagcatgttcttttttgcttccttgctttgtgtggtgccctctgccaggcatgccctcctctcaactctgcccagcaaaactcaacccaacctcaatggcttagattaaatgctaccataaaaccttcccccttcatcccagccagaaggacccacctccatttctctggaatcttgaaacatgtatttattgccactcaaaaagatttttattgagtggctgctttaggttatgcattgtgctaggcattaggaaaaccatgaaaaccaaacaaagtagactattgcccttcaagaatatgtcagtccagggccgggcacggtagctcacgcctgtaatcccagcactttgggaggccaaggtgggcagatctcctgaggtcaggagttcaagaccagcctggccaacatggtgaaacgccgtctgtactaaaaacacaaaaattagccagacgtggtggtgtgcacctgtaatcccagctactcgggaggctgaggcaggaaacttgcttgaaactggaaggcagaggttgcagtgagccgagatcatgccactgcactccagcctgggtgacagagtgagactctgtctcaaaaaaaataaaaaataaaaaagaatatgtcagtttatagagaagactgaaaataggaataagaatgatgcttgggtgcaaaaagtcatatctaattcattgctaagtctccacatttttatgcaacatcggagcaaaaagaggaggacatttatactagaggcaaccaacctgggactcaagtatccccaggccctagttggactggccagtgactgaagggaccaacataagattgaaccacagcatttagaaagctgtgtgatagatagggcttctgaaactttagcatgcataaaagccaccaggaaggcttgtgaaaacacagattgtgggctcccacccctagaaatctggttcagtaggacaggggtagggccaaagtgtcagcatgtttaacaagtttccaggtaacgctgatgctgcagaatgcagtggaaatttgaagaggactttgtaacttcaccattgtttgcagtattctgaaaggcacatatttctttagtaatcaaaaaataaaagagttgaaaaatgcgtcttaattgtcttttcaaggatgtgtaacaaaatgggccagctcttcacttgtgttgatatctgatttttttatgatgaagctcatcaaagctgtttaattataaaagaaatatggagttggaaaaagttttacacatggttaaatagtctgacgatcaatttggaatttttaaaagtaaaaatcttgagctgggtgcagtggctcatgcctataatcccagcactttgggaggccaaagtgggcagatcccttgaggccaggagtttgagaccagcctggccaacatggcaaaaacttcctctctactaaaaatacaaaaataagccaggtgtgatggtgcgcacttgtagtcccagttacttggaaggctgaggtggaaggatcacttgagcccgagaggtcaaggctgcagtgaggcaagatcgcaccactgtactccagcctggagtgacagtgacagagtgagaccctgtctcaaaaaaaaaaaaaaaaaaattggaaattgtacaaaatagctagaaaaaaaagtgcataaaagtcatcttaaaaatctaaatagagggctgggcacagtggctcatgcctgtaatcccagcagtttgggaagccaggagttcaagaccagcctggccaacagggtgaaaccccgtctctactaaaatacaaaaattagccaggtgtggtggcaggcgcctgtaatcccagctactcgggaggctgaggcagaagaatcacttgaacgtggaaggtggaggttgcggtgagctgagatcataccactgtactccagtctgggcaacaaagcaaaactccgtctcaaagaaaaaaaaaaaatctaaacagagcttcacagaaatcatcaagacataaaataggaaatagaaacattcatatttttattctttttagaaccagagacaagatttaaaagtaatataactcatcccctcaactgagggctcaaccagggccagggcagagaagatgatgcacatggttgaggccagtgggaccagaggccagaatacagccagtgtggccaggagatttgttacatacagggaactcagcaaataagtacatacattgaggttaatgggagcaggagtccccattgttagaggagggagggaaacatagaaacaggaaagactgaaataactctgtggtgtttacttggaattggacatagtggtataaacttttgttttttcatatagctagaaagaggacatagaaattgctaataataggacgagcgcagtggctcacgcctgtaatcccagcactttgggaggccaaggcgggtggatcacctgaggtcagaagttcaagaccagcctggccaacatggtgaaaccccatctctaaaaatacaaaaattacctgggcaaggtgacctgtacctgcagtcccagctactccagagggtgaggcaggaagatcacttgaaccccggaggtagaggtttcagtgagctgagaatgcaccacctcactcctgggtgacagagtgagactccatctcaaaaacaaaaacaaaaacaaaaacaaattgctaataatatatgaaatagatatacttgaaatagacataaatttaaatacatacttatacacatatgcttacatatatttccaggttctagccactaaaagctcagatctaaaagtgatgccattcccatagcaatgaacacaccaagcactcagattttggtttctcaaaatcatttttcagtaaaagaaactgagactcatggaagaaatggctaattccagagctgggccaaggaaagtacaagatgagtctggaacatctatttgtgccaaaaagtaagaaaacaagattaaagaataaaccctaaaattttctagagaggggaaacaccagatcaccacaaatgagtttcagaagaaacatattcttatattccattgtagaattctatacccaacaaaaatatcaatcaagtatgaaggctaaataatgacttcttcaggcaagcatgaactcagaaggtttatgtcctacagatccttcctgtactattcagttttttaaaccaatatatgtatgtgttgctttgaaaaacattttaaatatttttaaaataggctcttcatactcaacagggggcaacaggaggacatttaaggtctctaattatgttgccatcaaatttcattcatctggttgtattgcaattctcctttactttttttagtccctctttgagttctgagacctctgggatcagggtcatcttcaatccctccctccaagcctagcccaggacttggcatatgatactgtgtcaaagaagtgatgtggtcacaaaacctattcctttttcttcctaagcatacagatgatgtatattttccatccctttgtcattatgttggagccaggttacttgatgctggccatggaatgtgggtgaaagtaatttgtaccattttcagaactgatccacaaaaatctcccaatcctcctctgcttctccctttttgtatcaagcttggaggccttgtgctgaaaatggtggcatccaaggtagaaaaaggcctggttcctgaatgagtacatggaggatcccaacacacacaccatcatcccactactgacccacactggactgtaacatgagcaagaaataaacttttatttaattagtctgctggattgtttatgatagcagttggcacacacagactaatgtaggtaggaactcaatacttgctggaaaagtacaggaacttcctgtaagtctcctagaaacaacttggcaggttggctagtttccacaaaaacaagaagtaagcattatttctttccaactcacttttcctataaacaacttgtttcctgagattgttcctgataacaattattatcatttaacttgaagggtttacataatgttgttattgatgataagaaatatagaaaatttttaattgatgactgtctccacaactaaccatgagatttcagccatttcctataagatacacatatgtagacctggctcaatttgtttattcatccttcttttaaaatgtatattcataaagcacctggtatacactaggttctgcgtgaatgggcaaagataaataatagatgttctccatcctgatgattcagatgaggagaggagattaaataaccatctaaccacatcagcaagcagaatgggggatgtacctccaagaacagcatggtgagggcactaagctgagagcctgcggagatgagatctgtcctgcatccaaatcactgtgtgcacatgagaaagtcactggtcctttctgattcccagcttccattcagtaaatggccagtttagacaaatcaaatggcagatacatagcatgcaagctgcactgcaacagaaactgcacgttggtcacagcgtatcttcccaatgtgcctggatatggcctcagaatcatttccaacacagagctccagtccaccactaatcaatgaaacctactagctatccctgaattagacattttctagggttcccaccaagcttctttgcagcaaaagtcagagaaaccaggagaaggtcccaaagagatccactatctgatttcagaaaggactaagactaaaggctttatagaaaacccataagcttttacagagctccgttgggagtcccatgtttctttatggcataatgggtgagaacacagacttggaagccaaaccacctgaatttgaaccccagttccatttaccaactgtcaaaagcttaggctttgattctgagcctgtttcctcaactgctgttctaaagattaaataggctaatattcataaggcaactgggacagtggcttgtgtgtatagcaaccattatataagtgaattatctactgagcaccacagcacttcttcactccatggtgtggtgaccagaatggagatgagacagagaactgcaggttctgcttcgagtttaagttaggatttcccttgaccaatgagacctgacttggaggagtcctggcctcattccattaccccaaacaccctctagtctctagatgaacagatcctgaatgtccaggccccacgtggcctgttctaaggcctgagatggaattggatacaggacacatccagccttgagatcttttgctaagtgtgacacagtgcccccagccctgtgctcatgttcatgcctagggaaaggcttctatcaaaagagttgaacttcttcccactggggatggaagaccatttcctcccttaaaccttggctctccctgcttccttcaggccaccaacaacacatgtgcaggatatgaaattgctgaggcatcactgctttcctacttcccttccaagtctcagctcccttattttaaaaaatatttggcctcaatgatcatttctcaacaattcctcaccgcaggagcctctgaagctcccaccaggccagctctcctcccacaacagcttcccacagcatgaagatctccgtggctgccattcccttcttcctcctcatcaccatcgccctagggaccaagactgaatcctcctcacgtgagtgcaatgccttgtcttccttccaacctagagcctgcagggaaataagcaggagtgaggttggggctcaggggaagaccaggagcagggactcagaaaggagggctggtatcttcttgaaattgtgtgtatagcaacattatataaatgaattatctactgagcaccacagcacttcaccccatggtgtggtgagcaggatggagatgagacttaggactgtaggttctgcttaagagtttaagttgggatcttccagccttgaccaatgagacttgacttgggagactccaggcttcattccactaccccaaatgccctctagtctccaaataaacagatcctgaatctccaggcctcacatggccttgatctcttatcattgccccccaggaccagtccccccttgccctcaaggacatggagtgagaccagcctgcctctctactccctcaatttctctctctttgccgctaagcaaaagagtggcccaccccatttggggtatatttcctcagggagattaggagcagtgtcttgagcccctcaagggcatttttctattggcctcctgaggtttgggcccagcctgcttccagcgtcacctgtgcccagtgagtgcagcattgcttgggtatgggctggggggaaacacgacagtgtggggtccatcctaggcccccttttctcagctgatttcttagaataagctgcctttagagataaccaaaactatttatcactcttccattttacctactctccttttcagaaactggggggaaaccgaaggttgttaaaatacagctaaagttggtgggtatgtgcacagtttgacttgccctctccgatgtcatttgtcagctcagaggaacaaggtgggagagtataggagctctgactgggtctcaggaaacaggggccccttatgccgttctttggatcgtgaggatgctgcctggaatggagctggaaaacaggatgagacccttccacccagacatctggccaccctcagtgacctctgaggccattgtgatgcacatccatgattctatgaagcagggtcacataacatgcacacacctgatttctccactccataaccacaacatgtgcctgtttgtacagggctcttggcctacaatgtccttcctgctacctctataattcaagcttggggtggctgctgtcaccttgcttctcctataaaagccatgaaacttctcaatcagaaaatagatgaaaaaatcacccaatccagtgatttttaaaactttttagaccacaaaaccttttcttcaagcaatatcttccacagaggcccaatatgtaaaacagaaaaaatgggttgagtagggtacaagacaccactctcaaatgcagcaaggcctccacaatagtccctgaggcccccagagctccagggagctcagtgtaaaaaccactgatgcagtccaagggcctcatttacagaggagggaacagggggaaagtaaaatggccacagtacacaggaagcacaggcaaggttaggttaggatttgggtgccctgactctgtggcctttgtccttggggcttgctgtgggcatcctgctctctctgcaggttgtcggttcaatggggacatgggcagggtggagcactaggaggggctgggtttgcattcccaaatggcatgtctccaaatccctattgggatttcttccaaatattcctcctatttggagcacctttcccgaataaggcatgaaggctgcatgatattggccaagtccctagccttctctgccagtcggcccccagagatggtgtaagaagatctgagtgtgctgctcttcaatcctggagttgaaagtcatccaccagtctttccaagaggggttgaagaaaaggaggaagggtgattgatgatgagggaggagaaaaagaagagcccaggagtaccatggagaaggagaagagaagatgaggaaagcctactctcccctccaagttctgaggggctgtctcctccttccttccctcctccatgccctcagcttgcaggagcagccaatggtatggcctttaacaaggggcccctcctcagcatctgatgctctctcctcagggggaccttaccacccctcagagtgctgcttcacctacactacctacaagatcccgcgtcagcggattatggattactatgagaccaacagccagtgctccaagcccggaattgtgtaggtggtacacacacatcacactggggggagagggagccagcagggcctcctggagggaagcagggagtggtggtggaatggggacccccagcgtacctcccaggtgtgactacatggggagaggcagctgaggggcaatctgagcgctttctggctggagcctgcaggagccatggggaaactgaccccatggatggggagatgacagagaagggagaagaaggcaagagggcacttcctcagggggacacagagactagatgggtctaggggtcctaggaaccgaagagtatgtctcagagaggagactggctctaagctgcctctgtggaagaaaggaaaagcagtataggtcaggtggggaatttaggagggagggaagatgggctgtctcttccggccactgggcccctcggtttgtgatccttctccctcttgctccacagcttcatcaccaaaaggggccattccgtctgtaccaaccccagtgacaagtgggtccaggactatatcaaggacatgaaggagaactgagtgacccagaaggggtggcgaaggcacagctcagagacataaagagaagatgccaaggccccctcctccacccaccgctaactctcagccccagtcaccctcttggagcttccctgctttgaattaaagaccactcatgctcttccctggcctcattcctttctacgggatttactcattggccatgcactgaggacaccagggtgtggcaccctcggcatcaagcctcgctctgcagaagttttgctggagcctggtacaaaaaataggtcaggcctgcaatgcaggtagtgagaagcagaaagtgagaaagaaaagcagtgtaaagaccgtctcctcctcagcaacaacagtagcagaccccgttttcttaatgctttctatactccaagcactctgctaggcagtctgtatgcattatcttatttaagcttcatgacaagtgtaaaagctacaaatcatcatttgattttttaggtaacacttcataaagggctctctatagcagtcaaactccatagtccttttttctgtgctgttttcaaggcctttcttcactgctgtctggaataggaatgatgcatgaagacattttatccaacccctccccttcgcttacacacatcagattatactatattgttttactaacttttttatcccctagaaggcttagcagaaagcctagcccataccaggtgttcaggaaatggatggatggatggatggatgaaggaagggaagaatgtgtggatggaaggatgaagggaaggaggaatggatggagggagggaagcagggagggatgaagggagggaggaagggaggaagggagggaggaagggagggagggatggatggatggatggagagaaagagggagggagggatagagggacagatggaataagacagaaatcaagaggaggactatgctccaagaataagctctcaaacctatcttcagggcccaaggaggagctctgtgtacttggaataagagcttgcccagagtagggattatgaccaccctttcctggcctccagccttccacagataaggaagggcttgtgggccacattaagggccatatgggggcctgcatgccaaagtcacaaccaggcttctcaggccttgtcacctccataaacagaggtcaagaggatgccccacatacgtaccctccctgccctcacaaaaagccacagcttcaccaccaggtgaagccttgaacccaccaggagtaactgcattatacggtttacctatctatgagcagtcatgccaagcagaaagccccataaggatctgcacagtccctgtttctgcccctgcctcccactgccctcaacacctgaaacacatcacctatgcctctaaagcttgctgtccatcaacagcaaaatcccttatatctttgatctcttctctaaatgcagctttcaacatggaaaagggtcctgaggcacctgaagagagaggaagctgtgggacaggtccagccagagcccaggccagaggggcagaagctggagtcctggagcacagacgcaggttgtcaggtgcacagagttggagggtcccctgctggtcatggttggccatgggggcacccaggagggatcagcgagctggctacacctaaaaatcagtccaaagtccgaggtccaaagagataaataaaaacattgacaaataagtcaaacggtccagcaacaaatggggacccaaggatcaggcacattgttttttttttttttggagtattagcatacactgtgacatgaaagagtgtgagctcaatcatgtggccttggactgggagagggcatttccttctcagaggcaactaagccctacctttgcctcagtctgggctctgtaatcctgctttgtgctcatctccccaagactgatcacctgggggaagctggggtggttcaaccctgcctgcccttccccaacatacagatggtggcaggtaacatggtgaaatcaaacagatctggtttttcatccgcctatccacccaggtgaccttggacaatttatttagcctctaggcctcagtagtcccagggaagtaataatcgctacttcactattttaaggattatataagatagggcatgtaaggtagctgacacacattcgcccatttcttcacgtgaattcagattctactgaattcagctctgcaccaagtcccatcctctgctgccctctgtttcagcaaacactgaggcctgttgtttctcctcctctaccggctctgatgcggtcaaggtccagagagctgagtagttggcaagcggaccaccagcaacagacaacatcttcattcggctctccctgaagctgtactgcctcgctgagaggatgaaggtctccgaggctgccctgtctctccttgtcctcatccttatcattacttcggcttctcgcagccagccaagtgagtccacttgtctctgtagggcaggaacgagaaagggggatggagcagctggcagggaggtagtgccaagggcgctgtcgggtctctggcctcataagaccctgtgggctctccccaccttcatgcatagcttctgacctccaattctcccctttgtaagtagagctggggttggtccggatctttctggggtaagtagttccaggaaactgggtcaccatttcctcaggagtcccaagcgtggtgagcaggaatgatcattcaggaggagaggccaagaaagcagcagaaaatgcaacaagaagtgcatgcaatgaaagggagggggaggcacgcggatgagaaagaaaagtggcaggtgccctggaagaatgagtggcgagaggaaggaaggttcaaacaatcatgtgggtctaagtccaggaattgggagtctgaaccgagagagcccttcctcaacatggctggcacaggttgctgggactatcagacaaccaaaatgagtcccagtggaatggctgcttgggaatctatggtccccttctccatcccccagcctatgactaaataaaatctgcagaaaagaggaaaggggttgaaaggttttggagctgtggggaaagggagaattggggcctatggaggagggggtttgttttgcccctccgtatctcctccctctatcattgtttacgaggacctggtgacgggggtggggaggacaaagacgtgtacctgccctaggctgccccagccattcttttcgcttttgtttttttgtttgtttgcttgttgtgttttgttttgttttgttttgtttgtgatggagtttcgctcttgttgcccaggttggagcgcagtgtcgcgatctcggctcaccacaacctccgcctcccgagttcaagtgattctcctgcctcagcctcctgagtagctgggatcacaggcacacaccaccacgcccagctaatttttgtatttttagtagagacggggtttcaccatgttggtcaggctggtctcaaactcctgacctcgtgatctgcccacctcggcctcccaaagtgctaggattacaggtatgagccaccatgcctggcctcttttctctcttaaggtcaccctggcatgtagtctggcctgactctgcctgtgtaaacacaaaggagcaagggtcaagtgcaccatgtaatctgcccacatactctcaggatgaccctggtctttgtaaactttgctttgagaaccagtgatatgagcatcacttacagagggactgtgtgggaggggggaacagtgctctttgggagagtcaatcaggccagtgcagtgggttcaggcttcaagaaagagaaaatggcccacccaaagcatggatcagcaagatggtgctctcaagatgtcccaagctttgccactcactggaggcaaaggggtcaagctacaaaaagatttgcactctgaaggtttgggggctgggagagatctctggactgacctcttgtgtagtatccccaattgatgggtagtcaggacagctcaaaggaaacacagtgacaataaccaatcaagtccagtatcctgcatacatcaaagagatggggggaagcgccatttccaaggcaagaagagcagtcattactaccattggctcttaattataataagcactgattgagcctttctgtgtgccaggctctgagttaagggctttccaatcattttctcaccgaattctaaccatgatcctaggatacaagtaagtatcatttacccccacttaatagatgaggaaactgaaacctagggagattaagaaatttgcccatgattcaagtcaaaattcaaatcaagtcaaaattccaacccaagctgtctgaccccaaagcctaaatcatatactttttcctcctgctctaacttctgtctctaaaggctctactctctcacccttccccctaacctccgcctctccaatacctctaagatagagtccaaattcctcagtagctcagcaggtatgtgaccagaccctcctcctctctccagtttcatctctgcccattcatttcttcctaccttgcatgccagccacccaaactgcccagcactcccaagacacactgagcttcccctaccttcaggctttcctgcatttctttcttccagattctacaagtcctttgtgtgtctaaatccttttttttttttcttttgagatggagtcactctttcgcccaggctggggtgcagtggcgcaatcttggctcattgcaacctctgactcccgggtttaagtgattctcctgcctcagcctcccgaatagctgggattacaggcatgtgccaccatgcctggctaatttttgttagtagagacggggtttcaccatgttggccaggctggtctcaaacttctgacctcaggtgatccgcccgcctcggcctcccaaagtgctgggattacaggcatgagccaccacacccagccgtgtgtctaaatcctactcatcctttacgaatcaatgcaggcctcacttgctttgagacttcttcctcaaccaccaaggatgggttaggggcccttcattctgttcccatagcaccttatgccaaagtctgttctatcctggaccacattctgtggtagtgtttgtttaacttttcaatttctctttcaaccctgactagtctgtaagttacttaagggtagtgactgtatcttcctcatgtttttacccccatagagcccagcatataatactagctcaacacatgtttgcccgatcaagtcaccaataaacaaaagaatgagccagcttcctcccggttccttggcaagtgtgaataaccaagtcatttgtagttgacactcagctcagaggctgagggttctaaatgtatgtcccccaaagggattcatcttatgcacttcattaccagtcaagctatcattggtctcctctaacagacggctttgctatcagaggagtgaaacacaaatggtgggagacagaggtgggcagctgtggtctcccctctgcttccctggctcagcttgcaatgtgattccttcagaagttcctgagtgggtgaacaccccatccacctgctgcctgaagtattatgagaaagtgttgccaaggagactagtggtgggatacagaaaggccctcaactgtcacctgccagcaatcatgtaagcacgtccttttagatatttctgtggagagggacagggagcccaggggcaggaatgagatacatgggatcaagaggtctccatgctagaagcagtggagcagtggctaagggtttggcctttggctctcaggggcctgggattaattcctaattttgccacttttagctatgtggttcattatgaaacccaagcttgagggtctaggctgagtggagaagggactgagagaagggatggtaaggttctgaggccagagagagaggctgtctgagggaacccagccaggacaggcccagggaagctttaaagaacataaggtgagctccatgtgaaccagaggtgggggtgggcaccggactcctgcccgagtctgcagcccatgacggtctaattctgcctctgcagcttcgtcaccaagaggaaccgagaagtctgcaccaaccccaatgacgactgggtccaagagtacatcaaggatcccaacctacctttgctgcctaccaggaacttgtccacggttaaaattattacagcaaagaatggtcaaccccagctcctcaactcccagtgatgaccaggctttagtggaagcccttgtttacagaagagaggggtaaacctatgaaaacaggggaagccttattaggctgaaactagccagtcacattgagagaagcagaacaatgatcaaaataaaggagaagtatttcgaatattttctcaatcttaggaggaaataccaaagttaagggacgtgggcagaggtacgctcttttatttttatatttatatttttatttttttgagatagggtcttactctgtcacccaggctggagtgcagtggtgtgatcttggctcacttgatcttggctcactgtaacctccacctcccaggctcaagtgatcctcccaccccagcctcctgagtagctgggactacaggcttgcgccaccacacctggctaatttttgtatttttggtagagacgggattctaccatgttgcccaggctggtctcaaactcgtgtgcccaagcaatccacctgcctcagccttccaaaagtgctgggattacaggcgtgagccaccacatccggccagtgcactcttaatacacagaaaaatatatttcacatccttctcctgctctctttcaattcctcacttcacaccagtacacaagccattctaaatacttagccagtttccagccttccagatgatctttgccctctgggtcttgacccattaagagccccatagaactcttgatttttcctgtccatctttatggatttttctggatctatattttcttcaattattctttcattttataatgcaactttttcataggaagtccggatgggaatattcacattaatcatttttgcagagactttgctagatcctctcatattttgtcttcctcagggtggcaggggtacagagagtgcctgattggaaaaaaaaaaaaaagagagagagagagaagaagaagaagaagagacacaaatctctacctcccatgttaagctttgcaggacagggaaagaaagggtatgagacacggctaggggtaaactcttagtccaaaacccaagcatgcaataaataaaactcccttatttgacagcttgattcctaacctcctgcttttttttctgctagggtgaaagaagcttaatctcagtttttttcaggggcttctccacatttcttgagacttttgtcaaggttgggggccatttatattcaatcttcccctctgtctccagcttaacagcagacagctgactcagctcgcttggattcaacattctcccaaaacgctgttgtgaagacaaaacaaaagccaggtaattaagaccggatggttaagacaggtaattaagaccggatggttaagagaaacaaataaatgcagtgaagtgtcaagctgaaaacgggccaatgaattggattctggtaaactgactcataactgccccccagtggccatgttgttaaaacccgagcctcctcccttggccggcgcggtggctcacgcctgtaatcccagcactttgggaggccgaggggggcagatcacgagctcaggagatcgagcccatcctggctaacacggtgaaaccctgtctctactaaaaatacaaaaaaattagccgggcgtggtggcgggcgcctgtagtcccagctactcgggaggctgaggcaggagaatggcatgaacccaggaggcggagcttgcagtgagccgagttcgtgccactgcactccagcctgggcgacagagagagactcttgtctcaaaaaaaaaaaaaaaaaaaaaaacgagctgcctccccagcccaagctcatcttcccaggatggccatctcatctagctggccaatcagactctcagagagatttgaaatttggacctgagaaactcagtctggttgctgctagagcagaagtgagtttctggcagtgtcccaaggaaagaggtctatgaacttctgtcctgaggtccctggaactgcctcacttcctgccccagctccaggctgggaggttcagctggtctttcagttccatgagatgtcccagcatctttcctttaaaaaaatttctaggccaggcgcgatggctcacacttgtaatcccagttctttgggaggccaaggcgggcagatcacttgaggccaggagtcttgagaccagcctggacaacatggcccatctctactaaaaatacaaaaattagctgagcatggtggtggtcgcctgtaatcccaaccactcagatggctgaggcatgagaatcgcttgaacccaggaggcagaggttgcagtgagctgagatcatgccactacactccagcctgggcaacagagagagactccatctcaatttaaaaaaaaaattcctaaagggccatggtggcaatttagcacctcaggaataacttactggtttaggtcagttcttggtgggggatgatggacgtatgtgtgttaaaatagacataacaggggctgggcaaggtggctaacgcctgtaatcccagcacttccagagtctgaggtgggcggatcacttgaggccaggagttcgagaccagcctgggcagcatggcgaaaccccacttctaccaaaaatacaaaaaaaaaaaaaaaaattagccgagcatggtggcctgggcctatggtcccagctgctcaggaggctgaggcaggaggatcccttgagctggggagtcagctgaaatcgtgccactgcactccagcctgggtgacagaatgagaccctgtctcaaaaaaacgtgtgtgtgtgtgtgtgtgtgtgtgtgtgtacacacataacaaggccatgcacagtggcttatgcctgtaaacccagcactttgggaggctgaagcaggaggatcatttgagtccaggaatttgagatcagcctgggcggtatggtgagatcttacatattttttaatctctacaaaaaaaaaaaaacaattaactgggcacggtggtgtgtgcctgtggtcacaggtactcagaaggctgaggtaggaggattgcttgagcccaggaggttgagactgcactgcagtgagccataatatcaccactgcactccaggctggatgacagagcaagactctgcctaaaaatacatatatatatatatatatataggtgtgtgtgtgtgtgtgtatgtgtgtatgtgtgtgtgtatatatatatatatatagagagacaaaatttaccattctaaacatttttatgtgtacaatcctacattcactttgttaggcaaacatcaccactatccatctccagacttttctcattgtcccaacctgagactctgtacccattaaatgctaactcaccattctctcctcccccagcctctggtaaccactattcttctttctgtcactatgaatttgacagctctaggtatttcatgtaaggggaatcacatagcatttgtccttttgtgactagcttatttcaccagcatagtgtcgtcaaggttcatccaagttgtagcatgcttcagaacgttattcctgttagtcactaggctaacattccattgtatgtatctgccacatttcgtttatccagctaatctgctgatggacgtgtgggtatctctcttttcttgctagccagagtttgcagatcttggtttctgttacttgcaccaaaagcacctgaacttgggcaacaacccatcaatcacccgggcattgactcagaggagccccatgtgcttgctgctcttgctcctccacagaggcagtgctacctgctttggtccctccctggactgtgagtccctgctccttgatccaggaatttctctccaccctccttgctatcaggggttacagctaaatatgatcaaactccttcctccaggagctcccagcctggggatgacagaatcaataacatacaatgtagtcaggcccagacctttgcttgcagaggccaaagcaaacatgggggtgggagtgaggccggcagggcctaggttgacagaaaagtcaggacaacatcagatgcggcaagaagtttcaaagtccttagccagcaccagggtcaaagccagggagtcagagttcaaaggcctaaaaaacaggacaaggctaaaaacaggaagctcagggccggggttctggcaagctggaacagaatgtcgttgtcttgtgttttgttttgttttgtttttaaattcaggagcactgaggtgtcagtctgaaaacctgagtaatcgagagtctatatacacaaagtcaaatccccaccctagcacataataaaaagcctgccagaaacttctgatggttcagaactggaagagcttttctcacgtgcattcagttgcttttcaagaaggatattcccagtcttttcaaggcaggcagatagatggctgaccttaaacacacacaaatacagaaaggacttcggtcattctgatatacagagttttccagctgtggtcatcctaaagcaaataaaccttttcttgaacaacttgtatgactgaccttttgccttgtagaatacaggtggctgggtacatgggggaaccaactggaacaggaagggaagaaaatgagagaacaactctggatagtacaaagagcattttactgggagtcacagaggacggctcgcatgtcctctttctacacagccgtcttagacaccatgaatccttgaagcagatgaccagatgtcctgcggctggtttcagcaggcctgtttgaaatattattagtctttctcagatgggctgcatgaacacatattttcttcccatgagagcatacatgtgcttgcacgtgtgagagcaactattgagagtcatcagcagcctgagctggcacttggggacacagctgatgcaatggtttaaaagcactgtctccaagccaggtgcagtggtgcatgcctatagtcccagtaactcaggaggctgaggcaggaggatcacttgagcccaggagttcgaggctgtcatgtgccatgattatgcctgtgaatagccactgcactccagcctgggcgacatagcaagaagaccccatatcttttatttaaaaacaaaaagagtattatctccacactcagactctgacagaccatctatgtttgagtcccaactctgtcactcactgtgaggtcttgggtaactactaatcctcctaagccttggtttcctcatctgtaaaatagatcaattatgatacctaccccccagtgttgaaaggatgaaaaggcaatgtgagagagtgcttagcagataagtgctcaataggccttattgttccagaatctgacttttttctaggaccacagaacataagacagaaaggagctttctgtcattatgaagataagggaattaaaggccagagatggaaagcgatttagcaaaggtcatgctacaaattacagaagatctggcactagaactggaggctatactttaaaaagaagaaacctctgatctacacaagcctgaggctggtatgaatatatgaaagattggggtcatctgactaaagaagcaatagttcaaagcctgagacctccttttgcatgacctggtctccctggagagcctggcctccattcatgtatctttgattctcgccaaggagactttgaagaaggaatgggcaaatgcagaaagggacctcaaatctctccagagcctggtatttatgagcaatagccttaacctttctgagcccagtttcctcttctgcaaaatggcgctgataccttacagggctgctgtgacaactgccagcttctggtacaggatctggaacaaacatcataataaaatggaaaacagtattaatctcttagcagctaaagcaggaattcctatcatggaggaaataacctttgttaagaaaatgaattggcaaccctggttaaggaaggacactcccccaggacatggagctgagacttcacaggaagggctgaagttgttccaagcaaaccaggagaaacagctttgcccctgagagccagaggggagggagacagagggctggagaaggggatagaggctgtgcaatgagcggcaggactgccctccttcctggagtcctcaaaagtgccatcaattattttgcttcctggccggcgcagtggctcttgtttgtaaccccagcactttgagaggccgaggtgggaggatcacctgaggtcaggagcttgagaccatcctggccaacatggtgaaaccccatctctactaaaaatacaaaaattagctgggcgtggtggtgcatgcctgtaattccagctactcaggaggctgaggcaggagaatcccttgaacccaggtggtggagcttgcagcaagccgagatcatgtcactgcactccagcctgggtgacagaccgagactccgtctcgaaaaaaaaaaaaaatggagatggaaacaccaacaattacaggttattgggagaattacactggttaacataagtaaagtgcctagtattggacctggctcacagcagagattgggtgcttatgggttcccttgccagagaaacgctgcttctgtcttgcaagttcttgctggaagaggcaagacagagtcaggtgacacttatcggttcccacaactacaacacaaatgctgatggaaaaggaatcatgtaatgagcaaaagaatcaagaagtcacttgaatcaagaaacagttatttccacccctagcacacactcagaacttccccctcgctcctcccttgcattctgatcaaaaaatgagtcttagccgggcgcagtggttcacacctgtaattccagagctttgggaagccgaagtgggcagatcacctgaggtcaggagttcaagaccagcctgaccaacatggagaaaacctctctctactaaaaatacaaaattagccaggcgtggtggcacatgcctctaatcccagctactcaggaggctgaggcagaagaattgcttgaacccgggaggtggaggttgcggtgagccacggtcgcatcattgcactccagtagcctgggcaacaagagtgaaactctgtctcaaaaaaaaaaaaaaaaaaagttcaaagagatagtaaaaaaccatagtaattttttgctttactgcagttttcaaagatacatttttttttttcataatgtggcacctcttcaatgttggcagaattgtcttttgcagggaattccaggagactgcagataactaattaccatgagaaggtagtcataaatatggttaatgtctaactggtcaggactcttaacatcagtttcagtcaacttgctacagcaaatgtaatcttcctatgaagtctcttaagttctccatctctatttagccaggaggtggagcttgccgtgagccaagattgcaccactgcacttgaaactctgtctccaaagaaaaaaaaaaaaaacaaggaatcctccctgtcccctccagatcatatgcgtgaggtttctcatccgagccacagaacacagacaacttgtgactgctttctcagttctcctaggatgatgcataaccaacaccactctggatgcacaggagggaggttaacccattacatctactgcttatcttaagccagttcaaaaagcctgtctcagggcaggggccacgtcttcgaatttaccctgttcccatccagggccctttgtacctggggggcctcactaaatatctaatcatgaatttcacacttaggcatgggggcaggggttggaagtcaatgtgatagggccccttggctgtgagtgaggggatcagtgcagggatgtgtctccaccgagatggcagtttaagccaggtcctggagtgtggatttaggtcttggagttctggattgagttgctgaaaagcaattgctgtcttgacatgattttaggaaaattagtgagcagcgccacccagtggttaaaagccacaatgacttatctctctgtgagctcattgggctggctcgtacataagcctagttgctgagatagccccttcctggtgtgcacaccttccaccttcccacctctccttgtattctccccttttgaagagagctgaggtattcagtacacagtgagggcacagtgctttcaaggagctttccttcccactaaaagtgggaagagagaccacgcacaatcaggttctatatcgaagaatagagcagagtaaaagtgatggcgaggagtacacaaaacacctttgtactgtttgataggacccaccaagaagaacaattttctttgggaggcagaggtgggtggttcatctgaggtcaggagtttgagaccagcctgaccaacatgtatacaacatggtgaaaccctgtctccactaaaaatacaaaaattagctgggcatggtggtgggtgcctgtaatcctagctacttgggaggctgaggcaggagaatcgcttgagcctgggaggcggaggttgcagtgagccgagatcgtgccattgcactccatcctgggcaatagaacaagactccctctggaaaaaaaaaattaataagaatctgatgattaaagttcatattaaacctgtcgcttccagcatgggaaactgagcccctcacacacttaacaaatggaccattctgcaagtcaaagccatcaactctagacaaaaatttaaaatataactgagaacttgggtgactacacaaaaatggacagatgtcagaggcacactgaaaactggaaccagcaacaggcatttagggagttcctattttttgtggccttggcctaagggttggctaaacctaacagaaagtttgtgggctgggcacagtggctcatacctgaaatcccaacactttgaaagaccgaggtgggaggatcacctgaggtcaggagtttgtgaccagtctggccaatatggtaaaaccccgtgtctactaaaaatacaaacattaggccgggcgcagtggctcacgcctgtaatcccagcactttggaaggctgaggcgggcagatcatgaggtcaggagatagaaaccatcctggccaacatgttgaaaccccgtctctactaaaaaaaaaccacaaaaattagctaggcgtggtggcatatgcctgtaatcccagctactcaggaggctgaggcaggagaatcacttgaacctaggaggcggaggttgcagtgagcggagatcatgccactgtactccagcctggcgacagagcgagactccatctcaaaaaaaaagaaaaaagaaaaaattagccaggtgtgatgtctctactaaaaatacagaaattaattgggcctggtggcgcatgcctgcaatcccagctacccaggaagctgagagatgagaatcatttgaacctgggaggcagaggctgcagtgagccgagattgcaccattgcactccagcctgggtgatggagtgcaatggagggaaactctgtctcagaaaaaaaaaagaaagaaagagagaaagaaaagaaagaaagagagagagagagagaaagaaagaaagacggaaggaaggaaagaaagaaaaaaagaaattaccattacccggctttcctccacatacaggagttagtcctgtgtagcaaatagttgtagtttgcattttgatctagccataactgtttcatttttcagaattctcagtgaaaattctttgaattacgtaagaattcatttgaaggcctgctatccctccaggatttgtaagttagttagttaatcatatttacgagtttacaagcttttagtcatattattattattattattttttttttgagacggagtctcgctctgtcgcccagtctggagtgcagtgacgcgatctcagctcactacaagctccgtcttccaggttcacgccattctcctgcctcaacctcccgagtagctgggactataggcgcccgccaccacgcccggctaattttttgtatttttagtagagacggggtttcaccatgttagtcagcatggtctcgatcttctgacctcgtgatccgcctgcctcggcctcccaaagtgctgagattacaggcgtgagccacggcgcccggcctttagtcatattatctgtaaaattaataagggatttatattaaataatctctaagatttcttccagcaataaaattctgcaattctgtaagtttctacagggtctccacccatctctagcattaactacctcctatgcattttcaatttttaaactatatagacaaaatacggagaaatatttcacatggtaataagatctgagcagtgactgacacccatatgaaccttgttttataaaaagtgttcacgtaccatcttcttatattcactctacaaccaatagagcaaatctaatttatggtctatttttaaatagcccattaagaatggtttttacatttttgaagaactgtgatagaaaaagcaaagaaacaaaaagaaataagcaacagagaccacatgtggcccacaaagcctaaaatatttactatctgaccttcccaaaaaaagatttgaaaaagttggtttagtaaaatgaaaggaattaaagttaactccggattgttgcctaaaggagaagaaaatacagaccacccacattaatttcaacatcattaatccagaattttttggtaatttaatctgaattaaattaacatttaaatattaaataggccagtcccagtggctcatgcctataatcccagcacttttggagccaaggcaggtggatcagaggtcaagagtttgagaccagcctggccaacatggtgaaaccccatctctactaaaaatacaaaaattaaccaggtatggtggtgcgcgcctataatcccagctactcaggaagttgaggcaggagaattgcttgaatttgggaggcggaggttgtagtgagctaagatcgtgccactgcactccagcctggacaacagagtgagactgtgtcgcaaaatataataataataaaataaataaataaatattgaagattaagcagctgaaatacataaataatattaacgctaccaagagaatagactggtattgaggatttcatttcaggaattgttatattaaaacagatgtttaaaatgatggttaagtggtagagctagaaatgtttacactaagtaagcacatatcagaaatgccccaactcttcactaattacaaaataactaacttggtaaccagccctgttaccaaagaagggatacctgcatagtatttctgtctgtttagagataaaaagagactatgtttattgctatcagagcttgatttttatcctctgtccatgatccagggtcatgtatgtcattaatccttattaagcttcttagtgatgctcttttgcaaacagtataagcagtacaggtgcaaagacagtgagtgaaggcctgctttctgcccgactgcttaacatgtttaagatcttttaaaccatccgagcttttaaagtctgcttctcttaacaatacacctactagatttttaaaaataccatccatgaacttaaaggaattactattctcattggtgtttttaaagaaacaaacaagcctctctatactgctttcttcagaactgattttcaactgatatatacgggtgtagccatattggttgctaaataccgaaatatgttcttactggttggtaaagagccgccgttgtaagctctctgcatgcccgccacagcctcgcctttccaacaggcacttcattgctgtacctccccacaatccaataattaaaaggttatcccgaggcatagcaggaggcctttaggacccttcttcttcactaggcttgcatccatactgattgctggtgcttgggtcatcccttccatgtaacaattttgaatatcaccctgactttctgactaatagagtaaatcgttactatcttatcaatgtttgtgttctgcaatctagagtatcaaatagctctagctcacctgtgttacttatctgtatagaatcaacattcagagttgcattatttctgaataagcccaggatgccatcatactgtaactcagtctcctaaaccacactgcatttttttctctatttctctcaatgttgacagtgtgacctaagttctgtattctcttgttcctctcagttcgctttgcacctcataggcctccagatatctccttgaagcctcttctctttgaagtaccagcatcactacagagtcagtgtctgtcggccaagattgggttttccacgaaatagatgctcaacttcaacgttcaaatgccagcgtgaaccacggagtagtgattgtgggaaacgctggattctgcaaaactgccaccatctccagactggtggccctcagctgccatggtacaaagatgagacagatcacctcagacagcccacgtgcctcccccaaatgtatatttcctttttaaataactccctgcttcattggcactgaagtttttctgacatatttatattaagtcatacatccttttatttcctgatctgtaaaacctgacttccacgtgaggaccttttgtgttttttgttttttttttttttttgaaacggagtctcgctctttcgcccaggctggagtgcagtggcgcgatctcggctcactgcaagctccacctcctaggttcatgccattctcctgcctcagcctcccgagtagctgggactacaggcgcccgccaccatgcctggctaatttttttttttttgtatttttagtagagatggggtttcactgtgttagccaggatggtctcaatctcctgacctcacgatctgctggcctcgacctcccaaagtgctgggattacaggcgtgagacaccgcacccagcccatgtgaggactattaattcagaggtgaagacagtaattacccacaaaatcaaataccagataaaggggaatacagtaggaggaggaagggaagagcagaaataatacatgacatacgatcactgaacttcacctcaactcaaaatgtcacacattactttaggctttttttcctgccatctcccatatccacccccctgcagttatccagaactctattcagtgaccaaggaatttaatgtaccagttgaatgaaagaagtctaaattcactcctactggtagggagttaaatgaggactactttttcctattcctccttcttttcaatagctattggccatcaaataacaacttctaatatttactttggtatccatttttaaagtatgatcttattcataaatatagtctataatttctactagtaagaatacattttctaaataacaagaacaaattgaatttttttcaaaaaaatcttcaacagttttattgagctataattcacataccatgtaattcacccatttaaagtattcaattcagcatttttagtataactcacagggttgtacagcaatcaccgtaatccagctttagaccattttcatccccctaaaagaaactcatgcctgttagcagccaatgcccattctcctcttaaccctctatttctagccctaggtaaccactaatttactttctgtctctacggattttcctattctggacatttcatataaatagaatcatacaagatatgttttgttttgttttgttactagcttctttgacttagcataacattttcaagggttatccccgttctagcatgtatcggtatcttatttctttttattgctgagtaatagttattgagtgggtatactgtgttttatctagtcatcagttggtgggcatttaggttgtttccacttttggctattatgaatcattcttctaagaacatttgtgtacacgtttttgggtggacacgtgtttttatttctcgtaggtatagtcttaggagcagtattgctggatcatagaacaaatggaatttagtcatttttcctttaaagttttatgattatctgatgcaaccatctaaatctttttgatccagatgtggatgccaacagagagctgccactcacacagccaccttcagcccactcatctatcaccagcggaagctgcccaggaactctggaaatgcgcaggaggctatgcgaagactagcctcacaagtatgatgggattcccatgttggggacatggtagttccattttaacattaaggaagcaaagatagggagacctttgccaaagtgaacaaaaatacataaaggtacaccatgaaagcgtggaggaaagtttctctttctttactattcctagaaaaatattatgttgggatcagaaccttagagttggaaagacccttagaaataaaatcttctggtgaataaataaagaagttgagacccaaagaagtgggttggttggttttgagacggagtcttgctctattgcccaggctggagtgcagtggtgcaatctcggttcactgcaacctctgtttcccaggttcaaatgattctcgttcctcagcttccctagtagctgtagatggaactacaggtgcgtgctaccatgccagactaatttttttttttttttttgagacggagtctcgctttgttgcccaggctggagtgcagtggcacgatctcggctcactgcaagctttgcctcccgggttcctgccattctcctgccttagcctcccgagtagctgggactacaggagcctgccaccacagccggctaattttgtttgtattttttagtagagacggggttccaccgtgttagccaggatggtctcgatctcctgacctcgtgatccatccgcctcggcctcccaacatgctgggattacaggcgtgagccacagcgcctggccccatcccagactaatttttgtatttttagtagagacggggttttgccatgtcggccagggtggtctcaaaccccttaccacaggtgatctgcccgcctcggcctcccagagtgctgggattacaggcatgagccaccgcgcctggccaaaagggatatgttttacccaacatcagggtataagtaatcaacagtttttaattttcattcctaacttaaaactcttcctgctatactacactgtccataatatcttttatacatttgggtttgaaattcatatttttctcaaaataacataagcacatagaaaaccaaataatgctcaaaaccagcaattctcttcctctaccccacccatcttctccccaaaggcagccactttcaactcttaaggaagtttctctgattttcacctcgatatttctaaattctacttgtatactgctaaaacttttattaatttacatattaactattgcttcttattatagatgatggaaattacagctcttttaccttccttcttcctaccaccatcccaacacaattatttcatgatttttggctgaaccatattatagtattttcagtattaatactatgcaaatatagttctccctggagccaagggtaacatttccttcttgaacgactttgtttttcctaggggtttatgaaatgcctcgttttaaaatttgcttatttttcttcacatcattggctaagtcatttcataaccctaatgtagttttgtaaaatgtctctcaatacaattttccacattaccagttacgttttttctttttaacctggcaggcatccatcttttttttcttttttctttttttttttttctttttttgacaaggagtccggctttgtcgccaggctggaatgcagtagtgcgatctcggctcactgcaaactccacctcctgggttcaagcgatgctcctgcctcagcctcccaagtagctgggactatcacgcccagctaattttttttttttttgtctttttagtagagatggggtttcatgagtcatccgtcttagagccctccgtcgagcttagtctgggcctaggacactctgagggctttccaccttgttctcctggaagttcctgtcagttctcttctgtgtttcatctatgtcatattgtttctcgatttgattcttcattttggtggaacatatcctccagtagcttcctaataaaaaaatgcataggacgtaagttttttgagacttactgtttctaaaagcatcttttttctatgttcatacttgcttatttgtttgacacagtatatcattctagggtaaaaattattttttctcaattttgaaggcattgttccattgtcttgagcttccaatattgctattaaatactctggtactattcttattcccaatcttttatatataccttgttttctctccagaagcttttagaattttttttttttttttttttttttttttttttttttttttgagacggagtcttgctccgtcacccaggctggagtgcagtggcgcgatcttggctcactgcaagctccgcctcccaggttcacaccattctcctgcctcagcctcctaagtagctgggactacaggcgcccgccaccacgcccggctaattttttttgtatttttagtagagacgggggtttcaccgtgttggccaggatggtctcgatctcctgacctcgtgatccgcccccacccccagcctcccaaagtgctgtgattacaggcgtgagccaccgctcccggcctagaatcttatttttatcaccattgttcttgggtcttttttcatttattctgttggtacgtagcaagccctgaggatattctttaattctgagtaatgcttttgtattatttatgataatttcctcaccaccctttcctctattctctccttctacaactcgtattagtcaaaaattagatttctggctgggcacggtggctcatgcttgtaatcccagcagtttgagaggccaaggttggtggatcatctgaggtcaggagtttgagagcagtctgaccaacatggcaaaaccccatctccaaaaaaatacaaaaattagccaggcgcagtggcaggcgcctgtagtcccagctactcaggaagctgaggcaggagaatcgtttgaacctgggaggcggaggctgcagtgatccgagtggtttctctaggttttgaatctgttgctaccctgtgggaatacacacagaattcacaagacaaggagaacttggcttctgtctacagaagaattaatgtgtattgtggcttagtgctacttacattatatttgttatatcatttcttcatttttaccttaaccctatgaggtacattattatctcattttacaggggaagaaacagtggcttcagtgattaattttttcaaagtcatactgttaataaatgtcaaagctaggattcagagtcagtattctcccctataaggtgaatactattgttatccccattttacaaatgaggaaacagaggctctgagattaaataacttgcttgagaccataaactagtacatgactgagtcaagatttaaactgaggcaggcagcctccaagtctatacttttaaccactacgcgatgctgcctctctagtgtggcaggaaggatttttgtttagtgctattctggaaaatctatccatcattgattgtggcttcgaagcaagaaagttataatgaaggtgtacctttcagtcattttgctgacctaaagttctttaaaaaaggtttttatgcaactagaagttcccaacacattaaacaagttgtcactgatttactgcttagattaagaagctaatatatcgaaatgagctcattctagaaaatagctaattttaagaagagtcacagagatacaaaaagcaaaggtttttattttcccccaaggaaacctatgtaagaaaaaattaaatgtcatccttgccaagagacaagttctgtactatactggggggtgtcaaatgatcatagttcccaaaattgttgctgtcactattaaagctgtcagccaaagaagtaatcatttcagtaatcctataatattaagcattttaaacataatgtggaaaagtaagccagaaacacacacacatacatacacagaaaatgaagaacaataatgaagaacaagattttatttgtgttgtggcgatttttttttaaatatttacatttaggagaaatgagatccaaactaaacaacaaataccccatagatgatgttttataaaatttgtctagggcttttctctaaaaattaatactgaagttttattttcagacccagatttcatctacatttgggatactgaatatgggaaaacagccttgttgtttatcgttaatttccatattatttttattttctacctcttccactggaatgggtcagtgattaaatgttcaccactgtatccccagctcctacacaatgcatggcacataaatatttgaatgaagaaactctagtcaattctctgtactgagtaatctttctaaaacatttgcttttgctacttaaagccagcaaatagctcctccttgcccttgaatgaaatccaaactctcttcttaaaatattatatgaattgtaatgaaaggacctttgctttcgccaggaccagatattttagaccacataattctttgtgtgtgggggcgggggtgaggggggcaagggcaaggcggatgttgtcctgtctactgtaggatatttagaagaactatccttgatctctgtctactaccaatagcactgtctcaacccctagttaagacaacaagaaatgtctccagaaattgccaaatgtttcctggggagcaaaaccagtgcaggtggaaaacccctaccatgccctatcttccatcattccccactcacttatactctaaccacacagaaattgattttagttccttgaaagtaaaaagctatgtcttgccttagggcctttgcacacactgttttcctctgcctggaaaactaccacaccttggttcactccttgtcctccttcatgtctcagcttaaatattgcttcttctaagaagctttttctgactctcctaaattaccttaaggtgccccagctgtgtgttgccccagcacactatatttcctctcttctagtacttatcacactattattattacttgtttaattgcctctgtttcctgctaaactgtggagggtagacaagggtcataactatattattcattattatagctccagaacctagcacaatgcctggcatacaatgttcaattaatatttgcaaatgagtgaaaatgccagtattttccattaggaaatcttgcagcattcagctgggtgcttatacataatagtggttctcgacgaatgtataagtcaaatcagaatcagattcatgtgccccaggaatgaatcttgttagagaatatggaattccaccaatcctctgagagagtttcataaactggggattgaatgtacatagactgtttatattgtgccagatctgtttctctaggaatgccagatgaactaaataaattagccacttttctttaaaatttgtatttggtattggccctaacctcctttggctcaagtaatcagtaatctataattgaatagtaacaatctacaagatacagctatttagatctagaattataacaaagctaagcattaccctcaactctgctatagttaattaaacaacagggctcttactaccacccattgaagcttactataaagcctaaatcaaaacagtgtgttactagtacacaaatagacaataaacaagtggaatagaacaaaaagttcagaattagacccaagggcatgcaacacttagtgtatgacaaaggtggcattcagatcattgggataaaggtgggctttttaattaaatgagctgagacaactaagtaaccatatagataactcgtatctcacaccatgctcaagaatacacaaatggattaaggatctaaagggtctgaatatctaaagataaaaccatgcaactaatggaagaaaacttagtaactttttatttaaccttggtgaagagaaaggctttctaagatctaaatctagaggaacagaagaaaagattgacaaatttggccacatgaaaaaaatttaccagcctggacaacatagtaagaccctgtttctacaaaaaaaaaaaaaaaagaaaacaactagccaagcgtaatggtgcatgcctatagtcccagctactagggaggctgaggtggaaggattgtttgagcccaagaggtcggggctgcaatgagccaagatcatgccactgcactccagcctgggtgatagagtgagactctgtctcaaaaaataaaaaataaaacttttaatgttgcatgaccaaaaaaataccacaaagtcaaaagacaaagacaactgataaactgagataaaatattgacaaaatacctcaaaagtacaggcaacaaaaggaaatacagacaaatgggatgacatctaaactaaaaatcttctgcacagcaaaggaaacaattaacaaagtgaggagacaatccaccgaatgggagaaaatgtttgcaaaccatacgtctagtaaggagttaatatccagaatgtaaaaggaactcaaacaattcaacagcaagaaaacaacttgattaaaaaatgggcaaatgacctaaacagacatttctccaaagaaggcatacgaatggccaataggtacgtgaaaaaaatgcttagcataactaatcattagggaaatgcaaattaaaccacaacgagatataatcgcacaccaattagaatgacttttaccaaaaagatgaaagataagtgttggcaagaatgtggagaaaagggaactctttactttgttggtgggaatgtaaattagtgcagccattatcgaaaacagcatggacattcctcaaaaaactgaaaaaagaactatcacataatccagtaatcctgcttctaagtatatatccaaagaaacggaaatcaatgtcaaagggatacctgcactcccatgttcatgacagcattattcacagtagccaagctgtggaaccaacttgaaccaaccaagctgaatggattttttaaatgtattattttttaaaaagcagtttggaaatttctcaaagaacttaaaacagagctaccattcaacccagcaatcccattactgggtgtatacccaaaggaatataatttgttctaccataaatacatgtgtgcacgtgttcatcacagcacttttcacaatagcaaagccatggaatcaacctagatgcccaacagtggtggcctggataaagaaaatgtggtacatatacactatggaatattgtgcagccataaaaaaggaatgaaatcattcatgtcctttgcagcaacatggatgcagctagaggccatcatccttagcaaattaaaacaggaacagaaaactaaatattgcatgttctcactaagaaatgggggctaaacatagagtacccatggacacaaagaagagaacaacagacactggggctcacttaagggtggagagtaggaagagggtgaggatcaagaaactacctatcaggggccgggcaccgtggctcatgcctgtaatcccagcactttgggaggcccaggtgggtggatcatctgaagtcaggagtttgagaccagcctagccagcatgatgaaactccatctctactaaaaatacaaaaattagctggccatggcggcaggggcctgtaatcccagctagtcaggaggttgaggcaggagaatctcttgaacctgggaggcagaggttgcagtgagccaagatggcgccattgcactccagcctgagggatggggcgagactccatctcaaaaaaaaaaaaaaagaaagaaggtaaaaagaaactacctatcaggtactatgctcactacatggatgacagtcattggtacaccaaaccccacacaatgtatccatgtgacaaacctgcccatgcactccctgaacctaaaataaaagttggaagaaaaaataaacagaattttaaaatgtgatatgtgtatggatatgttatgtgtgtgcgtgtgtgtctgtgtgtgtgttagtaatgaacagactccacaataaaggactcaaagtgagtaatcagcatctaacttggcactgtttcttgggtctcctttgcaatcagccccactgaattcagaaatgccagcagccatttcacaaacccaggcggccacacaggccccactgcctccattcccaccactatggccagttgaagtgacacacgcaactcatcttcctggccagggccattcgagagcaacaatagattttcagtgtagacaaaacagccttctatgggaagatggtgctgtctaggacttttatagctatagagaagtcaatgtctgccttcaaagcttcaaaagacaggctgactctcttgttaggggctaatgtagctggtgactttcagttaaagccagtgttcatttaccactccaaaaattctagggcccttaagaatgatgctaaatctactctacctgtgctctataaatgaaacgacaaagccagagtaacagcacatccatttacagcatggattactgagtattttaagcccactgttgagatctattcagaaaaaacataactttcagaatactactcctcatggactgtacatctagtcacctaagagctctgatggtgacgtgcaaggagattattgttgttgtcatgcctgctaacacaacatccgttctttagcccatggatcaaggagtaactttactttcaagtcttgtaatttaagaaacacatttcataaggctagagctgccatagatagtgattgttttgatggatctaggcaaagtaaattgaaaaggagtttcttttttttttttttttttttttgagactcagtcttgctctgtctcccaggctggagtgcagtggcacaatctcagctcactgcaacctccacctcccgggttcatgccattctcttgcctcagcctcccaagtagctgggaccacagacacccgccaccacctctggctaatttttttttttttttgtatttttagtagagacgggggttcaccatgtcagccaggatggtctcgatctcctgacgtcgtgatccgcctgcctcagcctcccaaagcgctgagattacaggcgtgagccaccgtgcccggcctgaaaaggatttccaagattttcatctggaaaggatttaccattctaaatgccattaagaagatgtgattcataggaggtcaatatcaacattactaggaatttggaagaaattgatttcaaccatcatggatgaccttgagaggttcaagacttcagtggaagaagtaactggagatgtggcagaaatagtaagagaactagaattacaagtggagcctgaagatgtgactgaattgttataatctcatgataaaacttgaatagatgtggagttgcttcctatggaagagcaaaggaagtggcttcttaagatggagtctatacttagtgaagatgctgtgagcattgtaaaaataacaataaaggctttagaatattacatatcccctggaaagggggctgaagccagggagccaagtggtgttgctcagcgggtcccactcccacggagcccaactagatgagaaccactggcttgaaattctcactgccagcacagcagtcagaagtcgacctgggacaatggaacttggttgggggaggggcggtcgccataaccaaggcttcagtaggcagttttcacctgacagtgctgagactgggaggtttggactgggtggaattcaccacagtgcagcaaagcggctgtggccagactgcttctctagattcctcctcactaggcagggcatctctgcaggaaacgtggcagctccagtcaggggcttacagataaaactctcatctccctgggacagagtacctgggggaaggggcggctgcagtcacagcttcagtggactgaatctttcctgcctgacggctctaaagagagtggctgatcctcacaaggaggattctcccagcacagcacaccaactctgctaagggacagactgcctcttcgagcgagtccctgacccccgtgcctccagactgggagagacctcccaacaggggttgacagacacctcatacaggagcgctccggctggtatcaggccggtgcccctctgggatgaagcttccagaggaaggaacaggcagcaatctttgctgttctgcagcctccactggtgatacccgggtgaacagggtctggagtggacatccagcaaactgcagcagacctgcagaagagggatctaactgttagaagaaaaactaacaaagagaaagcggcaacaacaacaacatcaacaaaaacaaccccccaacaaaaccccatccaaaggtcatcagcctcaaagatcataaatccacaaagatgaggaaaaaccaatgcaaaaacgctgaaaattccaaaaaccagaatgcctcttctcctccaaatgatcgcaacaccgctccagcaagggcacaaaactggatggagaatgagattgacaaattgacagaagtaggcttcagaaggtgggtaataacaaactcctctgagctaaaagagcatgttctaacccaatgcaaggaagctaagaaccttgataaacggttacaggaactgccaactagaatagccagtttagaaaggaacataaaacatagcacgagaacttcgtgaagcatacacaagtatcaatagccaaagtgatcaagtggaagaaaggatatcagagattgaagaccatcttgctgaaataaggcatgcagaaaagattagagaaaaaaagagtgaaaaggaatgaacaaaacttccaagaagtatgggactatgtgaaaagaccaaatgtacaattgattggtgtacctgaaagtgacaaggagaatgcaaccaagttggaaaacacacttcaggatattatccaggagaacttccccaacctagaaagacaggccaacgttcaaattcaggaaatacagagaacactacaaagatactccctgagaagagcaaccccaagacacataatcgtcagattctccaacgttgaaatgaaggaaaaatgttaagggcagccagagagaaaggtcaggtcacctacaaagggaagtccatcacactgacagcagatctctcagcagaaactctacaagccagaagagagtgggggccaatattcaacattcttaaagaggccaggtatggtggctcacacctgtaatcccagcactttggggtcacctgaggtcaggagttcaagaccagcctggtcaacatggtgaaaccccgtctctactaaaaatacaaaaactagccaggcatggtgacttgtgcctgtagtcccagctacttggaggctgaaacatgagaattgcttgaacccaggagacagacgttgcagtgagccaacatggcgccactgcactccagcctgggtgacagagtgagactccacctcaaaaaaaaaaaaaaaaagaaagaaattcttaaagaaaagaattttccacccagattttcatatccatcccaactaagcttcagaagcagaggagaaataaaatcctttccagacaagcaaatgctaagggatttcatcaccaccaggcctgccttgcaggagctcctgaatgaagcaccaaatacggaaaggaaaaaccagtaccagccactgcaaaaatacaccaaaatataaagactagtgacactatgaagaaactgcatcaactagtgtgtaaaataatcagctagcattgtgatgacaggatcaaattcacacaacgttcagccaagagcacagatggttttttaaatgaaatcagtaaaagaatgctttgtctaaatatcacaattttttttttttttgagatggagtcttgctctgtcacccaggctggagtgcagtggcatgatctcggctcactgcaaactccgcctcccgggttcacgccattctcctggctcagcctccctagtagctgggactacaggtgcccgccactacgcccggctaattttttttttttttttttgtatttctagtagagacgatggggtttcaccatgttagccaggatggtcttgatctcctgacctcgtgatccgcccgtctctgcctcccaagtgctgggattacaggcatgagccaccgtgcctggcctaaatatcacaatttttatctttaaaatgatatcttcttactttaggattttacagctgatttgctcagctgtgcttagcctcaacgtgtggaatcaactgaagtgaaacatgatgaaagtttacattgatttagaggttcactgtttgcttattagcaaaggagatttgtacccaggtagacatacgccgtggcattcactgttcattgaaaggacagatcaattgctgacaagttttctctttaggttccttacgttgtgtttaagatagttaaaatgaaataggtaaaataatcaccaatctatctaaagaagagagtggagatttttaaaatgcaacctctgatttccagtttccacattgtgctcagacttcattgcttcactcacaagcaattcctatcttcatctttatatatgtagtaacgtttcctgtggtgtttttttttctctttaatgagaaggatttcaggtgtttaggcatgatgtggcttattcaagaataaaaggaaaaagagaaagaggaaagaggaatccatggattaaaagatttaaaagacatcgactaatcataatgtgtgcatcttatttcaatcctgatttaatcaactttagaaaaggctttttgacataaaacagttgaaaatttgaacactgactgaatatataatgatattaaagaacaattgttttaagaaagatagagataatgtgtgaccagcgcttgataaagaagaacccaacccaaaatctattattagagaaggctgcggagtatgagagaaacagactgtgctgggaatcctaaccctggcgtggccatcagtgcgctgtggccttggctgaatccctttccctgcccagaccttggttttcccatctatgaagtgaaggaggggacccaaggggcctgtttaactctggctttcttttgctttgtcctcctgtcatgggcggccatggagcctttaactcagggcctgtatcaacaccaccatgcatccacgagagagtaaaatgggcagaagagtgcttgatgggcacaagcccagagctgttggcttctgcagaacccagaacaggaagggtcacctccctgaggcacctggcctggagaatcaactgcctgatcccaggtatgccaggtcaaagccaaggggaaggagagaaactgctggaggactttctctcacaaaccgtgggcatgtgttatctgcctaccaggatgctttcaccgtgttctgatgcttgagaacttctggtgagttccctgggcctccatcctggtctggttaccttctcaggactccaggtgagttgggctgcatgtgacagacccatgtgtgtgcaaatgaacaatgtcactggattgctacatcactgacccttcaattccttgttgctggcctctgcccacctgcctttcagataccgtcattatgaaagtatcatccttaacacagaacctcacacactataagtgctccatgtaaagcagtgaaggggtggagaggggaacctccctctaggaccatcatagatgcttaacattctcttgaagcctgacaagctttctccagaaggctgaactataatactcaccatctgctaccaacaccaaccagtttaacacatgaactaaataaccaagaaagaaaaacacttccctttaagtgggtactgcagagcagtagctagatccatacgttagtgtcaaatctggattcaaatcctgcactgcctcctatcagctctgtgactttgggcgtttcttaacttctctgcagcttattcagtaagaatgctgtgaagatgagattatttccttcatacagtgtttggcattgtgcctcacccactgggagggctcaatgtgtgtccacaactgcttttctttttcttttcttttttttttttttttgagactgtgttactctcacacccaggctgtagtgcaatcatagctcactgcagcctcaaactcccaggctcaagggatcctcttccctcaacctcaggagtagctgcgactacaggccaccacacctggctaatttttgtaattttttgtagagatggggcctcgccatgttgcgcaggctggtcttgaattcctgggctcaagtgatccacccaccttggcctcccaaagtgttgggattacagatgtgagctgcgcctggacctttaggcattttttaacctctctgtggtttattttgttttgttttgtttttgagacgagtctcgctctgtctcccaggctggagtgcagtggcgtgatcttggctcactgcaagctccgtctcctgggttcacgccattctcctgcctcagcctcaggagtagctgggactacaggcgcccgctaccacgcccggctaattttttgtatttttagtagagacggggtttcaccgtgttagccaggatggtctcgatctcctgacctcatgatccactcgcctcggcctcccaaagtgctgggactacaggcgtgagccactgcaccccgccacctctctgcagtttatttagtaagagtgctgtgaagatgagatgactgcctgcatagagtgttccgcatcatgcctcacacactgggatggctcaatgtatgctcacaatttgcttttttttctttttctttctttctttttttttttttctttgagatggagtttctatctgtcacccaggctggagtgcagtgacatgatctgggcccactgcaacctctgcctcccaggtttaagtgattctcctgcctcagcctcccgagtagctgggattacaggcacacaccaccacacccagctaatttttgtattttcagtagggacggggttttgccatgttggtcaggctggtctcgaactcctgagctcaagtgatccacccgcctcagcctcccaaagtgctggattacaggactgagccacagcgcccagaccactattgctttttggggggaagcttctattgcagcaccgtaagggggctccaccatcatattttcctacccctcaattgaaccttctctcttttccctatttcttataaaaattacctttcagtgtgtcgttttctcagggacatgctaacctgtgatgttgcagcgtctgatgatgcaactttgacgggctttataatcgtggatttcaggcaagctgggaggccttccaaaggcccttgagaaccacaactttttttttttttttttttgaaaccaagtctcactcttgttgcccaggctggagtgcagcggtgcaatctcagctcactgcaaccttcacctcctgggctcaagcaaatctcctgcctcagcctcctgagtagctgggactacaggcgtgtgccaccaggcccagctaattttttgtattcttaggagagatgggttttgccatgttggccaggctgatctcgaactcctgacctcatgtgatccaccggcctgggtctccccaagtgttgggattacaggcgtgagccactgtgcccagcctgagaaccacaactctttggtgacatctgcaatcctccatatcagccctgcagataacagacagggaactatggctgctgtctcactggagtcaggatatccttttaaaaagaaatgggagtgccaggcgccatggctcacgcctgtaatcccagcacttcgggaggccgaggtgggtggatcacctgaggtcgggagttcgagaccagcctgacctacatggagaaaccccgtctctactaaaaacacaaaattaaccaggcgtggtggtgcatgcctgtaatcccagctactcaggaggctgaggcaggagaatcgcttgaacccgggggcgaaagttgcggtgagccgagatcgcgccaatgcactccagcctagggaacaagagcgaaactccatctcaaaaaaaaaaaaaaaaaaaaatctgggagcacagagagctctcctggtgttgggggaccaacaaggtggaatcaagagccacagaccagggcccaagtcccagcggtaactgagtattatgggggtattaacgcccaccgcccaccgcccaggatagggagcacagagcagagaattctaagcattcaagccctgaaacgcccacttcctctacctgagtcgctgctgtcctctagtgtccactggataaattgcacagcacgctggcctgaagaaggggaagtgggagatgcttttcccccacttctgaatctatctgatgctgtggttctcaaccatgcccacccataacttccttttcataaaatatattttgtataattacagtaatttttaaacattttaggcagatgtattgaggtattgacatataataaactgtgcatatatagagattacaatttggtaacatctgacccttggtatacacctgaaatcattatcacaatcaagatagtgaagatatccgttcccacaaaaagtttccttgttgcccttggtgatcctgcttcctgctctttctacctccccacccccaagcaactactgatctgctctctttttttcttttctttcgtttttattttatttatttatttttttaagatggagtcttgctctgtctcccaggctggagtgcagtggcatgatcttggctcactgcaacctccacctcctgggttcgagtgatttttgtgcctcagcctcccgagtagctgggattacaggtgcgtgccaacaggcctggctaatttttatatttttagtagagacagggtttcactttgttgaccaggctggtctcgaactcctcacctcaagtgattcgcccacctcagcctcctaaagtgctgggattacaggtgtgagccactgtaccctgccctgatctgctttctatcatcataggttagtttatattttctagtgctttctagaaatggaatcatacagtgtgtactcttttttgtcaagcttctttcactcagtataattattttgagttttatccatgttgttttgtgtggcaatagttcattactttttaaaattttagttgtagtttttgtgggtacatagtaagtgtatatatttatggggcacctgagatgttttgatacaggcatacaatacataataaagacatcatggagaatggggtatccatcccctcaagcatttaccctttgtgttaaatatttcatggcaaagttatcttggggtaaacactgcagctgcaggtgccaccagtgagtattctctgggcaaacagaaaaagggttaaacaaatcacattacacattactctaaaatttgtatctatgtctagccctcagacaaaccatgatgcctgttctttacattggtggtcactgaatgctagaattatgaatttaaaattaataaaaattaatcaagttttcaaaaatcaaaataaaatggatttatttcaatcattttgacgtaaaaatttgactaattctaatttgtatgttgccttttggtttaatggatacttttcaatagttgaaaagaaaactaacttttgggaaaatattcctgataaaattaaattttttacataaacataattttgatgaaaatattaagatatttgtactttgaatatgattgttttaatccttacatgtattttcaaatcttgataataataacataattaccgattttgctgaaagataagaaaaatacatttcatggaatagtttcagtaatttataaattccacatctttattactcatcccaatattgtcagcccatcaacagagcacccagacatgcgcaataaacatgaaatttcatgatctttgacattttgctaactttctgtcatatacaaatcatagcttcatatatattttaaaattttatccttttaaaggcatatttgtcagaggatgaggataggacatactttaacatacataacataacataatcggccgggcgtggtggctcacgcctgtaatcctagcactttgggaggccgaggcaggcagattgcctgagctcaggagctcaagaccagcctgggcaacaaggtgaaaccctgtcgctactaaaatacaaaaaaaaattagccaggcatggtggcatgcacctgtagtcccagctactcgggaggctgaggcagaattgcttgaacccaggaggcagaggttgcagtgagccgagatcactccagagtgagactccatctctaaaaaaaaaaaaatacaaatcatagcttcatacacattttaaaattttatccttttaaaggaatatttgtcagagtatgagggtaggacatactttaacagtctgttagtttaatttataacttgcaaatattgagacagatggcctatggtatccatctgtcctcttgccctgagctgacttgactcatgggtcccagcttgggttttccagttgtttgaatgggtaggaatctacccatgtttgccacagctagggggctggaggtggagggtccctctggaccccctttgaatgaccataacttcagagcctatcaaagagactaaatattctgcagcccagcaggaggtcccaacccagcctccagagggagtggaaacttctgcaaaccaacaggattaaactgaggctcatgtgacttccttgggagaccatcctctctcagatcttaagtttcagagatcaaatttccaagcatgtggtccttggctatggaaacctttcctcctgcccaggactctcactctacagagacgagttcattcaggtcatctgaagcccatgtagatttttggccacaaatggtttctcataaagtggtgcccccagcatgttcagcctcccctctgcccctgcaggccttctatcccagggtgccatgcactgctgccctgctgggaagagaagtctggaggggcacggggcagcactgcccacttagaagccccttgtcctatttttctgtcagatcctgcctccctgtttcagagggaagagtgggccgtcagtaacaagatgttttctcccttgcctcttttttgctacagttggtagaaatttctcccagacttcctcggtgactaatgatgttgggatgttgtggccttcacagggaggggacagggtgtcaggtcaccatatcacagatggttgaccccatgccgactacaactggctcttttggctgtaagtgacagaaacccaactcaaacttgttctgtgagtggggacatttattgaatctcagaattgaagggaggggaagggtgtgtttgggtcccagaaagggtggaccctggggctggaatcccgtccagactccgctccctcttcacggaggcttagcaccttagatgggctatgtcctctggccctgcacacatgggcttcctgttggaagctgagcagctccaccagcttccgtttacaaatatagtgactggcacacaagcattcctatgcttatggggggtggtggggggcaggaccccaggactggcagcccccactaaaaccccatgagggaaggagtcaccccaaaggtggtgctgttcccaaaaatgaaggaaacagccagtgctctccaccctatcccacccggccattttcctcacagatgtcacctgtcctcccaggcccagctgctacttctgcctgatgcttggccaatttgcctggttaaaaccagtgtatttccaggagatggatgacgtcacagaactggggttccagaagccttctttagaacatggagagctgttagttgggcagggctgaagtgtatgtggtgaggaagaagaggctcctactgtagacagccttgttctacagatcctcccagaaatctctgggccaggtggaacccagggtcagagagggatgggagagaggtaagctgtggaaggggtgggaacataccttctggagccactgtcttccttgaggggaccctgagagggggcttaatgggcagggatggagcttcctgcttcccgaggctcagtgacatctatctctgagggaccctcctgagtcagtgtggagtaggttgtttggctgaaattctaatttaacagggcatcttgtaaattttatttgccaaatctgtcagctctgggggtagaatgatgggagaagcaaaagaatggcccgaagctcaggctggtgtggaacgagtctcagatagaacaagagacagaagcagcctcattgtctgaagtaaataccaaggttcgtggtctcacgtttaaggagatcgaggtcgcagacacacacgcacacagagtgagtttggagcaggagtttaataggcaaaaggaaagaacagctctctgtcacagacagaggtcccaggcaggttgccaggtggtagtaaaaacgtcagggttttataaatgggctagagaggggcattcatgaggaggggatgtcttatcctcctagagcccgatggttcagttgggaccaggtgtgctatctgtatagagcagagtttttaataggctctcaccccattcccgaccacatcaacttttagtctgtgtctctttgtcttgcttatctgggagcgagagtttctgtgtctattcccacacatcttgcagctgtaggcatacccatcgattctgcttttagcttccctatcttagcgcgcctaaagagaaaggaatgtagttattaaggcccactgttttactggggcccattgtataagtgtgaagtttggtgattacccaggagacttcccccacccttctgtgcctgagctcttatctgtttttaccctttgctctttcaggctggttgttgttagaagaaaagtgatttccttgaactgcgtgaggttagaaagggagctatctttgagctgctttgcgttaaaaggaaagttttctgctggggattcactttaccctaactgtctacctaagtagtttctttctgcctcctataacaagaccagagaagaaacaagcccaccagggtagccatcttgtccaagcagaagccgcctgacacttgaaggcggcgggtggaagaactcaggcttctgccccctcagcagcatatacctaagttaaggggaaaaacacaccttccctcagtgacagaaatagtcccaggttttcagatttattggaagtattatttctttttagtgtagagatgaggtcttgctgtttcccaggttggtctcaaactcctggcctaagcaattctctcacctcagcctcccaaagtgctcggattacaggcatgagccaccatgcctggccagtctttcagttttcatggcattggccattttgaagaatacaggccagttatcttacagattttcagtgagtttggctttgatgtttcctcaggattagacatagcctatgcatccctggacggaatattgcataagcgatgtgtcctccttgggaatcacatctggaggcacacaatgtccctctgtccgtctttggagatgttaattttgattgcaaggtcaaaatactgtctggttatccactgtatactgttttgttttttctttctgtgcaactaataagcaatctgtggggagaccctataagatcatgatatatccagttcttcagcattcttcccaccacctcagatttagcatgcaatgatgatttgttctcaaaccaatctatgatagttgcaaaatggtgattatttttcaactccatgacttcctccacacttatcggttggccttttattgtcaggaagaggtctctgcttcagctccacacaatgtatctttttgtcaatttattattattatgggctcatggattcctattgcatttaatgtataatctgttactgtcatttattctgatggtctaattgtcccagattgggttggaaaccattatgcaatggttccttagatatgacaccaaaagcacacccaacaaaaggacaaatagataacttgcacatcatcaaaattaaaaactttggggcttcaaagaacaccaccaagaaagtgaaaggcaacccacagaatgggaaaaaaatatctgccatatatctgatgctggtctagtatacagaatatataaagaactcttcccactcagtaataaaaagacaactcaatttgaaactggccaaaggttctgaatagacattttcccaaagatatacagtggccaataagcacataaaaagatgatcaacatccgtagccatctgggaaacgcaaattaaaacaacagggtgataccagttcatacccactaggataccttttgtcaagaagacagataataacaagtgttggtgaggatgtagagaaattggaaccttcatacactgctgatgggaatgcaaaatggtgcagccactttggaaatctggtaggcctcataagcttaagcctagggttaccccatgacccagcaactctactccaaagaaataaaaacatatatccacacaaaaactagtatgttaatgttcatagtaggattattcatgatagccaaaaatagaaacaacccaaatgtccatcaactaatgaatggatagacgaagtatggtctattcatacaatgaaatattattcaatcatagaaaggaatgaagtatcattacatgctccaacctgaatgaaacttgaaaacattatgctaagtgaaagaagccagatacaaaatgccatattttctgtaactccgtgtgtatgaaatgtccagaagaggcaaatccatagagacagaaagtagattagtggttgccaggggttgggaggtgggggatgggcagtgactgctaaatgggtgcagggttttgttttggattgatgaaaatattctaaaatcaagtgaggtagtagtcgtacaactctgcaaacatactgaaaaccactgaattgtacactttaactgaattaattgtatgatacatgaattatatctcaataatgctgttaccaaaaaacatcgtttcagatctggccagtcggtgcccctttgagctagctcttgtgtccatttgacatgccccaatacatatttcgagcactttttaaatttcttgtacagcaagataatccagacatctcataaccctttcctgctccagcctgggaatcagccatatttcctagagtcctggttcccttttgtgtggaatgtgaaccaagatctgggcattatttcatttaatcatcaaaacaacccttttaggtaggtattagcatatcttcattttacaaatgaggcccagaaaggttgagtatgttgcccaaagtcacatagcaccccaggatttgaaagcaggcagtgtgaatctagggcccttgctattcaacacacacacacgcgcacacacacatacacaatgtgaaagtgaaggttacgtctacagccagcccaccaagaattgtaccaggcagggtatgcccttgggaaaaatcatgtgtcatgtgtctgggggagtggggttgtggggagattagcacccagtgtcctggccctctttctaaaagcacatgctcagatacacacacacatatgctggtgaagatagtcttcagtaatctcctttgccaacctcactccccatcccaatacccaaatactacccatagctgggtgcccatataagaggacctatggatgaaatgagattggccaggtgtggtggctcacacctgtaatcccagcactttgggaggctgagatgggaggatcacttgaggccaggagttcaagaccagcctggtcaacagagtgagacccccatctctaaaaaataaaaaaataaaaaacaaacaacaacaaagaaagattggccttggtttttaaatgttgaagctcagaagtgggtatatggaggttcatgatactattctctttccttttttaaaggtttaattttccatgataaataaaaatctataaaataataaacaagagaaaagagattggaaacagccaggttggagcagtgagtgagtaaggaaacctggctgccctctccagattccccaggctctcagagaagatcagcagaaagtctgcaagaccctaagaaccatcagccctcagctgcacctcctcccctccaaggatgacaaaggcgctactcatctatttggtcagcagctttcttgccctaaatcaggccagcctcatcagtcgctgtgacttggcccaggtgctgcagctggaggacttggatgggtttgagggttactccctgagtgactgtgagtaccatccgcccctccccagccatttctcctctgctagtcatgtcctatatggccagcttctttctctcctgttcatctttcaaagccaagttcaaaaagcagcccccttcaaaaaagcctttcccaacacgctgtattcactcaagttattgtctgagcacttattatgtaccaacaactgttttagacactggggctgtagagataaacaaattcccttcccttataatgttcacatcctaggggaagagagcagcaacaaacacactcataacgtactgcctggtggtgaccaatgctatgaagaagaataaagcagggggagcaatggtgaattctttagatggggaagtcagggaaggcctctctgaggagatgacattaagcagcactgaattaaatgaaggacctggtcacccaaatgtctgggggaagaacactctaggcagaggggacagctagtacaaaggctttctcctcctgcatggaagggatatctcccttttgcccaggagttgtgtgcacctgtcttgcaacacttttgtcctttaatcttgctttgtgggttttttaggtaccttttttttttttttttagacagagtctcgctctgtcacccaggctggagtgtagtggcgcgatcttggctcactgcaagctctgcctcctgggttcacaccattctcctgcctcagcctccccagtagctggaactacaggcacccaccaccatgcccagctaatttttgtatttttagtagagacagggtttcaccgtgttagccaggatggtctcgatctcctgacctcgtgatccgcccgcctcagcctcccaaagtgctgggattacaggcatgagccaccgcgcccggcatacatatttttaagcttgtacatatttttaagcttgtacatacaagcttattacaaggcctgtattacaagcttaggtacatatttttaagcttgtaatacaggccccttgaaggcagcatctgtgtttgacccaactgaaatgtccctcactaggctttgcacagttcctggcacacagtaggtgctcagtaagtgcaaaacacatgaatagatggacagatgagtaattgtacttatgagtgggtggatggaccacaggataagagggcaagtcaatggagatttcaagccctctagtcctatcttgcctcccaggccttgttccttttgtctgaaaccttgcctccctttctcctccatctcccttctcactcagcttggtcccctctaaatcctgaccttcttctccctactctaagggctgtgcctggcttttgtggaaagcaagttcaacatatcaaagataaatgaaaatgcagatggaagctttgactatggcctcttccagatcaacagccactactggtgcaacgattataagagttactcggaaaacctttgccacgtagactgtcaaggtctggccagggccccagggtgggagagatgagagcagcaaccaggctctgctcacagaacttctcttcccacccacagcctgggaatggccccagaaatatggttcaaaaaatcagggaatccctttactgagcagagggctggagtagtgtccctaatgcccatccagttaggagattctatagagtccctgagtaggatccaggaaggctccatatacagctggtagtagtagaacagttgcagcagccaatgtttattgagagaatattatacactaagtgctttacatacttggcttatttcatccaactttcatgcagtagaaaccatttatgatccctactttacaaaacagcaaactgaggctcaaaaagagaaccagcattgaatgccagactaatggcctcacaggctcttaaccattccggagtaccctctttagctaatgatctgaccaaagaccaagtgcaaactccctacctcagagctgatccaggaggctcgacagggcccatgactctgcccctcacctctgccttcgcacactgaccgatgtccctcggctcctcgcctgaagacccccgctcactaggcgggacatacctctgtggtgttttggcatttcctctccctggaaacctcccacaaactttgagtgaaccactatctaccctggttaggaagaatagtagtgaacaggcccaaatctcaggcctcttgccccttctgcccacaccccctttcacctcgaacctctagcagccattgtagggatgtctaaatgggccccctgggagacagcctttgcctcaactggaagcctctaggtggcatagggctgtccagggagggctggtgtctgcctccatctttggggctgtcttctgtgccctcacaggttttctcttcctccctttcagatctgctgaatcccaaccttcttgcaggcatccactgcgcaaaaaggattgtgtccggagcacgggggatgaacaactggtgaggaggacacggtgggactcagcgggcagagccccacgaaggaggacgtgacagagaaaagggcagtaggcaaggactcacgggcacgcccttgcagtgtctagaaagatgtgggatagcggacgggcttggaactctgagatctggttcttctatgatattgtattaaacaaaactcttctggttgcagtaacagaaaacaacttgagctagctgggggaaatttattctgagaggcccagatgtctcactgagcccactcaagggctgcagctgggcctcaggaagagcatggaaccagggctggaaattgtcagcacactgtccatggcaggtttcagcttctcttggtgcatttgcttcacttctctctccgcagactttctctgctccacagtctaaaggacaaagggtgctgcaaagttaataagctaaagtcctaagcaaccatagggactggctaggctcagtcccagtccaagttcctgggatagagaatctgattggttccacttggaccatgtgtgcccccttggtccaatcaactgtagggatgggaggagttaagcaatacaattatggctgccgctcgggccctgtggccataattgacaatatttttttatttaaaaatgtggaccgggcatggtggctcacgcctgtaatcccagcaccttgggaggctgaggcaggtggatcacttgaggtcaggagttcgagaccagcctggtcaacatggtgaagccccgtctctgttaaaaatacaaaaaattagctggtcatggtggcgcctgcctgtagtcccagctactcaggaggctgaggcagaagaatcgcttgaacctgggaggtggaggctgcagtgagccgagatcgcgccactgcactccagcctgggcggcagaatgagactctgtttaaaaaaaaaaaaaaatgtggcggctgggcgcagtggctcactcctgtaatcccagccctttgggaggctgaggtgggtgggtcacaaagtcaggagttcgagaccagcctggccaatatggtgaaactttgtctctactaaaaaatacaaaaattagccaggcgttgtggtgggtgcctgtcccaggctgctttttgtgttatgtggggatgaggcactgaccctgtgggccgggatctctctggggacctttcccttgctttctgtccatgctccttaaggcaagctgcatgggaggctgaggcaggagaatcgcttgaacccgggagccagaggttgcagtgagctgagatcgcgccactgcactccagcctgggtgacagagaaagaatccgtctcaaaaaaagaaacaaaaaacgacaacaaaaaaatgtggcattcatcagctgggcagacacccacatagctgtgagctcaccaacggtggacattcagatagtcaccttttctgagcttcaaactagatatataagtaacacaaatggctgcctctacaggcaactgtggaaggagtcaaatcccttgcatactcaaaacaccacagaaaagaattgacagcgatgattatgctgatcctttctggagggagaatcaatggttgtacctgggactttttttttttttttaataagtaactctcagccctgtaaaacagtgctcaccccttcagggagatatgaggattttaaaatgtggaaacgttgatccagggaagcaggcaaacaccagagatgagagagttttacaggattcgtcagaggggacagtggaggacagaccagagggctagctagcaatgacggggattctgggcgttgctccatatgcgagactcaccaagaactgggtcatgtgtgtggaagagttactgagtgtgaggcaagaaccatgtcttttttctccgcagggtagaatggaggttgcactgttcaggccggccactcttctactggctgacaggatgccgcctgagatgaaacagggtgcgggtgcaccgtggagtcattccaagactcctgtcctcactcagggattcttcatttcttcttcctactgcctccacttcatgttattttcttcccttcccatttacaactaaaactgaccagagccccaggaataaatggttttcttggcttcctccttactcccatctggacccagtcccctggttcctgtctgttatttgtaaactgaggaccacaataaagaaatctttatatttatcgaaatattaaagcactcgctctgcaaagactgtgtccatttattcattagtctacatatatttgagtacctaagacagtgggagtgtactaggtagtagaaggaagacaaaacacagctattgttgtttaggtgttcataatctaggtggagaagcagagacatccacaaacattacaataggtaattaaatgtatagtaaaatccataattattgctttgaaacagtatcagcatccaagtaattcctccaaagaacaatttttgaagtaaaagagaaaactcagaagtaggcaatgggtggggtctggtattgatgtggagaaagtagtgatgggatggagaaatagtggcagataccaataatttgggggtgctttgggagaataagctaggatctagatgattaaaaaaaggtgctctggacaggatctggtttgcctggagggtgctgaggtggagtagaacatgcttaaagaaaaggcaaaatcagaaaagtgacagttgaaggaatgtcctacacatagccaccgtcagtagtgtctgaccaatctggggttttatcttggaccacttatttctctaccactgagccttagctgtttctactatagaaggagggatttgactattcagtagttgccagacttttgtatttcacaggtgataaaatgtaaaaaataattaaacctgagatttctttcttttttttttttttttgagacagagtctcactgcgtagcccaggctggaatgcaatggcaggatcttggctcactgcaacctccaactcccaagctcaagcaattctcctacctcagcttctcaagtaggtgggactacaagtgtgtgctactacacccagctaatcttttttttttttttttttgaaatggagtctcactctgtcacccaggctggagtgcagtggcatgatctccactcactgcaacctccgcctcctgggttcaagcaattatcctgcctcagcctccccagtagctgggattacaggcgccccccgaccacacccggctaatttttgtatttttagtagagacggggtttcacggtgttggctaggctggtctcgaactcttgacctcaggtgatccacccacctcagcctcccaaagtgctggaattacaggcatgagccaccgtgcccagctattttgtatttttagtagagacagggttttaccacgttggccagcctggtctcaaactcctgacctcaagtaatccatctgcctcggcctcccaagtgctgggattatggatgtcaggcaccaggcccggccgaggtttctaatttttaattttaatgtccaagtaagagcattaaagcaactatcctctattagcatcttttcatagaaaaatttttagtatcaacattatagggaggtcatacttgtagaagaatggagtggaatctactttattttatgaaattataaaaaacctgattatattttccatatggtcctcattttgtagagtaggggtgaaaactttatcacagcatgagtctgaggatcattattcagaaatcacaagagacttgtcctgtagggtctcttctggctctgacattctaggattaaaataaacagtagtaggactcactttacttcttgtgttactgaaactgcctttataaaaattatgacaaatctgacctaactgattccattttgcttctaacctccaagctgcccttgctcattcctgggcacaggccaagctaactatgagaggaatttttgctgcttaactttgaaacaaagataatagtcccttcctgaaacaaaccacctccctgcttgggaatcagatctcctctgtaaaactaacaaattagccacaagattagaaattatggctcagaaattatgtagacagaggccacaagattcctaacctctccagttgctcctatacaaaacactgttgtagtctcagcaatgcaccaagatataacactctgtagttgtctgatataacccccggagttctttgtcctacctccaagatgattaaggagcgtggacacaaaggtggggttacagcaaaagtttaataagcgaaagaagaaagctctctgccagcagagcgtgggggccagaacgggtgtcccctgtgaggctggggtctttatggactgggaaggggaagcaatgtgcttagtccgacagctgtcttggagaactcagcttggcaaggagccttggcccaggaccaatcaggagctgaaatgattcttagatgctgcttagcttggcccaagacctatcaggggctgaagtgatgattcatagaggctggacttacaggtccaaaaaggaaagtagagtgcccactggaactcaccggagcccactatgcccatgcccacaaaagtagaagcaacttcatcctgggagcccactgactatacaaaggacaaaggcatttctatgccaggccttgttcttttgtctgagtgagctgaagttttgtgcaagcttttatccaaatgggccagaggtttttccatctgtgcagccgtgggcatgtctccaggcacaacaccctatgctagttctcttatgggtgctggtagcttgaattttttcccaggctgctttttatgttatgtgggggtaaggcactgaccctgtgagccgggatctctccggggacccttcccttgctttgtgtccaagctaactaactgctttcaacattactattgtaaaacctaatattggggttctaggtatttttcagacccttcattctgatggaccagctggcaccactcacatgggcaaactggctcatctggtcttgcggcccccaaccaggaattcactcagcacaagaacacaagctctgactctctatgatttcatccttgacccaaccagtcagcatttcctattccctggccccctgactgccaaattaccctttaaaaaacaccagcttccaaattttcagggaggctaagttgagtaatagtaaaactccagtcttctatttagctggttctgtgcttatgaaactctttgcctatttcaataacactgtctcagtaaatcagcttttctgggcagtgggtatgatgaacccaccagttgattacactcctccaccacgtagctgattatgacacctacccttctcagacaccatcagctccaatgttggtgccttatttggacttattctttgtgggtttgtttgtttgtttgtttgtttttcttttttcaaaattaatctctccttctcactcgtacctccaacctctcacatcatctgacccccacaagtacacatacacgattcaccagaatgacgtaggacaatcagggaattctttttaaggatttcatgcgagactgttaatggtttagtgagttatacttttatttgcaattttaaactcttaaaaaaacctcttaagtcaaaagattgcatctttcgtggttatttcccacaagtgctaatacttagtaccctaatctccttcaggagtgaagatgaagctggcttctataaacacgtccctacccttccatcctgtcagcctattttgggactttaccctaaacatgcattgaacggaagctctaaactcagggatcttgtggctgtgactggaggaggggaacagactcagaggctggccctaggtaggaggggcaagggagcgatccgagccccgtccccgcccctcgcatgcgcctctttttaaaaaagcgcgggcgtgccttgcgcaggcgcaatgctggggcgagggttagccgcgcaggtgcggtgaagggaggatggcggagttggtaccttttgcggttcccatcgagagtgacaaaaccttgctagtgtgggagctgagctccggacccacggccgaggctttgcatgtgagccggggccaggatggagggagggatggagaaagctgcccacccgctgactgggagttccggagtcctgcctcagaccctcacctgcctgagcctccgctgaaggactcttaattataaaggggatcccaactgacaactgacgacccccaacagatttttagagtcccggagaggtatctctccaccttcagaacgttttaccttccagtgcttcttaaagtttaggattttaagaggaaaacctgttgattaagtgggaagtgttttgaatcgcatccttcgcgaagagaggtttggggaatatgagggcatgtgcggttttgttttctgggcgtgagatttcatgcatttacttgtcccacccccacagcattctctgttcacagcattttctcagtttggccttctgtattcagtccgggtcttcccaaatgctgcagtggcccatcctggtttctatgccgtcattaagttttattctgcaagggctgcccacagagcccaaaaggcatgcgaccggaagcagctttttcagaaatctccagtcaaggtgggtccaaatatggaattcctagctccgctgaaatgaagtgctgaattcaataataggttagcatttgtccagcacgctggtttacagaatattttcagatgcattgccacactaatcttccagttctctgggttttttacatgaagaaactcaaactcaaggtggttgagcgacttgtttaaggttcctgacaagaattatggaaactcgagattgaactaaaacctactgatgctaaacctcatgtcattttatgctgtccctttttaagaaatctcagcttgggcaacaaaatgagaccccatctctataaaaaaaattgtaaagataaggctgggcaccgtggctcatgcctgtaatcccagcactttgggagatcgaggcgggctgatcacttgaggccagcagtttgagaccagcctgggcaacatagcaaaactccatctgtactataaatacaaaaactagccgggcatggtggcatgcgcctgtagtcccagctactcgggaggctgaagcatgggaattacttgaacccaggaggtggaggctgcagtgacccgagattgtgccactgcactctagcctgggtgacagagtgagactccatctcaaaaaaagaaagaaagaaaaataaaaaattaaatatcagccagatgtggcatgcacctgtagtcccagctacttgggagactgaggtgggaggatcgcttgagcccaggagtttgaggatgcagtgagcaataattgcatcactgcactcctgcctgggccacagagtgaaaccctatctctaaaaaatgactgaatgaatgaaatctttgccagaagacttctgcttatatttactttttaatttttttagagacagagtatccctgtgttgcccaggctggtctctaaatcctggcctcaagcagtcctcctgcctcagcctcttaagtagctaggtacaggccaccatgcccagctatatttactttttatttttattttttgagatggagtctcattttgtcacccaggctggagagcagtggcatgatcttggctcactgcaacctctgccttccgggttcaagtgattctcctgcctcaacctcctgagtagctgggactacaggcgcctgccaccacacctggctaatttttgtattttagtagagatggggtttcaccatgttggccagtctggtctcgaattcctgacctcaagtgatccacccacctcagcctcccaaagtgctgggactacaggtgtgagccactgtgcccagccatatattatatatttactttttttttttttaaagacagagtttcgctcttgttgcccaggctggagtgcaatggtgtgatctcagctcaccacaacctccgcctcccgggttcaagcgattcccctgcctcagcctcccaagtagcagggattacaggcatgcaccaccacgcctggctgattttgtatttttggtagagatggtgtttctccatgttggtcaggctggtctcgaactcctgaactcaggtgatctacccgcctcagcctcccaaagtgctgggattacaagcgtgagccaccgcgcccagcctatatatttagttttatgtgaatttaaaatgtgtgggtgtgaccaggtcttctgccagctgttacataaaggagactgtatcatcatcatcacatcatcatcatcatactcaccatggctcacaaactgcctgtttgaaactcccttcagttctgagaggatgggaacattctttaagcggtattgtagaaaccctattccatattaacatgccaaccaattttactttcccagagccacagaatgatatctcattgtatgcctcaattcagtcatctttcccttttcaaggaccatttcaattcctgattggctacttgatctgactgcttcctactaatcttgctgcctattcttctctatattccattcctcattgaattaaccttgatcaaatctgagaactctgcttagtaatgactccaggtatactactcccacttcagtagcctgttcaatgccctcttagcctgttcaacaccctcttcaatcctggttccactttctgtgactgaaatgattacctgtgagatattatttaacttttgaactatggtctgtttctaacctgtgaccatttcacatagccactcaaatattataaaggtacaactaagattatgaaacatttacttggtatcattttgcaaataatgagtttttagtgctctttggacattgagaccatttcataagctttaggttttgagaatttcacagcataaagcctatcactgagacagtaatgaaggaaatgttctacaactcaatagataggtgagatgagagggcattcatactagatttattactaaactcaaagctttcagttactactcaccccccactgtaatctagtttaagtgttcttttctactttagcacgtacacttagttcctgtcttttttgcctttctaaatacagaaaagagaataatgttttaaaataaaatcaaggaaaggcctaaggcacctgagagggttttgtttttgctttttgggtttttgtttttttgtttggttttttcgttttgtttttttgagatggagtcttgctctgtcacccaggctggagtgcaatggcatgatctcagctcactgcagcctctgcctcccgggtttaattgattctcctgcctcagcctccagagcagctgggattacaggcgtgcaccaccacgcccagctaatttttgtatttttggtagaaacaagatttctccatgttggccaggctggtcttgaactcctgacctcaagtgatctgccgcctcggcctcccaaagtgccgggattacaggtgtgagccaccgtgcccggccaagagggttttttggttctttttttttttttttttttttttttggtgaaatgaaggaaaatggttgctgcaaagttatccaagctgacagctgtctgtgccacccagaggctcagagtttttctgaagcttcctggttgtctggaaaggctccactgtgactcacgatacaggccggtctcgccagtggcactcaacgtttaaaaactggtctttatttctttcccaacaggcatttctccttcttttcagttggagaaagtaatttcattttttacttgctcattgttttattcattcaatcgatagatcatctgtgctctattatatgccaagaactatgcttagttctggaaatgaaaaaagaataagctatggtttcatctgggacttaaggagcttataaaccagtgatagaggaaggtgcataaacaaatcaataaagaattaactttacggccaggcgcagtggctcacacctgtatcccagcactttgggaggccgaggcgggcagatcacaaggtcaggagatcgagaccatcctggctaacacggtgaaaccccatctctactaaaaaatacaaaaaattagccgggcgtggtggcaggtgcctgtagtcccaactactcgggaggctgaggcaggagaatggcgtgaacctggcaggcggagcttgcagtgagccaagatcgcgccactgcactccagcctgggtgacagagcgagactccgtctcagaaaaaaaaaaagaactttactgttaattcttattaatttctaatacaaataaatttgactttatttgtatcatttgaatttcatgaatataatatactacatttaaaaaatgaaatatataggaaaacttgtgatgtaagaaatccacaaaaatggataaaatgttttaagaattaacactcagtagatatttgcgttctcaaagaagcacgtaaatgcagatatacctctcctttcagttgcatgtaaaatttatagaagtatttgtatttcctttttttttttttttgagacagtctcactctgtcacctagggtggagtgcatggcaccatctcggctcactgcaacctctgcctcccaggttcaagcgattcccctgcctcagcctcccgagtagctgggactgcaggcacgtgccaccatgcctggctaatttttagtatttttcgtagagacggggtttcactatgttagccaggatggtctcgatatcctgactttgtgatccacctgcctcagcctcccaaagtgctgggattacaagggtgagccactgcacctggtgttatttcatcttttaacgggttagtaacttggggagggggatgggtggtgggttcatcttatctatattcaggtcatattctcaagcaggaactactgaatgggaagacagtaacaatttttcattgcacacttggtattgacaaatctcagatctatccaaaataaaatctctagcggttgtgatatttatgggtctatctcctatgattttaggttcgtcttggcaccagacataaggcagttcaacatcaagcccttgccctgaacagttccaaatgccaagaactggcgaattactactttggtttcaatgggtgttccaaaaggatcatcaaggtaaaccttgtagattttttttcacttaccacactctcctttcaacattgaaatcctagattttagacagaagtattgaactggattgtagggaggagatgtgagaggcctctaccattgaggataaattgacatgtctgaattggcctgctacctagaattaataatctcagtcaattggatggtggtatccgtaattttctccactgtttttgtggcatataataaaaaatggttgtctctatctagcaattcatttgcaaatctaacttgattttgaagccataggacacctcaactgttagcttgaatgactggagtgtagttgttttttgggttttcttttttttattgggtttttgttttgttttgttttgtttttgagacagaggctcgctgtgtcatcaggctggagtgcagtggcgctatctcagctcactgcaaaatctgcctcctgggtacaagcaattctcctgcctcagcctcccaagtagctgggactacaggcgcccaccaccacgcccagctaatttttgtatttttagtagagacggagtttcaccatgttggccaggatggtctcaatctcttgacctcgtgatccgcccacctcggcctcccaaagtactgggattacaggcgtgaaccaccacgcccagccaagtttttacttttaataacaaaacattttgaagcctacattaagaccccaggaaggaccttacattaaatatccttacagcttcaggagctttctgaccttgaagaaagggaaaatgaagatagcatggtgccacttccgaagcaaagcctgaagttcttctgtgctttagaagtggtgttgccatcctgtgattgcaggagtcctggcattggcttggtggaggagcctatggataaggtggaggaaggtctgttttcactgggagtggaggagggtagggatttggagtggaaaggatctttctttttttcttactttccaaaactcatcttttcagatacatatcaagcccctccctctctgagctactgaagtcctgggcagagtttttctgtcttacaacatagggttttactgtaggcaatacctgattgaacctttaaatttaaaatcgtacagctgacttcctgccgagaagcttaggaggaagaaggaagtaatgtttttacagtttttggttaagaacttgcttcgaactaaaatagtccttcaaatatgtgtctcttgtagctctcggttatcccagcaaaaccatctaaagatttttttttatctatttattattttttagagataggatcttgctctgttgcccaggctagaatgcagtagcatgatcatagctcactgtaacctccaacttctgggctcaagggatcctcctgcctcagcctcttgagtagcgaggactacaggcgtgcaccaccacacctgcctaattattattattattattatttttagagatggggtctttctgtgttgtcccacctggtctccaactcctggcctcaagtgatcctcttgcctcaggatcccaagttgctggggttataggcatgagccaccatgccaggtcatcatctaaagatttacataaacttttgtataaacattcagttcctttttttactcataaaagggtttcagcagaaaaagtgtctaatatagatacctagaaagggtactcagttgatactgatgttgagtatttttttagtattcatggccatcatgcttagggtttgaagtcagaggcagggctgtaggctaatggagtggagtaggctcccgggggtgatgcccagggaggagccagattatctgtaccaaagttttttcttttttgagatggagcctcactcagtcgcccaggctgaagtgcactggcgtgatctcggctcacagcaacctccatctcccaggttcaagtgattctcctgcctcagcctcccaagtagctggggttacaggtgcctaccaccacacctggctattttcttgtggttgtatttttattagagacagggtttcaccatgttgcccaggctactctcaaactcctgacctcaagtgatctgcccaccttggcctcccaaagtgctgggattacaggcatgagccactgtgcctagcctcttttttttttttttttttttttgagacagaatctcactctgtcgcccaggctggagtgcagtggcatgatctcggctcactgcaacctccgcctcccagttcaagctattcttgtgcctcagactcccaggtagctgggattacacatgtgtgccaccacacccggctaatttttgcacttttagtagagacagggtttcaccatgtccgccaggctgtttttgaactcctggcctcaagtttcaccacattgaccaggctgttcttgagcccctggcctccacctgcctcagcctccccaggtgctgggattacaggcatgggccaccaggtccagccaaccaaacctttttcgatgagtgattccagcccttgatgcataggagggtagggtctgtaggagtgtagccttaactgatcaatttgaaatctctgggtgatgtgagacatgtgccaggttcttggctcttatctcccttctagtacctcaggaacttccctactagatggaggtagtaaaaatgggccctgccaggatgtacctataacagagccattcaaccatacgcttgtgccatctgcccttagtcatgaaggttttgagctaagaatcgtggatgcttttttattttttaaacatatagcaattatcattcaaataggcaccttaaatccatttgttttggttggatttaggaccattatcattccttatgaaaaggaagacagcccagaagcttgctattcagaaggctttgtcagatgcattccagaaactgttgattgttgttctaggtaagactgtcttgatcatccttgaagtacttcagtttcagtaagcaaataaactcattttgaaaagttaattgaataaaaatattgatatctaaagcactctatagtatgctttcatttgctaaattatttcacaccaacaggctcaaatttgttctgtgtgacatttgtgaaaaaaaatgacagcaaatattgtccccagtttacagatgtgaaaagacttgcctcagttcccacagaaaatgtttaagccaggtcttctttaattgcttacctatcatacagaatagtgattataagttttggacgcatggatttgagtcctaactctgtctcttagatttttaatgcaattaggccgggcgcggtggctcacgcctgtaatcccagcactttgggaggccgagatgggcggatcacgaggtcaggagatggagaccatcctggctaacacgatgaaaccccgtctctactaaaaatacaaaaaaattagctgggcgtagtggcgggctcctgtagtcccagctacttgggaggctgaggcaggagaatggcgtgaacctgggaggtggagcttacagtgagccaagatcgtgccactgctctccagcctgggtgacagagtgagactccatctcaaaaaaaaaaaaaaaaaaaagattttttaatgcaattttaggtcttatagccagagagatttgaaaatacttaatatctctaagctgcagtctcttcatctataaactggggttagtaattcagtcagccttatggaggacattgtaagagtaaatgagatgacaaatgtaaaaactcggagctacacttacaagataagcagacatattaactattattgtcattgttgatttatctctgaataaataagctctctgctgaagagtttattagattatgtttcctgaatcaagaattcagtttcagctttcatttctggcactgacacattgggcaagtatgattcttatacaaaaatcagctgctttgccgtgagccttggaattggtcatgctattgaatatattccctattgcttgtattccctattgagttctacagtggcacgaatcttataggctgtgcccaaaggaagcctaatgattagcaaagagtccctgaacagagttgctcttctgcttcacagccctaaaggcttagagactgagagatcctaattaagttaccacagacctttatttgcttgtaggaggtggccctgactgctctcagctttccaacctgggcaacagcccttctagtgaaagtcttacttccttggtcatcaactgtcaagtctgagtaacaacatttaagaaccaaacgaagtgtgtgtgttgtttacctctccctaatatacaaaggtatcttgcacacactgaaaacttcttagaccaaaagcctgatggctctagtttgccttgaaggtagttctattgtctataagggtatgtgagcctgtgtctgccaataaaatgttcaaatgttctctctctcagaagctttgttcattgtatctggtggaatgaattttggttcaaaaggagtagacacctgagtagacaaaagaaggcccttgcttctaatgtgaagtgtctactagcccagtggtctctattccaaatttgaacttgctttgacccccatctgatgccttaccatttagtcatattatgattgagcattttggtttccacattttttatttcttatgttattccttagttcctatctgtaagatcataaagtcctttgtaccgaatatggttgatatttcatacatatgttaaaaactgaggtgtgaggccagacatggtgactcacacctgtaatctcagcattttgggaggccaaggcaggaagaccacttaaagccaggggttcaagaccagcctgggcaacaaagcaagaccacgtctctaaaaaaaaaaattaggcaggcacagtggtgtgtacctgtagtccttgctactctggagggtgagccagggggatcacttgatcccaggaattccaggctgcagtgagctgtgacagtgccattgtactccagtctgggtgacagagtgagagaccctgtcttctaaaaaaaaaaaaaaaaagaaagaaagaaagaaagaaaaaactgaagtgtgagatgaggagataaggaaacttccaggaaaatgctcttattttctgcttttagaaaccaaaacaatgtttcatcatggggtgctaccattatatgcaggaagttttagaatgaaaaagattctgaattgatcctcgctaactttatttcagaaagtggtaaaatagctgtggagtacagacccagtgaagacatcgtaggtgtcagatgcgaagaagaactacacggtttaattcaagtatgtgaagataaaaactcaggggtaacatagccagtgtaaccataattcaaaaaaaagcagcataatttggaggataatttgtttcattcttaggaaaatgtgaaactgatactacttttgagtgcagagtatttctggggcttttcctgaagtcttgacctttggctctgaccgcttatttgaagtttggagaggagaactgaggactatcagagtattactacagttgtggacacaggagagggattagtcttcccccaggagttagggattccaggctgcttgaacacaggcctttttagaactttcttcaaacagaatcccagagatatggggagaaagtaactggccttaagaatgatcgtgctacagctttcgaaaactataatgcctttcaaatacagtttattacctggatctcaatatctcacgtatatcttgggtagaatattttgctgagatctttctgtaaatcagttacaatcatgtgctacaaaatgatgtttcggtcaacaatagaccacatatatgatggtggttccataagagtataatggagctatccctatacagctataccattttttatcttttaaacagtatttttactgtacattttccattttacatacataaataccttccgttatgttacaattgccttcagtattcagtatagtaacatacagtacaggtttatagcttaggagccataggccataccatatagcctaggtgtgctgtaggctataccacctaggtttgtggaagtatatgctatgatgttagcacaagggtgaaatcacctaatgacatatttctcaagcttctcctcacatggcaagcaacgcatgactgtatatgaaagctcttaaatagggattaagtttctaaattaatctctgaaagaaaacagtcattatttactacatatggaattctttaaaaaaagtagcaaaagtgttttttttcagtaggaacttaatttggggctagagtgttttatttaactttcaccccaaagttgcaaagcgttttgttttgaagtttttccctgtaaaatagttattttaattcaatttaaataaaacccatcaaggaaacttcaagctttaagaagtctagcttcctgtgaaatgtgagagaaagtcagcactgatttcagaaatctgattataacaatagatccatccctaaatgaggcaagtcttggaatcccttccattgtaaaaccattaatctgcaccatatacctatgctaggcactggcataagatgaagcacgttcttagagttcacatgctggtgattgtgccagacaatgagtaataaaataggtaacaatggctgtggaggaagtcagctgggttccagttatagtcgcatttcaggaaattatttaacagctgactttaacaacctaagcctcttctccatgtgtgcacacagggtagacctctgaagagtggcgctgtaatttctagggtaatggctgtgttaagtcaaggcaggatgacagttcaaacttctctcccagactgaattgcccacctcccaaaacccctcctacagaaaatttggagtcttcacttattccctggcagcccctacctaatagagtggtgaattatcaaacatgcaacaaaggatatggaaagtttagcaaaaacggcaacattttggaatgaatgaccgtaatgtgcgttctgcctgccaccctaactagcgcacattttgcaggtcccttgctctccctggaagcagtatggccaagaggaggaagggtatctctcggatttcagcttggaggaggaagagttcaggctgccagaacttgactagcatttctgaatatcccaaggcgaggtcatgtaacttccttgggaagctctgtcgtgcccctaccccacgccgccccaccactataggctgctggagtcctggaaccacctgggtcggccgcccaaatctttcctggcgaaggggagggaaggggtgttctggtggagtgggaagggaggcttgggtaggattgtgggataagatcgccctggtgacgaggagcggatctcgaacggaacttaataaaggttgcctagataaagatatggtaaataacggacgaggcggggccgcggttgctaagggcgcgggcatctggtggctgccataatggcttctgctcagtgcgggacgccaacttctgtcatgtaccggctgcgtctctggtccctatggcccctcctcacgtgacaactactgtgactactagtccaggaggctcagcctctggagtgggtccagggcccactccagctgacctccgaccccctgaggccaactgagccctgggcttggcgctcctccgatctccccccggaacctccctatgcgtttatccacccccacccccatacagacccgggagctttgataacctgaggtcctctactgccacccagatgtcagcctcgcctcaggaaccgactgagactttggttccatttctggacacagattcagctggagagctgcccctggggccagagaagttcgctgttgcacaccaggatctgaatgataagctgactcacaagaaaggctcccagagttggttccaatgctagactgggatcagaaccagacggtagctcggcctctttgcctcaaaagtaaggttcaaactgtaagtctagatcaggctgcagatcattaggcatatgaaatacttgttccacctctagatagtcagaattcaaaagcaatgaagattagtgtttcacccaaaaacctgaagaagaaagatctacctaagcatcggaggcttgctaaggttgttgttggaactccacaccgatttgtatcaaaacctcagtgtcagaaacaaactttacaagcatttagtatttagattcaggtatggatatactgtatctgggcagccttcctccagaagtccaggtgaaagatgagcctccagggccccatgagcaagttggacttttgccaattctatctagagcccgaaactcaaaatccacagaccctccaagagatccagtcatcttcactccagcaagaagccccagcacagcttccacaggtccctgaatacgtagaaacttcttcaaccccgtaggaggccccagctcttccttctcagtcccttaagggggtccattcttcaacagagcaggaggccccaacacagctgctacctgccctgaagagattgtagctcagttatgaatacgttatcaggtaaatgttgcattaaaaagttggagtgaggccaggtgcagtggcttacacctgtagtcctagcactttgggaggccaaagagggtggataacctgagatcaggagttcgagactatcctgaccaacatggtgaaaccctgtctctactaaaaatacaaaagtttgctgggtgtagtggtgagcacctgtaatcccagctactcaggaggctgaggaaggagaatcgcttgaacctgggaggtggaggttgcaatgagctgagattgcaccattgcactccagcctgggcgacagagtgagactccatctcaaacaaacaaaaaaagttggagtgaagctcatcactcacacttgcccaatgtaacagtcaaacttgtggatttggagcttacaataagtccaaagccagataagaaacttacatcaagccgggaacaggccacaactcagcctccagagcaccctgagaagatggacccttcctcaacccaattagaggacccagcttagacaccagagtgccctgaggagatgaaatctacaacccagcacaggaccccagctgagcctccagttcctcctatggaggccagaccttctccaagtgagcaggaacagccagctcagccttctgagtttcctggggaggttgaaccttcccagacccagcaggaggccaccgctcagcctccaaagttctctatggagagtgcatatcaaactgcactgaattatgaggtgacagttcaaactcagggtgaggatcaagctcattatacaaatgacagttaaacctgtggatgtagagattaccataacttcagagcctatcaaagagactaaatattctgcagcccagcaggaggtcccaacccagcctccagagggagtggaaacttctgcaaaccaacaggatttaactgaggctccaagtcctgtggaggatgaatctcccccgagtgagcaagaacagacagctcagacttctgagtcttcaggggaggttgaatcgtctccagcccagcacgagaccccagctcagcctccagaacatcatgaagtaaaagtttcacctccaggtcaccataaagctcagcattcagatttgcccattgtcactgttaagcctccagttatgcagctcaccatagcaacagagcctactgcagaggtgggaacttctccaatccaccaggaggctacagcttagctctcaggggcagttaatgatgtggaaccttccatgacccagcacgggggcccaactctgcctccatagtcatcagaagatgactttaccagttcaacaggagacttcagttcaatctccagctattaaagatgagaacctctctccagcccagcagaaggctgctgctgagtatccacagatgcctgaggaggttgagtcttctccaacacagcaatagaccccagctcagccttcagagatccctattgaagttatagctaatctccagtgcatcatgaggtaacagtttctctaagtcatgatcaagttcagcctccaacattgcacaatgacactgtgaaacctgtggatcacatggtaaccatgactccagagttcacctaacaggttgaaattttaaccaaacacagggccccagctcagtcctcaatgtccccttagcagtttcagcatttgaaagaccagcaagaaatgattattcagcagctaaatacccctgaaaatgatgaacttcctccagtccctcaagagcccacaactcagtcaccagctcagactttgtaaggtcattgaatgatgagatggtattttcacctctagatctatctttaatattcagaaataattcaactttccctaataccacatttaaaaatatggatatggacctcaccatacctacagaagtcactatggaggttgaaccttccccagtccagcaggacaatcctcctattcccactgagtaggctgacttttctccaacccagcatgataccccttccccacctctggattctccagaaaagattgaatctccatcacagcaagaggccacagctcagaccccagattcccctaaaggggtggattttctccagtccagcaagagtccccagctgaggcaccagagctccctaaggaggttgaaccactgcaacccagcaggaagcctcaggtcatcctccaaagtccactgcagaggtcagtccaccatagctggagataccagctcagccatcagccacctgagaaggtcaaaccatcttcagtcctacagcaggcctcaactcagcttttagagccacctgaagaggtagaatgctctccagtccagtagacagtgcctgctcagtcttcagagccccctatggtggtagaatcctcttcgacagagcagatggccccatctttgcctccaaatctccctcaggaggtggaaccatctctgactcatcaggaggttccaactcagactccagagccccctatggagacagaaccttctccagctcagcaggaggccacagttcaggctccagagcctcctaaggaggcagaaccttcaagtcagcagatggtcccagctcagcttccagagccccctaagggggttgcagctcaacctctaatgcattatgagatgacaattgtaacagcaagccaggaccaagctcagtatccagcattatgagatgacaattccaacagcaagccaaaaccaagctcagtatccggtatcacccagtgtcacatttcaacatttacacctggagcttaccataactccagaacccactatggaggctgagcattctataatgctgaggatgactacagctcctccaaaacaccctgaggtgacccttccaccttcagaccatgtgcaggctcagcacacaaacctgaggccacagtgcaacctttggatctgaaatttaccacgaatcaacaacctactacagagagtatattttctccaaccatggagaattcaactcagcttccagagccacctatggaggttgtaactcaacctccagctcattatgaggtgacagttccaatacaagatcaggatcaagctccgcattcaatactggccagtgtcacacttcaacctttggacctggggcttaccatcgctccagaatccactacaaaggttgaactttctccagccatgcaggaggccgcaacttagcatcctcaggaagttacaccttaacctccagtatttcaagaggtaacaatttcaacaccaggtcaggatcaatctcagcattgaatatcacccatcattatagttaaacctctggacctgggacttaccataactccagaacccacttcagaggttgaacattctacacccctgaagaagactatagttcctccaaagcaccctgaggtgacacttccacatccacaccaggttcagacttagcattcaaacctgactcaagtcacatttcagcctttggatctgaaacttaccttaactccagaatcctctatggaggttgagccttcttcaaccatgcataagaccccaactcagcctccagagctacctaagcaggttgtagttcaccctcctgggtattattatgagatgtctcttccaacagaaggccaggatcaagctaatcatccaacctcacccagtgtcacagttcaacctttggatctggggcttaccgttactccacaattcactacaaaggttgaaccttctagagccatgatgactacagctcctctgccaaagcaccctaaggtgacacttccaccacgagacaaaggtcaatgctcagtattcaaaccagacccaagtcacagttcaacttttggacttggaacttaccataaatacagaacctactacaggggtgaaacttttccaaccacagaggagacctcaactcagcctccagacctggggcttgccataactctagaccccatacagacattgaacattctacagccctggacaagactgcagcttcacgtccagaccaggttcagactcagcttcaaaacctgactgaagtcagaggtccacctttcaactagaacctactcaggattcattggttcagtctgaaagttacacccaaaataaggctttaactgcacaagaggaacagaaggcctccacaagcaccaacatatgtgatctctgtacctgcggagatgagacgctgtcatgtattgacatcagcccaaagcagaggctccgccaagtgcctgtgccagagcctagcacctacaatggcatcttcaccatcttgtaagaatcacctttcctcaattgttctctgtgtcctgcctgatatagcagctttttcctggaggccttcctgggccttctttatctcaccaaaccacatggacaactgactttctgcttctgcctttgcctgtcatttcttccttctcctcattctcctttactgttaggccccttccctggtcttttacttgtgattgctcttaatccttttcttatccatttttctttagccccatcacatcatttgcttcactgctgctgtcctcctatttgcacttcatcctctttacagcagtctgtctctccatctcagtgatagtgctctaggtggttaagagttgattctgaagccaggttactgggtttgaacccaggtctgtcatttgttagcttggttaccctgaacaagttatttttctctgtgactcaatttcctcatctttaaactggggattattctagttaccatttcataggattgttgtgaaatttaggtgagtgaatacctgtaatacttgcatcagtgcctagtatatgtaagagtggtggctgttaacatgattacttagctctttagttatgttcagaactcatctttgtccctgactttctatatgtagcacccgttttgtgtccaacccagggacaagtatgacactgtctctggaacatgaaaatgatagaagaaaaagaataagcataaaaatggaggtgtaaataataaagtactaaaacataatgcagaccatcagtgctagaattcaccagaatctgtgatccttgaattatggaggtcaggggaagctgcatcagtaaactaacactttacctggggcttaaaaattagctataatttgttaaataagaaaaaaataggagtacggtctaggcaaaggcatggttacaggtatggtcgaaattgagtagaacgacccacagctcagcctccagagaaacccaaggaggtggactcttcctcaacccaattagaggccccagctcagataccagagcaccctgaggagattaaatctgcagcaacccaccaagggactccggctgagcctccaggtcctcctgtggcagctgaaccttcctccagtaagcagcagcagccagctcagccttctgagtttcctggggaggttgaaccttctcagacccagcagaagaccccagttcagcctccagagtcttctatggagagtgcagctcaaactccaccgaatcatgggtgacaatttaacgtcagggtgaggatggagctcattataccttgccaagcattacagttaagcctgtggatgtagagattagcataacttgagagccaaggataatgaatcttctccagtccagcaggaggccccaacctagcctccagaggaggtggaaacttccacaacccaagagaaggccccaactgagcctccatgttctcctgtggagactgatccttttcccggtgagcatgagcagccagctcagccttctgagtctcctgggaggttgaattttctccagcccagcaggagattccagctcagccttgaaaacattatgaggtaacagtttcacctccagctcaccatcaagctcagtccttaatgtcccctgagaagtttaaccatttgaaagatgcacaagagattatcattcagcagttaactacccctgaaaatgatgaactttctccacttgctcaaaagcccacaacttggtctccagctcagctctcctcagacattgtaagtccattgaatgatgagatggaatttttcacctgaagatctgtcttcaatattcagaaataattcaactttgcctaaaatcacagttaaaaatgtggatatagagtttaccatacctacagcagtcactatagaggttgaaccttctccagtccagcaggacaaccctcctatttccagtgagcaggctgacttttctctagcccagcctgattccccttccctacctctggagtctcctgaagagagtgaatcttcagcccagcaagaggctacagctcagactccaaatccccctaaggaggtagaaccttctccagtccagcaagagtttccagctgagccaacagagcctgctaaggaggttgaaccatctgcaacccagcaggaagcctcaggtcatcctctgaagtccacaaaagaggtcaatcctccaccaaagcaggagataccagctcagccatcagagccacctgagaaggttgaactatctccagtcctacagcaggccccaactcagcttttagagccacttaaaaaggtagaatgctctccagtccagcaggcagtccctgctcagtcttcagagccctctattgtggtagaaccctctccagtccagcagatagcccatctttgcctccagagctccctcaggaagtggaaccctctctaactcagcaaaactttccagctcagactccataccccctatggaggcagagccttctccaaaccagcaggaggccacagttcaggcttcagagccccccaagaatatagaactttcaagccagcagatggtcccaggtcagcttccagagccacctaagcgggttgcagctcaacatccaatgcattatgagatgataatttcaacagcaaggcaggaccaggctcagtatccagtgtcacccagtgtcacatttcaacctttagacctagggcttactataactccagtatccacaaaggaggctgagcattcgacaaccctgagaaaaactgcagttcctccaaaacaccctgaagtgactcttgcaactccagaccatgtgcaggctcagcacacaaacctaactgaggtcacagtttaaactttggatctgaaacttaccacaactccacaacctactgcagagaatatatttcctccaaccatggagaactcaaatcaacttccagaaccacctacggaggttgtagctcaacttccacctcgttatgaggtgacaattccaacacaaggtcaggatcaagctcagctttcaacactggccagtgtcacacttcaacctttggacctggggtttatcatcactccagaatccactacagaaattgaactttctccaaccatgcaggagaccccaactcagcctcctaaggaatttgtaccccaacctccagtatatcaagaggtgagtgttccaacaccgggtcaggatcaagctcagcatccaatgtcacctagcgttacagttcaacctctggacctggtggacttaccataactccagaacccactacagaggttgaacattctacacccctgaaaaagactacagttcctccaaagcaccctgagatgacacttccacatccacaccaggttcagactctacattcaaacctgattcaagtcacagttcaacctttgggtctgaaacttaccttaactctatggaggttgaatcctctatggaggttgagccttctccaaccatgcagaagaccccaactcggcctccagagctacctaaggagtttgtagctcaaccgcctgtgtattattatcagatacccattccaacaccaagccaagatcaagctctgcccttctacagccccgatgactacagctcctcctccaaagcatcctgaaatgacacatccacctccagacaagaaccaggctcagcatccaaacctgactcaattcacagttcaatctttggacctggagcttaccataactacagaacctactacagaggttaaaacttctccaaccatggaggagacctcaactcagccttcagacctgggatttgccatagttccagaactcaccatagagactgaacattctacaggcctggacaagactacagctccacatccagaccaagttcagactcagcattgaaacctgactgaagtcacacatttcaccttctgaactagaacctactcagaattcactggtgcagtctgaaagttatgcccaaaataaggctttaactgcacaggaggaaccgaaggcctctacaagcaccaacatatgtgatctctatacctgcagagatgaaacactctcatgtattgatctcagcccaaagcagaggctccaccaagtgcctgtaccagagcccagcacctgcaatgacaccttcaccatcctgtgagaatcgtctttcctcaattgttctgtgtcctgcctgacatgacagccttttcgtggaggccttcctgggcctcctttatctcaccaaaccgaactgacaacggactttctgctttcacctttcttgtcaattcttccttctcctggttctcctttactgttaggccccttctctggtcttttacttgtgattgctcttaacccttttcttatccactttcctttagccccatcacatcattgcttaacagcggctctcctcccattttcacttcaccctctttacagcagcctgtccctcttcccatctcagtgatgatgctctaagtggttaagagttgattctgtagccaggctgcctgggtttgaacccaggtctgtcatttattagcttggttaccctgagcaagttattcttctctgtgactcagtttcctcgtctttaaactggggattatgctagttaccatgccataggattgttgtgagatttaagtgagtgcatacatgtattgcttacatcggtgcctagcatatgtgggagtgttggctgctaacatgattactcagtcctttagttatgtccagaacgcatctttgtccctggctttctatctgtagcagtcgttttctgtcaacccttggccaagtatgatactgtcttcagaaatgaaaatgataggagggaagaaagagactaggcatgaaaaggaggtatatataatgaaatactacaagataatgcagaccatcggtgctaggattcaccagaatctgtgatccttgaggtgtggagatcagggaaagctacatcaataagctaaaacttacttgggacttaaagtgtagctataatttgttaaatagaaaacaaatgggagtacagtctaggcaaagtcatgattacaggtatggttgaaatttggtagacaaggctgcagctcagcctccagagaaccccagggaggtggactcttcctcaacccaattagagggcccagctcagacaccagagtgcactgaggagatgaaatattttgcccccagcaggggaccccagctgagcctccaggtcctcctgtggaggctgaaccttcccccagtcagcaggagcagccagctcagccttctgagttttctggggaggtggaattttctcagacccaggagacccccaactctgcctccagagtcttctatagagagtgtagctcaaactccactgaatcatgaagtgacagttcaaactcagggtgaggatcaagctcattataccttgccgagcattacagttaaacctgcagatgtagagattagcataacttcagagcctaccacggacactgactcttctccagcccagcaggcggccccaaaccagcatccagagcaggtgtaaccttctgcaacccaacaggaggccacaactgagcctccaggtcctcatgtgaatgctgaacattccccagtgagcaggagcagccaggtctgccttctgggttttctggagaagttgagtcctctctagcctgcaggagaccccagcccagcctccagaacatcatcaagtaacagttccacctcctggtcaccatcaagttcaacactgagatttgcccaatgtcactgttaagcctccaaatatgcagctcaccatagcaacacagcctactgcagaggtgggaacttcgccagtccatcaggaggctacagctcagctctcagggccagttaatgatgtggaacattctgacatccagcatggggccccgcctctgcctacagagtcatcggaagagactggacctttaccagttcaacaggagacttcagctgaatctccagaacctactaaagatgagaacccctctccaatacagtaggaggctgcaggtgagcatccacagacccctgagtaggtcgagtcttctccaacccagcaagatgccccagctcagccttcagagctccctaatgaagttgtagctcaacctccagagcatcacagagtaatagtttctcctgtaagtcatgaggaagttcagcctccaacatttcaccatgtcattgttaagcctgtggatcacatggttaccatgactccagagttcacctatcaggtggaagttttaactcaacacagggccccagctcagcctttaatatcccctgagcagtttaaacatttgaaagaccagcaaaagattatcattcagcagctaaatacccctggaaatgatgaacttccgccaaatctatcaagagcccatgactccatctccaactcagctctcctcagacattgtaagttcgtttaattgtaagatggtattttcatctctagatgtgtcttccgtattcagaagtagttcaactttgcctaataccacagttaaatatgtgaatattggccgggcatggcggctcacgcctgtaatcccagcactttgggaggccaaggcaggcagatcatgaggtcaggagatccagaccatcctggctaacatggtgaaaccccgtctctactaaaaatacaaaaaattagccaggtgttgtcgcaggcgcctgtagtcccagctactcaggaggctgaggcaggagaatggcatgaacccgggaggcagagcttgcagtgagccgagatcgcgccactgcactccagcctgggcgacagagggagactccatctcaaaaaaaaaaaaaggatctagcataagtatggactaatttttttatcttgcctgaattcctatctaaggggtctgaggagtcatgccctacaaatcgtaaattctcatcagatgggtcttatttaaccctatatatcatgatttactttccagcctgaccgtgtcataacattgcaagacaaagaaaatcaaaatattttaccccaaaacatgttattttgccatatttttgaatggccctgcaaagcttctctttgtgggagaaattttgtatctgtaaagcatctctattaacatagctagatctttttcttctagaacctcccaatcctaaagagattcactaagatctgaataggaaacatttgtcacctatttctctaagggcagccactataagacttcaaaagaactttggtctccacaatctttatcgtaacctgaacattccctttctatctatcccaggtcttgagacaaactcaaccttaattgtcaatcagaaaatgtttaaattcacctatagcctgaaagcccccaactccactttgagttgttccacctttctggaccaaaccaatgtatttcttaaatgtatgtgattgatgtctcatgcctctctaaaatgtataaaacgaagctacgccctgaccaccctggacacatgttctcaggacttcctgagggctgtgtcatgggccatggtcactcatatttggctcagaataaatctcttcaaatattttacagttcaactcttttcatcgacatacggacacttgaagtgaagaagcagaggaaagagaatgaagtgggaaaaatataaagaaataattacagaaaacttcccaaattttctgaaaggcttgaatttacaaattcaaggtcagcaaaccccatataggattgattcagagaaacctatacttaggcatatcaaagtcaaactgctgaaagcaaaaaaagagagaattttgaaagcaggagagaaaagtggcacaatacatatgggaaaacaactatttgaataactgaagactttttttttttttttgatggagggccagataggtggattcaaagattttctgattggcaattggttgagttattacctaaaaacctggaatcattagaaaggaatgtctaggttaccataaggggttgtggagaccaagctgttatcatgcagatgaagcctccaggtatcaggcttcagagagagtagattttaaatatttcttatcagacttcaagagtctgttctatcagtcttaagatctttttgacgtgaatggtaacaaggcgtgtctgactccccccttccgatcatgacctgaactagtttttcaggttaactttagaatgcccttggccgagaggaggtgcccattcagatggctgaagggcttcaaattttatttttggtttacagcccattcttcatcaaacctaagcataaaaaaacagcagttttcccctgggtatctgtgtcatttctgaaggttccagtgtcacgcaagactttgatttttaaaattaaataaatttgttatgctttattcttgttaatctgtcttttgttataagggtgtcatccatgaaacaatgggtgaggaaaagataactactttttctcctctacaataccacactctcttcaaagctcatgcttttttggtcccctctatcgtttcacaatgaagtcgcaggctgggatggctggggtttgggttgaaaagtagtctggggccaaattgtcaacacttgaatgccatacaaaggagtctgcattttagtttttatgaaataaggagttattggccaggtgtgatggctcacacctgtaatcccagtactttgggaggctgaggtgggcagatggcttgagcccaggagtttaagaccagtctgggcaacatgacgaaaccctgtgtctataaaaaatacaaaaattagctgggtatggtgtcgcatgcctgtagtcccaactactcaggaagttgaggtgggaagaccactcgtgcccaggaggttgaggctacagtgagctgtgattgcaccactgtactccagccgggggtacaagcaaggccctgccacaaaacataaaaataaataaataaataaataaataaataaataaataaataaggagttattgaaggagatctctgcagtcagaaaaatctgggcacaaattgtaggggaggaaatataatatctttttctcacccatcgcgagtttcatggctgaggcccctataacaagacagattaacaagagaaagcatacaaatttatttatggtaagttttacataaaacaagagacttcagaaatgaaaatccaaatactaaagaaaaactacttttatgtacagtcatgcagaagtatgattagaagacaaaagggtatattctaatggtaataaactgagggaggggaagacttatcaaggcctgtttgctcagattcttcttggcctccagggttggggaggacctctctggaatgaggatcttatgacctattttcagaggaggtagatcagaattcttttacagcctgcttcaagggagaaaggtgggaggaggtcagagagtgacctccctgtttctgtagttttctcagtttctttcagcttaaaataatcagtaggccaaggtgccacattttggggtagcatgctccataccccatcaagatcatgttccagtaatcaacttctgtacagaaaaatcaccccagaactttaagcttaaaacaataaccatttcttatctcttacaatttttgtggattaggaatgcaggaaagggttggctgggaggttctggtgtggggtctctcaggtagttacagtcagacattaattctctctctctgtctctctccacatggtctctccagcatggcagtctcagggtagctacacttcaaaggcttcctgagccaatatttcaaaaagaatagcaagcatctgggcaacattttctaatctagcgttgagaatcattctgatccacgtattgagaatgttgcaaagatccaagaacagaggacctactttccaccacttgatggtacaaatatagaattgtggacatgtttaaaaccaccacttaattcatctatagaatataaagaataataacaatatccagagagggttgatctgaggctaaaataagataaggtatacttcatttccccatttcccttctggagcttcctgagatcacctctcagtaaactactttcactcagccgggcacagtggctcacgcctgtaatcccagcactttgggaggctgaggcaggtggataacctgaggctgggagttcgagaccagcctggccaacatggtgaaatcccgtctctactaaacatacaaaaattagccgggcatggttgtgcatgcctataatcccagctactcagaaggctgaggcacgagaattgcttgaacccaggagacagaggttacagtgagctgagatcacaccactgcactccagcctaggtaacagtgagactctgtctcaagaaagagaaaaaaaatacttgcactcaaatcctctctcaggttcggcttctggaggagccaacctaagaaaggtgggaaagaaagaaaagtcaactcctagattgttagcctgacccgttgagcttcatcattttagcttaaacagccacatttatggagtatctgccaagtaccatgttacatattttaggccaattcctaatcatagccacattgtgtagtgtatagcatcatcctcatatctccgataagaaaacagccttggaaacgtcaaccagctgcccagaattaggcagctagtaagtggtggagctgatttgtaaagaacaggagatgaaggaggcagaaagtccacactgctttttggcatggctgcccaaaatgtggggttatgacaactcctatttccatgtgccccacctcccaactggaaagttcctatttcctcatagggggattttttttttttttttgagacggcgtctcgctttgtctcccaggctggagtgcagtggcgtgatctcagctcactgcaacctccgcctcccaggttcaagcgattcttctgtctcagcctcccaagtagctgggattacaggtgcccaccaccacgcccagctaacttttatatttttagtagagaagtgatctcaccatgttggccaggctggtctcaaactcctgacctcaggtaatccacccgcctcggcctcccaaagtgctgggattacaggcgtgagccaccacacccggccacagcggggatttttaatggtactatcattcaacttgtcactgatggagaaagtggaagagatggagaaagaaaaagaaagagcaaaagtatagacgatgagagagaaagtttacaatgtgccaaataccgttcaattctttaatcttcccaacaaggctcgagggacacattagctaatattatcttttacttttcagaacgggaaaggccacattctatggaacagtaaagagaaaatccagccaccctgatacccagtgtgtctaggtcacgccctgcctcactgtgactcagactgtctctatgttttccatttcttttcttttttctactttttttttttttttaacaaaacaattccatgtcctactttctgagcatatcctggctggtccctgcagggaaattaagccttcttaaggggttggagccatcaaaaagcagctgcaggacagaaaagtgagggtgtgagctgtcagtgtttctctcctgttttcagaagcactgacaggattttgacgagacaaacgggtggttagagtgtctgcagcgatggggctagaaagcagcctgtgtgtctgcaacatgagagggaagttttatggctggaggactgtgtgtttatgtgaccctgggggtagttcttcatcattaatcatgtagcagtgtcaaaaatgtacatgttacaacttggacgtgcagaaaagagttgctatttttcagtaactgagctcacactggagcacccactctcaccaatggtggaagaaacatttgaacaagggtaattaaggaaaatgagctcctctgaaatgaagcagtttcacttcaggtaaatattcatggccaatgtgaagttcaaactccttgtcaggactgtttcttacctcccagggtggcttcaggatgcagggcgtcatgcagagggtggggcatggttctcattctgctgactgcagctgacgtgttgacatatggctcatctcaccttgctccgggaccctcttgatgctccagtgccacagctggcggaccctgtggtctgttctcttgctgaggccagaacccacagccacttgctgcctgggccccacccagttctcactgatctgagcctcagcatgtcctctatcctttttaaactgcccatttggcagcctctgctatgtgggcatccggaacctcaccagaatatccaaaaagtcattcccattctccatctcagatactgcaagtagtcaagactcaccccatctacatccccaagaactgaaggctcctgttacatcatggcacctcttcctctgattcccagcttccacggaattctccatttcttcacatgctgcttcaccccacgagggtcagggccctcatttcttcattcccccaaaacaaccacgatgtaaggctattggttgtaacatgtttactggagatttgcacacaagataggtattgaatatagcacagaataattcaggtgagaacttgaatttggataccagccataaaaatccctgccttaaaaaaccactggccattccctgacagaataaattaatctctccctggcctgattttattcccaggatctggcccactgtgttctagatccctgcacatctcccctcttctctctcaccaccacatatccttacctcatctcacactgaccatgaatgacttccaatcctgtttcttacgcagagttagccctctctaggcaatatgaggtaggggcgggatggaatggagggatttccctttttataatcacacatgcccattaaggtattttcccccctaatcctaagagtaattccctccctaagaataattttgccctcattttagatcagccagctcaatgttaggcagctttgctaaaatagttgtgtaatgcctacaaacatttttgtaatggggtatttttttgaatcctcacatgaagcagtaggtaatattattatacccatttcacaaagaaactgaggcttagcaaagttagggaacgtggccactgagtgaatcaacagccaagcaagaacccagacccaggtctgcttcctctaaatgcccatgctctccgccactgcccatcaggggagaaaagagatatgtgtctgcagctgacaggcaaaccccatcttcaaaatcaattcccaagtggcaggaaaggccattgtactgcaggggcctctgcggaggggacaagccaggagacaggagccctcgacgctggggaagcttgttcctgaggtccctactggtccaacacaccatcttcacgaagcaacctccaggattctcactcccaactcagcctgttccctgacaagagagtccccactgcaaacaccaatgctgagtctgccctggaaacagccccctttgggctgaccacactgtctctagacctcagaactatagagaggcagctgcaaacttgaggctctcccggactgttctgatcaacgtgcatccctggcaaggaggcactgtgcctttctacctctactgggcaaggggccaagcccagagagggcatcagtgtttgctgaactgagtccaattccaaccactactgtttcctccttcctttgtgataaagggctccagtaggctgagctgatctcagtgactgtgagcacaactacttccatttactgagcacctagtatgtgccaggcatcatatgcaatgaccttatctggtccttaccagtcacgtgggctcagtagaaagtcagttcattttatagatgaggaaacagtccagcaagagcacagcaatttcttgagcttttacagcataagcagcagaggctggaatttgaaccaaagtttgtacaactccaaagactatcctgtttccactatgaaataccctccatcagaggagataatgtctaccactccttccccggagatgatgaaatatcactcttcttcttttgggggagggcacgtatggttgtttttggtgtcaaaatatgattctaaaagcccacttccctgatgtggtaaagggtggggtgaggggttgggtgagggggctggggcaggaatgagccactgggtgaatcatgcacctcaacctctgctgagagagcctgaatctcttactggcctgagggggtaaaagaagctctaagacgggctgaagctccatgggaattctccctccaatacctgggtaaccccctaccacatgacttattagaaatagatcaaatatgcacatgatacaaaattctaaagatacaaagtggtatacaaggaaaagaaggtctccctcctaccgctgtcctccaggcctctctcccattacccttcctaacaggaagggaattgttgccaatttcttatgcagcctccaaaagcatttacaaacatagatgagtctctctcttctttttaaacacacatacattgtagcatactatgtaagccattctatcctccttgtttctttcatctagtgtgtcttagggattattcatttctgcaagtatgaagactgcccttttttttttttttttgagactgagtctcactctgtcacccaggctggagtgcatggagtgcagtggcgcgatatcgcctcactgcaacctccacctcctgggttcaagcgattctcctgcctcagcctcctgagtagctgggattacaggcacgcgccaccacacccaactaatttttgtatttttagtagagacagggtttcaccatgttggccaggatggatctcttgacctcgtgatctgcccacctcggcctcccaaagtgctgggattacaggcgtgagccaccatgcccggcctcctcattttttttagtagcagcctggcattctgttatatggaagtgccagaattatttcattagtcctttattgataaacttcaatcttcactattacaaaccatgaatattttgtatagatcaagttgtacatatgtgactacatctgtaagataaattcctagaagtaggaatactagtgcttattaaatacagtatgtacttttaaattttttcaaactttatagaggatgtagcaatgtatagcccatcaataataaaaggcacagccgggcgcagtagctcatgcctgtactctcaacactttgggaggcagaggtgggcaaatcacctcaggtcaagagttcaagaccagcctggccaacatggtgaaaccctgtctctactaaaaatagaaaaaattagccgggtgtggtggcacatgcctgtaatcccagctagttgggaggctgaggcaggagaatcgcttgaacccaggaggcggaggctgcagtgagccgagatcgagtcattgcactccagactgggaaacaagagtgaaattctgtctcaaaatagtaataataataataatataaaataatagtgataataataaaaggcagtcaagggagtgctttttttttttgaggtggagtcttgctctgttgcccaggctgaagtgcagtggcaccatcttggctcactgcaacctccgcttcctgggttcaagtgattctcctgcctcaacctcccaagtagttgggattacaggcacgcgccaccatgcgcagctaattttttgtatttttagtagagacgggatttcgccatgttggccaggctggtctggaactcctggcctcaagtgatccgcctgccttgacctcccaaagtgctgggattacaggggtgagccactgtgccctgccgggagtgctttttagatgaggaaaaagccggaagagactagctgagaagtaaacaggcaggcccatgcctggcccagaaattcatcctaggaccagtgaagaagatgagccagcaccaccaacagcctgtttcctacaggcaagccacccgtttcacacatgagaaaactggggctcagagagccgacttgcctcactcagggttgtggcctggaacgctgtaggttcagggctaattcctctagacagtatatgcttcaccctctgacctcaagctgtggtctcctgtgttggcttggctacaagttggagctccttcctattgtgggctgaaagtagttgagcctaccacatggttcagaacttcccctggttatttcattcccacatacaagaaaccagccccagtcccacacatacacactcacacagctactatttccagcttccttggggcccacaggaccttaagcgtccacttctctgaggcaggtagcagtgatgaccctggacattcatcgaccagcctaaggaactgaaacacaacagacccctgcacagttaccaccagatagcgggcagcgagggcgtgaaagaagtcaaagcacattagccacagagctaccagccactcaggaaacagaagtcaccgtggtgaaataattatctttctttgtatcggaaaatgccttcacatccattaactcatttcacctccacagttctctgaattagacaaaacacggattcttatattcattcttcttgttgagcagataaggaaaaggaaatatgccttttctagagaagcagagaccagaggccgacccaggttttctggtgcttaatcctggtcccatttctgccccatgttaagcaatctcctggcagtatgagatgttcataaaaatcagctcttatctgcccacatccagaattagtcaccatgtccctagcaatgttgttttgaaccctccagtacatggacgtatatgcattcctttctctgtatcttttagcttcatagctgcgtcctttgtgaggatactcttgggatgtttctgagtggtgtcattttactgtatctaagtgcctggcatggcctctggaacacgatgggtactcaataaaattgtgttgcttgactggctgagagaatggatgatatatggatgacaggatgaatgaataggtgaacagatgaatggatggatgagtgggtgggtgggtgactggtgagttgagtattggttcacttgtttacttgttttgcttttatttttctactagcatccattaccccttcaaaatcaccttgacatctttttatgcaattacttcttccttccagggtatacagtctcagcagtacgacatatcagggacgctaacttctcccagccaagaagcaagcaaatgacacaagattagctggtcatactccctctcctaggactgtgaatccttagtagagtgagacgaggataggaaaattaactggaatacatctatatcaacagtggttggccgggcgcggtggctcacgcctgtaatcccagcactttgggaggccaaggcgggtggatcttgaggtcaggagatcgagaccatcctggctaacacggtgaaaccccgtctctactaaaaatacaaaaaattagccgggcgcggtggcgggtgcctgtagtcccagctactcgggaggctgaggcaggagaatggcgtgaacccgggaagcggagcttgcagtgagccgagattgcgccactgcagtccgcagtctggcctgggcgacagagcgagactccgtctcaaaaaaaaaaaaaaaaaaaaaaaacagtggcaccctgatggcactgccaagtagttcctgctgcccacaaacacagagtgtttctggtttctcacttgtcatttttccaagccaagttctccaatatcctacccattctatgagctactcaacattacccccaatacattactttcctgattaagttagtgtgatataattgtgtgtgtgtgtatatatatctataattatatgtatataagttttcatccacagttcctggcctataactcccatagcccttttacagtcatctgttataatgttgggacactttaggccttagaaacaggcctcaggaagcagaatttctctctctctgacctctcctgccctcctttcacctgcccaaggcagggttctaatctaattgtgggtcataagaccctcattccagagagggccctgccccataccctggagggaaggaatgctgcacagaaaggccgaaaagaatctgagcagacaggccctgatggattccaccctcggtctgttagtattaaatcataccctttttgcccaatcacattttgacatggttgtccatgctttagtcatgcttatccaacgagtgtataaaaggcccaagaagacaaggttcagagagcttccggatagctgaacgcatggaggctgacaggacagtgaaggagaactcatccacgcgctgggcgagtggtgcaccccaactccacaggaacggaagctcctccagatcttgccttgtgttatctttccatctggctatttatttgcatcctttttaaatgtaagtaagtgcttccatgagttccgtgagctcctccagcaaattaatcaaccccgaagagggtgggtcatggtaaccccaacttgaagccagctggtcagacattctggaagcccagactcgtgactggtgggaaggagggagcagttctgtggaactgattcctcaacctgtggtttctgaggctatttccaggtagatggtgtcacagttgaattaactggtggacacccggctgtgtccactgcagaactaattgcttacttggtgtgtgggaagaaacccctacatattttgtcacagaagtcttctgtattattatggtgtaagagaacaggaaaaatgcatgttgactgttttttccacactcccagtccacaaaagttttctccacttatgaacaaataatgtgtgtgtgtgtttttttgtttttttgtttttttgtttttcctgagacagggtctcactctgtcatccaggctggggtgcagtggtgtgatcatggctcactgcagcttcaatctcccaggtccaagtgatccttctacctcagcctcccaagtagctgggaccacaggtgtgtgccaccatacccagttaatttttaaattttttgtagagacagggtctccctatgttgcccaggctggttttgaacttctgaagcgatcctctcacctcagcctccaaaagtcctgggataacaggcatgagccactgtgcctggccatgaatacaaagaattttaacagacacaagatgcagatatgaaggaatagatgaatgaatagacgcgtgctggacaggatggagtgaagggatgtgtgaaaaggtaggaatgagtgggtaagcggaggaggacagtgctgctcacagaagttcatgagctaaatggtaaagtgagtcctaggcctttgatggatacgagggaaagaaggtatgttactccctcagccttacccataggagaagtaatgtgaactgattttaggagcaaacaggaaacttacccccaaatctcactctagtatactagaaatcctttacttttgtatcttttaactaagagggaaataaataacattgtcagaccctcatttcacagatgaggaaacttaggcctacaaagggcaagtggtttgccaaaatgtaacaagtgggtttggagctacaatgggactagagcttaggtctcttaattcccattccttgctcttttcaccacccaaagctgacactagaaggaatgactacggtgcagaatttccaaaccctaatttgaggaaattccccaaggggactttttcatgcaagctggagagcctcaaaaatgcaatgaatgcctaggaaggttctaagggccctaatattctaacctgaacactagaaagcagggcaagcagcatagtggggaagcaggggactgggacccccgtccctgagaatggaagtaataggcaagaagccaaggggcttcccaggacaagctaaaaaagagcagatccagactacaactacagaatcctgtaagattctgaaactttgtcacttcctttctaaggcttccttcctaagcctctctgtgaaactctttgaaaaggggtatgtgggctagcctgcaaggacagccagaagggagaaggatcacatccccctccgtggccaggctctgagagacagaaatccagtgaaggacagagcatggggctgagtgtctgtagcccactgcattgagggcaggagagctcagggcaggtctgagtcatcaccattttctgtgtgtttcttcctaataagtgaaataatgtgtagtgtctagcacggtgcctgacagctcacagaaaatccccaacttcccctcccccaccgccatgccttctaactctcggtgagatgaacatctctactgggaggggaagccattgagggaagaaatgctggcaccttgacatttggggaaagaaagggaaggaattgttttccaagtatctactttgtgccagaaatggtgttgggcaatttactgattgcctcatttaatcctttgacgtatcctaggagttaggtattctcagccccatttccagaaagcaaaccaaggtgaaaaagagttaataatttgttcaaagacatatggaaaagtgccaggcatggtggctcacgcctgtaatcctagcactttgggaggccaaggcgggcagatcacttgaggtcaggagttcaagaccagcctggccaacaaggcgaaatgctgtctcgactaaaaatacaaaaattagccagaaatcacttgaatctgggaggcggaagttgcagtaagccaagatcgtgccactgcactccagcctgggcaacagagtgagactccatctaaaaaaaaaaaaaaaaagtcatacagaaagggttggatgtggtggctcacacctgtaatcccagcactttgggaggccaaagtgagaggatcacgtgaagctaggagtttgagaccagcctaggcaacatagtgagatcccctctttagggaaaaaaaaaaaattctgccacaaaagccacattcaatagaaaacatttttttaaaaaaatagctaggcatggtggcatgcacctgtagtcccagctacacagcaggccaaggcgggaggattgcttgagcacaagagtttgaggttacagtaagcaatgatcagctactgcattcccacctgggcaacatctctaaagaaaaatcaaacaaaaaacgacatacagaaagtatgcgctatctgatttcaaccccaagtttgtcctgctttaccaggctttctcctggggcctggaggcagtggggccaagggcaggggtggggtgtgcaggggacagcagtgctccagcaataagagttcttgaagagtacttcatgagggggtatacaccaatagaggggaagccaccagccaccaacatgcagaggaaaacaacaacaacaacaaaaacagaccccaaggtatcaggagaaggacagtctgaagtcatctggcacccagccattttggaagaactgatgcttctccacgggccttgttcccgtggtcaccccacccccaagatatcttgtgacaggctcctccagtaaccagaggcaggtgagcgctgctctgatcaacaaacacaccgcatgtggtctccagctgcaataaacaagtggctgtgcacagccaatgtcctgtgtggtgaaggtgagaagagtgagggggagccaagctgcaaccctcagcctgaatgtggttggaattatgagagcagttgtcaaagttagtaccttgacatagtgcaatgtgcattaaagtgcacagtgcaaggtgacagaagaggggagggggagggggtgggggaaggggtggggagaggagggggaggggaggggagaggaattgaggagcagaacagaataacacagaaagaaccaaccagagctggaccaaaaatcgaggccaggatgttgtagagtcttgggttcaaattctgcctcctcctgggaagtcccctgagcctgctacaaggtcttggcttgcaccctattgcctctggcagatcctccaaccagcaccaatgaagcacctaccccatgcagggtccttcagaaacaaagagtgagatagcttccagtctcaggtggggaatatttagacttgtgaacaggggcaaagaaggagagaaacaaccaggaagtaacctccaatttgcagatggggaaaattaagtttcatcaggaggaaatgactttgcctcaggcttctcttgggatcccagatttctagaggatggggggaatgtccctgctttgggcatgtttttaagagcactggaacagccagagctgctgcccacagtctgaagtcaggaggggaactccatgtcagataaaagctttggaatccagatggagtaaggtttcattttctctgcctgcatttggtttcctaacatcacaatgtgagccttggctagcagccagcttagctttggaaaagagtgaatgatggggaaaaaaaaaaaaaaagactgtgccaggaagggaggggaggagaggggctacactaggctggaggggatatgggcctggctttagaggattatgctaggaaaaggggtgccagaggcgtgaaagctgataggaacaagccctgtggatcaagaggcccatcagtgagcctgcagggtctatgaactccttacatgcaaaattacatgtgtctgtctgtgtaggtctctacagattggtggaagtgttcacagctttcatgagattattatttttttttttttaagaaaggcacactgccgcatgcaacacctcatttggatgtgtctggagtcttggaagtttgactaccctacattctcctacaaatggaccttgagagcttgtttggaggttctagcaggggagcgcagctactcgtatacccttgaccaaagaacagtcctcctctattggggaaggttgtcctcttctgaaactacctttgcaaaaattatagcagtgagaaaattatgacagtgaaagaaatctgacctaattgactccatcttgcttctaacctcccagctgcccttgttcattcctgggcatagggagcactaactttgggaggatttagtttatagtttaactttgaaacaaagatgataacagcccctccctgagaccaacccactccttgcctggggaccagaaagcctttgtaaaactaacacattggccacaagattagaaatgacggctcaggagtcatgcagccaaaggcctcgagatcatgaacctccccaattgctcctgtagataatattattattgtaaaacctaacatgggtgtttgaggtatttttcagaccctgccttctgatggatcagctggcaccacccagaccagtaaactggctcatctggtcttctggcccccacccaggaaccaactcagtgcaagaggatagcttcaactccttatgatttcatccccgacccaaccaatcagcattcccgcttcccgagccccctgcccgccaaactacctttaaaaaaccctagcctccaaattttcagggaggctgatttgagtaataataaaacccctgtctcctgtttagctggctctacttgtatcaaactctttgtctattgcaattcctgtgtcttgataaacttgctgtatctgggcagcgggcaagaagaacccgttgggtggttaaaccaagtgcgcagctttaggagggacgcacatggaacggtaaagagagaaggggacacaggcctagccagctagatcagccaaattgagacagactgggagtggggcttggctgcagctcaccagcactgaactttctttcatgaattcccactgatcacaaaccccacaccaccatctcactgacaccatgttcaaccatgtcttttacttaacaaattccaggaactggccttaggaaatccaagtatcaaaccaaggttgtggagtattccacctcaggaaggaatgctgaacaactgatttacagacttgttgccccagctagaccaccaggtagcccattactcaaggtaaccattacaaccaaatagtgctaacctgcataccctacccctcacatgctttgcccagcccagcctgcataccccacccctgatgtcaattctcatgctttgcctaattaaaaagccctaccggctctttgcacagagtcagtcagggaattctctcttgtgctgcctcccttatgtccaggcaaaagctccaatgaagtcttgtctgggaaaagtctttcggcctcatgtcaatttctattgcatggagaacgcaagaaactatggtcggtaacagaaccaaccctggtgatcaatagggtgacagatgttgcagccagatcaccctcacatcctcatcaggctttttttttttttttcttgagacagagtgtcgctctgtggcccaggctggagtgcaatggcgtgacctctgctcaccgcaacctccacctcccaggatcaagccattcgcctgcctcggcctcccaagtagctgggactacaggcatgtgccaccacgcctggctaaatttttgtactttgagtagagacggggtttcaccatgttggccaggctggtctcaaactcgtgacctcaagtgatcctcctgcctcggctttccaaagtgctgggattacaggtgtgagccacagcactggctttttttttttttttttttttttgagacagagtcttgctctgtcgcccaggctggagtgcagtggcatgatctcggctcactgcaacctccgtctcctgggttccagaaattatcctacctcagcctcccgagtagctgggattacagccacccgccaccacgcccagctaatttttgcatttttagtagagacagggtttcaccacattggccagactggtatcgaactcctgacctcgggtgatccgcccgctttggcttcccaaagtgctgggattacaggcatgagccaccgcgcccggcccttttttcttttcttttctttttttttttttgagacagggtctcactctgtcacccaggctagagtgcagtggctcaatcttggctcactgcaacctttgcctcctgggctcaagcgatcctcctgcctccccactgagtagctgggactacaggcatgccaccatgcccagctaatttttgtatttttagtagagatggggttcgccatgttgtccaggctgctcttcaactcctgagctcaagcaatccacccacctccaactcccaaagtgctgggattacaggcgtaagccacagtgcccagccctcatcagattctttaatggctcaattgccccagacaggttaggtccaatatcttactttacagacaaagaaatttaggcccagagaaagtaagcaacttgttgaaagtcatcattaatcacagcaaggcagacatagaaaggaaaatactacatgatcttacatgtggaatctaaaaaagtcaaatacatggaggcaaagaatagaactttggctaccagtggcagggctgtaagagaaattgggagattctggtcaaagggcaaaaagttgcagttatgtagaatcgaatgtgtagcatgaggactacagcagttcccatttatctgtggtggatgtcccaagacccccagtggatgcctgaaaccatggatagtacctgttatatactattttattatgtgttttttcctatactacctatgataaactttagtttataaattaggctcagtaagagattaacaacaataataacaaaatagaacaattataacaatatactgtaataaaagttatgtaaatgtttatgtctggaattttccatttaatattttctgaccatggttgaccaagagtaactgaaacctcagtaagcaaaaccagaataaccaaaatacagataagggagggctactgtagagttaataatattgtattggataccggaaattttcttttttttttttttttggagactgagtctttctctgttggccaggctggagtacagtggcacagtctcggctcactgcaacctccgtctccctggctcaagcaattctgcctcagcctcccgagtagctgggattacaggcgtgtgccactaaccatgcccggacaatttttgtattttttgtagagaccgggtttcaccacgttggccaggctggtctcgaactcctgacctcaggtgatccacccgcctcagcctcccaaagtgctgggattacaggcgtgagccaccgcgcccagccgaatactggaaattttctaagagaagagatttcaagtgctctcaccacatacacaaaaatagcggtaactgtatgaggagatggatatattaatttgtttaactggaataatcatttcactatgtatatgtatatcaaaacgtcatgttgtaaatatgatgtttattaaaaatagtttttattaaaaataaataaataataagtcatgaagctggattttgaacctagaagtctgactccagagagcccatttaattaagatgctacaagaagttagtatgacttaatctgcattgatatagcagcttatctaagacatttattggaaagtaggcagagaatacaaataaatagaaaacacataggacactgtcgctgtgttcatggagttaagacaagaccagtgaaaggatgattcacaataaaagagtgtaaatttacttgtttattgtttatctcccttctccccgtccccctaccctatatccaaacaagctccagatggcaggtctttgcctgtcttactagccatggtgtctgcagagcgtagaagggtgcccagctcacagcaattcttagtaaaatctgtagagtgggtaaggaatgactgagtggtatggaccatgcacactgaagggacagggagagcagagacagctccatgatggtgtatctcaccttacgtctcctaagcacatccatgatcattatttcccttgatcctctccaccactgcagtgggtcagacaggaagcagttcctggttttcaggaacataatgtgctgggtgaataataatgatagttgccattcattgaacacccaccctgtaccaggcaccatactgtttacatgggctctctaatttgcttatggaatcagttcattagcaccagagaaaaaattgaagatagcccatcaagcccaaaccttgattttgcacaggagaaaatgaatggtagacatgaaataaaaattagattctcctccctcctgtgctcctcacaatccattagaatcactgaaagggaagaaaaatactcccatggctgggtgtggcggttcatgcctacaaccccagcactttgggaggccaaggtgggaggattgcttgaagccaggagttcgagaccagcctgggcaacatagcaagatcccatctatacgacaaatttaaaaattagcccagcatggtgcagtggctcacgcctgtaatcccagcactttgggaggccgaggtgggcagatcatgaggtcaggagatcgagaccatcctggctaacacagtgaaaccccatctctactacaaatacaaaaaattagccgggcatggtggtgggagactgtagtcccagctatttgggaagctgagacaggagaatggcgtgaacccgggaggcgaagcttgcagtgagccgagatcgcgccactgcactccagcctgggtgacagagccagactccatctcaaaaaaaaaaaaaaaaaaattagcccagcatggtggtgcacacctgtagtccttagctgctcaggaggctgaagtaggaggatcgcttgaaccctggagttcaagcctgcaggtgatcagttaactgcattccagcctggggaacagagtgagatcctgtttcaaacaacaacaacaaaaatacttttgacattcccactgcctattcccactcagcaatcccaacatcccaccatcctacccacccaacctctgtcccaccaccacttatacacagatatacgtacacacacacacagtggaaaggttcgctgggactcaaagatgaggagcatgtcgctgttgtctgcgggtttcctcacctctatccttagctcctgtcccaactcagcatatctagtatccaggaaaacactttcctttcttccttaaagagggaaactgaaatcaaggaaagaaaacagaaattgagctcacagaagaaaactgagccttggtaatagttttatgattttctctagaaacaatgaagtgtggtagaaagcccatgaacccagactataagtcacttaaccactctaagcctcaactacccatctgttttaaaaaagactttttgtggccgggcgcggtggctcacgcctgtaatcccagcactttgggaggccaaggcgggcagattacgaggtcaggagattgagaacatcctggctaacatggtgaaaccctgtctctactaaaaacagaaaaatctagctgggcgaggtggtgggcgcctgtagttccagctacgcgggcggctgaggcaggagaatggcgtgaacccgggaggcagagcttgcagtgagccgagattgtgccactgcactccagcctgggcgaaagtgagagactccgtcttaaaaaaaaaaaaaaaaaggctttttgtaataaataaatatttttttgtaacaaatacgaatacatattgactgggggtttagtttagactgttgaaaagcataaattacagaatatccttaaaggcactgacatcttactcttaatgataacatgataataataggcaatgttattaagtacttaacatgcgtcagacgttgcactaagagctttgcaagcatgagaacatttatagggacttaattgtctcgatagttgtgtgaggaactattattattattatcactgatttataggtaaggaaactgagaccagagagattattaataatttacctgaggccacctggacaataaacaggagaaactgccgagtccctgctcttaacccaccgccttttccagaacctctcacatgtttggtaacttaccttagacctaacggggctttgtgaaggaaacaattggtagaacatttttgtgtggttggatgaatgtttctaaagtgcttgcaatttgtttctttaaatgagatggccatactttccaaaattacgtttccattgttaattgattgagctgtaaggagggtatgagaggattgttgtaaagagcttggaacaaggccaggcgcagtggctcgcatctgtaatcccagcactttgggaggccgaggtgggcggatcgcctgaggtcaggagttcgagaccagcctggccaacatggcgaaatcctgtctctactaaaaatacaaaaattagccaggcatggtggcggacgcttgtaatcccagctactcaggaggcagaagaattgcttgaacctgggaggtggagggtacagtgagccgagatcgtgccactgcacttcagcctgatcaaaaaagtgacactctgtctcaaaaaaaaaaaaaaaaaaaaagcttggaatggcacctgtaacctagaaaggtcttttttttttttttttttttttttgagacggagtcttgctctttcgcccaggctggagtgcagtggcgcgatctcagctcactgcaagctccgcctcctgggttcacgccattctcctgcctcaacctctcgagtagctgggactacaggcgcccgccaccacgcccggctaattttttctatttttagtagagacggggtttcaccgtgttagctaggatggtctcgatctcctgacctcgtgatccgcccgcctcggcctctcaaagtcctgggattacaggtgtgagccaccgcgcctggccgaaaggtcttgataactgttaactgacttactgatgtgattcactggacagagcttgagcatggtcatcagaaacacctgccttcaaatcccacttatcagctgcgtgatcttgaagatgttaattatctgttctgaggcttactttcctctttggtcaaatgagaagaacaaccactctgcctcaaagtcatcgtgaggaagaaatgtggcaaagtcttcccattctgggtgatttagtcaccgtcaaccaccatgttacaagtgtgagagtagctaacagaaaatgatctcagtagggggttacattttgtttattttgcttttgtcactctctttttttttttttttttttttgagacggagtttcgctctgtcgcccaggctggagtgcagtggcgcgatctcggctcactgcaagctccacctcccgggttcacgccattctcctgcctcagcctcctgagtagctgggactacaggcgcccgccaccacgcccggctaattttttgtatttttagtagaggcggggtttcactgtgttagccaggatggcctcgatctcctgacctcatgatccgcccgcctcggcctcccaaagtgctgggattacaggcgtgaaccaccgcgcccggccgcttttgtcactctcaataaacacttttctcttaaataattcagatgccggccgggtacggcctgtaatcccagcattttgggaagccaaggcgggcggatcacgagggcaggagatagagaccatcctggctaacatggtgaaactccatttctactaaaaatacaaaaaaattagccaggcattctggccagctcctgtagtcccagctacttgggaggctgaggcaggagaatggcgtgaacctgggaggcacagcttgcaatgagccgagattgtgccactgcagtccaacctgggcgacacagcaagactgtctcaataataataataataataataatattattattattattcagatgccaatttcagcctagcccggaccaaattgttgctaattctgaactactaaaataggaattgatgaagacttactgtatccagttctttggaatgcagtaaggaccctagctctaatccagaagttccacatgggttcagttttgaggatactcctaaccacgaaccctttaatgttgggcagtacttaatggacagagcactgaagtgggagtgagggcaactgggttctgatcccaactctgtcattcatttgctgtgtgttcttagcaagtcactcctgctcactgggccttggtttcctcttgtgcaactgaagaacatggaaaaaatgatccctaaagtcctttgaagctttcatattctgtaacttttgtgcccaagaaggccttacagtgagatgggatcccagtatttattgagtttcctcattcataaaatggggataataatagtaaatgagttgacacgcgctaagacagtggaatagtggctggcacagataagccctcggtaaatggtagccaataatgatagagtatgctgtaagatatctttctctccctctgcttctcaacaagtctctaatcaattattccactttataaacaaggaaatagaactcaaagacattaagcacttttcccaaaggtcgcttagcaagtaaatgggagagaccctatgaccaggatgaaagcaagaaattcccacaagaggactcattccaactcatatcttgtgaaaaggttcccaatgcccagctcagatcaactgcctcaatttacagtgtgagtgtgctcacctcctttggggactgtatatccagaggaccctcctcaataaaacactttataaataacatccttccatggatgagggaaaggaggtaagatctgtaatgaataagcaggaactttgaagactcagtgactcagtgagtaataaagactcagtgacttctgatcctgtcctaactgccactccttgttgtccccaagaaagcggcttcctgctctctgaggaggaccccttccctggaaggtaaaactaaggatgtcagcagagaaatttttccaccattggtgcttggtcaaagaggaaactgatgagctcactctagatgagagagcagtgagggagagacagagactcgaatttccggaggctatttcagttttcttttccgttttgtgcaatttcacttatgataccggccaatgcttggttgctattttggaaactccccttaggggatgcccctcaactggccctataaagggccagcctgagctgcagaggattcctgcagaggatcaagacagcacgtggacctcgcacagcctctcccacaggtaccatgaaggtctccgcggcagccctcgctgtcatcctcattgctactgccctctgcgctcctgcatctgcctccccatgtaagtcctggtcttgaccaccacagcccctggagtcagactctgcctagaatgcctaccccatcccaatgactgtcccacaccttgccctcttttcaactgtagcatgaatactgtctgaaccccattatttacattcttatgaattgtcttacccatatgtcctgttgtccttgagagatctctatgctgcttcatggcagggatctcctgatcagtttttctgtctttaaggtctacaccctcaaggcctacaggtgttcactgagtgtggactcatgttggggagattagtagtcatgagtagctcacactgactttgaaacacgtctgactcatgcctgtcagcagcagggtttctaagaaatttaactaaactaaaacttcctgagaccctgagacagccatattctctctcatttcataaatgtaaaaaaaattggcttatgagagggtatgtggctttattagagtgaatacatttaaaaaacaaataaaaacaaggagaggataataaaagctaattaaatggttactatggatcaggcattgtgctgattttggcacatcttttttttttttttttttttttttgagatggagtcttcgctctgtcgcccaggctggagtgcagcggcacgatctcggcttactgcaagctccgtctcccgggttcatgccattctcctgcctcagcctccggagtagcggggactacaggcacccgccaccacaccctgctaatgttttgtattttttagtagagacggggtttcaccatgttagccaggatggtctcgatctcttgacctcgtgatccgcccgcctcggcctcccaaagtgctgggattacaggcgtgagccaccgtgcccagccgatttttgtacatcttatttaatacccacaacccttctttgagtagctgtccttgatgtacagatgggaaaacagagaggttaagtaacttgtccatggaggcacacagctaggaaatggggagactggtattcaaacctggttccatcttgctgggaaaataaaaactactcctctgctgggaagtggcaactgatgcttcccaacgtcatcttgaattaactgaccaacaagaagttctctgttgagagcccttctcactgaagctcaaccagagctcccaagatacaatatgcatctccaggcccttcttaggatcctggctgagtcatggagcctgagctttggaagcctccccacaacctgccctaggtctcaaagaaaccaagttccaaatccattgaggatgctggaagggcaagaatgaagccagaggacccaggacaagccaggaggaggccctgaaagcccagggcagaaggttatggtgtagagggatggatacaagcttggctcaaggattagatgaggcattggaatccccactctgccactgtttatccatggccaagtgactttacctctctgagcctcagtttctgtcaaggaagataacagttctttctaaataaatcatataaagtgtccagcacaatgtcaagtgtgcagtagcaatgaataaaagggtctccctccttcctttcctcttccagattcctcggacaccacaccctgctgctttgcctacattgcccgcccactgccccgtgcccacatcaaggagtatttctacaccagtggcaagtgctccaacccagcagtcgtgtgagtctcagccccatggagccctcccagagcctgttccctgaggagtcctctgagaggatgccctacccacttccacctatcctccagctgcaagcagccacagctcctccatctctagcctcagagtcccctgctatcatgtaaaaagactagacaagctgtccttagagaatcgtgcccactccaatggactatgttcccaggactccaatctttttttttttttttttttttttttttttgagacagagtctcactctgtcgcccaggctggagtgcaccggcacgatctcggctcactgcaagctccacctcctgggttcatgccattctcctgcctcagcctcccgagtagctgggactacaggtgcccacaccatgcctggctaattttttgtatttttagtagagacggggtttcaccgtgttagccaggatggtctcgatctcctgccctcgtgatctacccgcctcagcctcccaaagtgctgggattataggcatgagccactgtgcctggcctaggactccaatctttactagtgtggcctttacttgaaacatggtctggaatgctcctatgtggggaagatcaagtcagtcatccccttcagtgaagaaccccatatttcacacagtcccccatatttcacacccaatcaaatccacctaaacctcagaggaactagggagaagaggtcagaggtcagggatctataactgtagtcaaataaaaaaacaaaaagccatccatcagagaagaaataaggaaatgagattcacctttaaatatgcaagctagtatatttggaaaaatataataaaccctactatataggaaatgcctactatgtgtcaaatgtcttatgtgcctgatctttaaattacacttagctctgacaagtatgcataattctctccatgtttcaggtattgaaactaagattcagagaggtttattgatttagccaaggctgcacagtaaatgagggatgaagtccatctctagagcctcctctttctactatagcaaagtcattagtgacaattgcttaagaaatttatggtagagacttaaaaaatgaaaatggtgcaattctgaagtttcttatataagagtgaagtttttgtttttgtttttgttttgagacagagtctcactcactctgttgcccaggctggagtacaatggtgcaatctcagctcactgcatcctttgcctcccgggttcaagcaattctcttgcctcagcctcctaaagtgctgggattacaggtgtgagctactgtacccagccagggtgaagttttttaatccaaaaatttatgacactggcaaagttagaggtactcaaagacagactttggatctgatgaatccttttaagtataatggtaatatttaacaattactaattttatttctgaaaacaaatatttttcaaaagaagaaaatccttccctgagcacatactattggcagacacagattactaaagccactgtcccagcccaaccttatgggactcatagtctaataagaggggcaagacagacacagcaatgactagagtacacagcaaaaaaaaacatgacaagggaaagagagaggaaacacattcagcttcagggatttacaggtttgctgcaaatggtgctgtctgaggagagatttggcctggcagagaaaagcctagggaatgggatatatcaggaaaagggactgtcccccaggattctactttggtttatgtacagtctccatgtaggaaagcacggagtgtcaggaaaatgcagcaaaagtgctaaatgcagctgtcaagtgtaaaatgagctagaacagggaaagctgagaaaacaggagtccagtttagcggctactgttgttatccacgtgagtagtattggaggctgaacagtgcctgaaggaaaggagagacaggaggtttcaaagacagacacttttgaaaccttcaaaggtggaatttgcaagccctagcaggtgatttgagctcaagagcaagggagaaaaatgggggttaaggatgacactgaggtttccacctctggctggagaagtgtagaaccatcttaagccttgtgaaagagctgtttaaagaggaaagagctaaggtgccagcaagataaccctgtggatatgtccagtggtgatggtgaaatgaagggttggtagctgaggaaagggtgttagggctgaaaatatgacattcttttgtgggaaaaaggggtatcccaattttaaaaaggcaatgcagcctgccttggtgagtactggctctagagctagtttgctttgttaggactccagctatgacacttggtgagtgtaggcccttcaattaacctctcgtaaccccaattacctcctctacaaaatagggtaatagaagtacttcccccactgggtcacagtaagatgaaaatacttagaatatgctctggtacacagtaggtgcataaatgttagcttattattatcattatcatctaaatgcattattgcgtacacaaaaataacaggtgaaacttaaggaatgaatgagtgaattgcattcattcacttaatcattcaataaacatccattaagcatcaactatgtgccaggcccagggccagagacttaggaaaaaacgcaaagaagagaaaagggcagcagctttgagaacatccgctcttaaggggtaggcagaaggaggaagtcaggcaagcagagggtgccaaaaatggaggtaaggagggaagacttggcaaggaggggctgttctttggtatcacagtctgcggggaggttgggggcaggaaatggaggcctgagctaccctcatctcaggtattgttttcctggccttttgacttcctagccacaggtcaaggatgccaaagagagagggacagcaagtctggcaggatttcctgtatgactcccggctgaacaagggcaaggtctgtgtctgaaactctcacaccaccctaaataagaacacaaactctagaaagtatgagaggccagaatattgcttccgttcccttttcatctctgcacaccggggtgggagaaaaagagatggtcaagtggctctgagtgaggctgggaaagggaaacacaaagagaaaccaagaaatcctcattctcaccagacaatctaaggcttcactttgtctgaaaatatttaggctcaagaatgtgcaggatacatccaaaaatggttacgatggtaaattttatgttatgaatattttaccacaattaaaaaaaaatttaatgctgttaggcacagaatcaggagaaccacaagagcttaatgactttgacagacacaccaatacatgcatagagaaagaatgaaaatattaaaccaaagaatgaatgagtgatgaaatatttaaataaggtgggtacatagcacatcagaacatatttgggaataatacttccatctagggaatacatttctttttttttttaatgtgatagtaatcacaaaagcaaaggcggaatttctgtgttgtttgagacatataattcctttgttatgctatgtaatcatgtggcatactgcatgggtcaataagatttaaaaaataaacttctatctgggtgcggtggctcacgtctgtgatccctgtactttgggaggctgaggcgggtggtcatctgaggtcaggagttcaagaacagcctggccaacatgatgaaaccctgtatctactaaaaatacaaaaacattagctgggcgtggtggcgcacacctgtaatcccagctactcaggaggctgaggcaggagaatcgcttgaacccgggaggcgaaggttgcagtgagccaagattgtgccactgcactccagcctgggcaataagagcaaaacaccatctcaaaaataaaaaataaaataaacttctggccaggcatggtggcttacccctgtaataccagcattttagggagattgaggcaggaggatggcttgagcccaggaatttgagaccaacctgggcaacgtggtaagagcttgtctctacaaaaataaatttttaaaaattagccaagtgtggtggtatacacctgtggtcccagctactcaggaggctaaggtgggaggatcacttgagcccaggaggttgaggctgcagtgagttgtgttcatgtcactacacttcagcctgggtgacagtgagaccctgtctcaaaaataaaaataaataaataaacttctggatggctgcacaataaatagttgattttcttcctatgagaatctctaaaataacatatccagtatttgaacttaagtaaaatcagtgttcaaatttcaaataataataagaataatgtgcaggaaaaaatcctaaaggaaaagccaaaatgggaaagggtaagtaggcaggactgaccctgaagtaatgtgttaattggcagcgctgctagcaaggcccaaggtctcgcacaggtagaatcagtttcccagcagacaggtgaggcaggcagctggactgaccctcatgacccccaacttttacatttccagctttatcatcaatgactatagagataaggcctctgattctcataggcctccacattctggctggttacttggtgcaagtgctttgacattgccattatctcatggccctcaactcccctgagccacagtgtctagtaccaggacttttagtctcatgttgctctcatccaccctaaaggagaagtttcagagcattctagtaacaacacatgaatggtatttttccaaacttattcatacatattatcctttgagcttcacagtaattgtgcaaagaattatttctatctacatttcagagcttagcaaatagaagcagaggctttaagtgatttgcacaaaatgatcaaactaataaatggtgaaatgaagactcaaggtcatgcccatctttcgttcacccacccatgcacagatgtattcacttgttgagtgtgccaggcactgcgttgtctaaagccaaatcagatgttcttttaagaacttctcggccaggcgcggtggctcatgcctgtaatcccagcactttgggaggccaaggtgggtgaatcacgaggtcaggagatcgagaccatcctggctaacacagtgaaactctgtctctactaaaaatacaaaaaattagccaggcgtggtggggggcgcctatagtcccaactactcaggaggctgaagcaggagaatggcgtgaacccgggaggtggaacttgcagtgagctgagatcgtgccactgcactccagcctgggtgacagtgagactccgtctcaaaggaaaaaaaaaaagaggccaggcgccgtggctcacgcctgtaatcccaacactttgggaggccaaggtgggtggatcacctgaggttaggagtttgagaccatcctggccaacatggtaaaaccccatctttactaaaaatacaaaaattagctgggcatggtggcgggcgccagtagtctcaactacttgggagactaaggcaggagaaccgcttgaacccgggaggcgaaagttgcagtgagctgagatcgtgccacttgcactccagcctgggtgacagagcaagactccatctcaaaaaataaaaaaaaaaagaacttcttgtctcccacttattcaatcatgactcagttcttgagggacaccttattctctctgcatcttaagcacccagcacaaggcctggagcagaggaagtgctgagaaaagtctagtgattggcaggctcagccctgggcttcaaggctccgtatcctcttagcttttcaggctacatgcatttgtgtgaaggcgattaaaatgcacacaaatttgtttctggcttggagccctttgatccaacagatgaggaaatgttctctccttaaaagccacaaataaaatcttatggagctccaaatatgccctaccccgatatcatcataatttccctttataccttaatccacttcatcccccaaactggctgtcccggtactgacaaggtctcatcctccctcttcttctcctctcccacagctttgtcacccgaaagaaccgccaagtgtgtgccaacccagagaagaaatgggttcgggagtacatcaactctttggagatgagctaggatggagagtccttgaacctgaacttacacaaatttgcctgtttctgcttgctcttgtcctagcttgggaggcttcccctcactatcctaccccacccgctccttgaagggcccagattctaccacacagcagcagttacaaaaaccttccccaggctggacgtggtggctcacgcctgtaatcccagcactttgggaggccaaggtgggtggatcacttgaggtcaggagttcgagaccagcctggccaacatgatgaaaccccatctctactaaaaatacaaaaaattagccgggcgtggtagcgggcgcctgtagtcccagctactcgggaggctgaggcaggagaatggcgtgaacccgggaggcggagcttgcagtgagccgagatcgcgccactgcactccagcctgggcgacagagcgagactccgtctcaaaaaaaaaaaaaaaaaaaaaaatacaaaaattagccgggcgtggtggcccacgcctgtaatcccagctactcgggaggctaaggcaggaaaattgtttgaacccaggaggtggaggctgcagtgagctgagattgtgccacttcactccagcctgggtgacaaagtgagactccgtcacaacaacaacaacaaaaagcttccccaactaaagcctagaagagcttctgaggcgctgctttgtcaaaaggaagtctctaggttctgagctctggctttgccttggctttgccagggctctgtgaccaggaaggaagtcagcatgcctctagaggcaaggaggggaggaacactgcactcttaagcttccgccgtctcaacccctcacaggagcttactggcaaacatgaaaaatcggcttaccattaaagttctcaatgcaaccataaagctgactcttgatttcctcccggggaactgtccttccccatgagcattaggcacacaggggtccagggcttgcaaacacctgatgtccatcctagattgggatgacagggctgaaaacaaaagctctccgagaagggggcatgggtaggcacagcaattaaactaatcagtgacttacccactctggagggggaggggagacaatagtcactacgtccccacccttgagtccccaagtttatcttactgcctgccacagcatctctctgtttcctcagaccttggttggcccttcctccctggcctaccctctaccttatccccagtggatttctttaacaccactcttgcccctggaatgagattcaatggcaattccaaatgcctcaggtctttcaaataaggacaatgaggtattttgtgtttttccactagtacaccagctcctttaaggtggggtatttcaactttcccaagcttgtccctttatgtaaacatatattgacaatatgtatggccataacaatagttaacattaattgagcactcactatgtgccaggcattggcttagccccttacattcatcattctttttcatccttataaccctatagggttaggtacagttattagccctgtttatagtcaggaaaacccttagcaagagagggaaatgatttgccaaaagccccacagctcaaagaaaaataaagcaggtgggccgggcgcggtggctcacacctgtaatcccagcactttgggaggctgaggcaggcagatcacgaggtcaggagatcgagaccatcctggctaacacggtgaaaccccgtctctatgaaaaaaaaaaaaaaatttgccaggcgtggtggcgggtgcctgtagtcccagctattctggaggctgaggcaggagaatggcgtgaacctgggaggcagagcttgcagtgagccgagatcacgccactgcactccagcctgggcgacagagtgagactcagtctcaaaaaaaaaaaaaaaaagaaaaaagaaagaaagaaaaataaagcaggtgataaagctttacaattaagtttaaacccatcaggtctaatgccaaaatccatgcttttttttttccacccttaatttgcaaaattccaaacttatggaaatttgcaagaatacaccacatacccttcatctagagtcaaatattgacattttaccaatttgctttatctgtgtgtgggggcagtgtgtggtcagtatacacattttgtttctgaaccacttgagagtaagttgcaaatgtgatatcatgtcatccttaaaagtgtcagcatgtatctactaataacaaggacattataaataaccacaacatgcataccatactcaggaaacttaacaatgacacaatatacagtccataatcaaattcctcatagtccagtaaggaagacagacctgtgagcagattatacatatgaaaaagacttaaagtaaagcaaagtgtacaaaaaactgtggtcacactgtggagagagggaattctatcactgagtgggtggatgggcagggggtaggaaccctgagggagaataaagacttcagagatgagaaaacatttgagtggactttttgaaagatctgagtgccagtttaacaggtttacaagtaaaagactgacaggtagagggaacagcatatgcaaaagcaagaggtataaaaggcagctccttcatcaggtcaaatagcgaatgcatgctgggcttaatacctaggtgaagggttgagaggtacagcaaaccaccatgacacacatttaccatttatctatgtaacaaacctgcacgttctgcacatgtatcctggaacataaagtaaaataaaataaaaagttgaaagaaaataaaagaaaaaggcagctccttaccacacagataagagttcagtcttttgctgccaaagacggggagagggtatgtataaaagggactttctggggccaggcgcagtggctcacatctgtaatcccagcattttgggaggccaaggtgggcagattacctgaggtcagaagtttgagaacagcctggccaacatggtgaaaccccgtctcttctaaaaatacaaaaattagcctggcatggtggcatgcacctgttgtcccagctacttgggaggctgacgcaggagaatcgcttgaacctgggaggcggagactgcagtgagccaagatcatgccactgcactccagcctgggcgacagaatgagactccctcccaaacaaacaaacaaacaaataaataaataaagggactttcccatccctgccattttcccagtgaataatcctaagaacaggtcttgatcctaacatgggcttacttgagcttgacagttcaccagatggtttgattttcttctccagtttatgcctcaccacaggccctctagttaagccagacaggaatgactttcctactcgtccagtgagcaaactgaagctcagaaaataaagtgactagctcaagtccaggccagtagataccacagctggggctcagaagtgaaacctgagtgttctatttaccaaagtaacctggtcgcttagcacttggaagcttctacctccagaagtccagacacctcccctgtacctctcgtaccacagaggacaggtctcctccagctgtgcccccactcccctaaaagccttgtattcccccctgcaggttccctctggccccaccaggagaagaagatggcctatgaaaaatcaactgatatctctgatgtctccaggtcaatgttcctgtacccatggctggaatatccagacaagaccaaaggtgaggctgggatggacagaaatggagccaagagcaggggactgaaaaagaaatgctacctggctctcactcccaggcaagggtctaggtgagttcagcaaacccttgggaaacatcagggcaggcccttggacactttgatggctctgcacagtcctcaaggtctcaggctcctcagcagggcctacagggatctctaagatgggacacctgtgtgtctccccagcttctgctcccacacctgtaccctgctctttaccctcaattcttgcacctccaaatctttgcatagggtgttccctgtgtctaatgctcttcccccttatctacctggctagttcctgtttgtattgaagactcagcttgtggagtttactctaggaaaccttcccttatcctcccagccaggttaggtacccctcatgtttaccacctgtgtctacatctatcttcacatttgtttccctctgttaatcactaagaaacacttctgtctctccagctagaacagtggtcctcaaagcgtgatcccatgaccagcagcatcagcatcttgttagaaatgcaaattctcgactgggcacggtggttcacgcctctaatcccagcactttgggaggccaaagcgggcggatcacttgagaccaggaat

SEQ ID NO: 22958 - DNA, 1218 bp, Homo Sapiens
ggggagaagacttcttagccagcttgatgtttaaaattcagctggagcccttaaaacttcgagcgtggacgctgaatgggtttgtaaagtttcgaaacaaggagaccagtgctggtccagtggctgtgatgggaaaagattattacaagattcttgggatcccatcgggggccaacgaggatgagatcaagaaagcctaccggaagatggccttgaagtaccacccagacaagaataaagaacccaacgctgaggagaagtttaaggagattgcagaggcctatgatgtgctaagtgaccccaagaaacggggcctgtatgaccagtatggggaggaaggcctgaagaccggcggtggcacatcaggtggctccagtggctcctttcactacacctttcatggggacccccatgccacctttgcctccttctttggtggctccaaccccttcgatatcttctttgccagcagccgctccactcggcccttcagtggctttgacccagatgacatggatgtggatgaagatgaggacccatttggcgctttcggccgttttggcttcaatgggctgagtaggggtccaaggcgagccccagaaccactgtaccctcggcgcaaggtgcaggaccccccagtggtgcacgagctgcgggtgtccctggaggagatctaccatggctccaccaagcgcatgaagatcacaaggcgtcgcctcaaccctgatgggcgaactgtgcgcaccgaggacaagatcctgcacatagtcatcaagcgtggctggaaggaaggcaccaagatcaccttccccaaagaaggcgacgccacacctgacaacatccctgctgacatcgtctttgtgctcaaagacaagccccatgcacacttccgccgagatggcaccaacgtgctctacagtgccctgatcagcctcaaggaggcgctgtgtggctgcactgtgaacattcccactatcgacggccgagtgatccctttgccctgcaatgatgtcatcaagccaggcaccgtgaagagactccgtggggagggccttcccttccccaaagtgccaactcagcgaggagacctcattgttgagttcaaagttcgcttcccagacagattaacaccacagacaagacagatccttaagcagcacctaccctgttcctaggctctgccccagccagtccagagcctaccacagcaataccccc

SEQ ID NO: 22959 - DNA, 736 bp, Homo Sapiens
agccgcctcggtcctctgtagcgggcgacctaggccccgggacccggacggaggtagaggccagggcagcgcgtccgggagcggagtccgcgcccgccgccgccatgccggacagctgggacaaggatgtgtaccctgagcccccgcgccgcacgccggtgcagcccaatcccatcgtctacatgatgaaagcgttcgacctcatcgtggaccgacccgtgaccctcgtgagagaatttatagagcggcagcacgcaaagaacaggtattactactaccaccggcagtaccgccgcgtgccagacatcactgagtgcaaggaggaggacatcatgtgcatgtatgaagccgaaatgcagtggaagagggactacaaagtcgaccaagaaattatcaacattatgcaggatcggctcaaagcctgtcagcagagggaaggacagaactaccagcagaactgtatcaaggaagtggagcagttcacccaggtggccaaggcctaccaggaccgctatcaggacctgggggcctacagttctgccaggaagtgcctggccaaacagaggcagaggatgctgcaagagagaaaagctgcaaaagaggccgccgctgccacctcctgaggcagctgtgggtgcccctgctgtgtggctctgtatgactgttgctgaaatataaagccctgcaacctgaaaaaaaaaaaaaaaaaaaaaaaaaaaaaaaaaaaaaaaaaaaa

SEQ ID NO: 22960 - DNA, 7413 bp, Homo Sapiens
ctcactgtccctggaatcttcaagggagttactgcattacatcatcagaaacaaggcatttctatattactatggaaagatttcgtctggagaagaagttacctggtcctgatgaagaagctgttgtggatcttggcaaaactagctcaactgtgaacaccaagtttgaaaaagaagaactagaaagtcatagagctgtatatattggtgttcacgtcccgtttagtaaagagagtcgtcggcgtcataggcatcgcggacacaaacatcaccaccggaggagaaaagataaagaatcagataaagaagatggacgggaatctccttcttatgatacaccatcccagagagttcagtttatccttggtactgaagatgatgatgaagaacatattccccatgatctcttcacggaaatggatgaactgtgttacagagatggagaagaatatgaatggaaagaaactgctagatggctgaaatttgaagaggatgttgaagatggcggtgaccgatggagtaaaccttatgtggcaactctctctttgcacagtctttttgaactaaggagttgcatcctcaatggaacagtcatgctggatatgagagcaagcactctagatgaaatagcagatatggtattagacaacatgatagcttctggccaattagacgagtccatacgagagaatgtcagagaagctcttctgaagagacatcatcatcagaatgagaaaagattcaccagtcggattcctcttgttcgatcttttgcagatataggcaagaaacattctgaccctcacttgcttgaaaggaatggtattttggcctctccccagtctgctcctggaaacttggacaatagtaaaagtggagaaattaaaggtaatggaagtggtggaagcagagaaaatagtactgttgacttcagcaaggttgatatgaatttcatgagaaaaattcctacgggtgctgaggcatccaacgtcctggtgggcgaagtagactttttggaaaggccaataattgcatttgtgagactggctcctgctgtcctccttacagggttgactgaggtccctgttccaaccaggtttttgtttttgttattgggtccagcgggcaaggcaccacagtaccatgaaattggacgatcaatagccactctcatgacagatgagattttccatgatgtagcttataaagcaaaagacagaaatgacctcttatctggaattgatgaatttttagatcaagtaactgtcctacctccaggagagtgggatccttctatacgcatagaaccaccaaaaagtgtcccttctcaggaaaagagaaagattcctgtgtttcacaatggatctacccccacactgggtgagactcctaaagaggccgctcatcatgctgggcctgagctacagaggactggacggctttttggtggtttgatacttgacatcaaaaggaaagcaccttttttcttgagtgacttcaaggatgcattaagcctgcagtgcctggcctcgattcttttcctatactgtgcctgtatgtctcctgtaatcacttttggagggctgcttggagaagctacagaaggcagaataagtgcaatagagtctctttttggagcatcattaactgggattgcctattcattgtttgctgggcaacctctaacaatattggggagcacaggtccagttctagtgtttgaaaaaattttatataaattctgcagagattatcaactttcttatctgtctttaagaaccagtattggtctgtggacttcttttttgtgcattgttttggttgcaacagatgcaagcagccttgtgtgttatattactcgatttacagaagaggcttttgcagcccttatttgcatcatattcatctacgaggctttggagaagctctttgatttaggagaaacatatgcatttaatatgcacaacaacttagataaactgaccagctactcatgtgtatgtactgaacctccaaatcccagcaatgaaactctagcacaatggaagaaagataatataacagcacacaatatttcctggagaaatcttactgtttctgaatgtaaaaaacttcgtggtgtattcttggggtcagcttgtggtcatcatggaccttatattccagatgtgctcttttggtgtgtcatcttgtttttcacaacattttttctgtcttcattcctcaagcaatttaagaccaagcgttactttcctaccaaggtgcgatcgacaatcagtgattttgctgtatttctcacaatagtaataatggttacaattgactaccttgtaggagttccatctcctaaacttcatgttcctgaaaaatttgagcctactcatccagagagagggtggatcataagcccactgggagataatccttggtggaccttattaatagctgctattcctgctttgctttgtaccattctcatctttatggatcaacaaatcacagctgtaattataaacagaaaggaacacaaattgaagaaaggagctggctatcaccttgatttgctcatggttggcgttatgttgggagtttgctctgtcatgggacttccatggtttgtggctgcaacagtgttgtcaataagtcatgtcaacagcttaaaagttgaatctgaatgttctgctccaggggaacaacccaagtttttgggaattcgtgaacagcgggttacagggctaatgatttttattctaatgggcctctctgtgttcatgacttcagtcctaaagtttattccaatgcctgttctgtatggtgttttcctttatatgggagtttcctcattaaaaggaatccagttatttgaccgtataaaattatttggaatgcctgctaagcatcagcctgatttgatatacctccgttatgtgccgctctggaaggtccatattttcacagtcattcagcttacttgtttggtccttttatgggtgataaaagtttcagctgctgcagtggtttttcccatgatggttcttgcattagtgtttgtgcgcaaactcatggacctgtgtttcacgaagagagaacttagttggcttgatgatcttatgccagaaagtaagaaaaagaaagaagatgacaaaaagaaaaaagagaaagaggaagctgaacggatgcttcaagacgatgatgatactgtgcaccttccatttgaagggggaagtctcttgcaaattccagtcaaggccctaaaatatagtcctgataaacctgtgagtgtgaaaataagttttgaagatgaaccaagaaagaaatacgtggatgctgaaacttcattatagaattgaaccaagaggcattatacatatagatatatacatatgtaatgtgtgcgtatcatgtcactatatataagaatattgtatgtcatgctgtttatgtgtgactaccgggtttttaaaagtagtgtctggagtttgtaatgagcaccgtggagactatgtatttaatgaaatgctctctttgaagtgaggtacatggttcttaactattcaaatatttattctgttagaaaaaaaaaattttctgttttgcaatagaaggatgtggagaaatgctttcagtctacttttcttaaatctctgttcatcagtggcaattcgtaaaaaccttaagtgatactttgtttatatgtttataatttttaggtgtttcctgaaattttcacatattatttcacttttgttagtgctttatgggaagaatagggagtctataccagtgctgtgggaaaaatggtaacatttcagggcttctctatttgtgtttcatttctgtagatgtccatcgtgtttcactaactggcgttttcttagccatagagatgactgtagaacaatagaaactttaataatgatagtttttaacttttatgtttaaattttttttaaatcttaaaaccttcatatctaggtatccattgtgacagacaagtaaaattgcaggtgatttgataattaagcacccataccatttataacttctgaatttaaaaagttatacaatgccagtttgcaatagttgattttgatgcctttgtagaatattttttctgaatccttatgctcttttaaagccaatgattcccactctgttctctgccttgtctctctttgtcttaaaatgctttagtttccatcaggttcaagttcttgactattattctcttataagtagtaggcgtaaataatcaggagttagaattctctcagaagggtctatgatcagtattactttattaagaattacctttcattttctctttatgttattctttcacttttgtagattacatttaatagcttgttacctgtgattttattttaaaatatttattttgatatgatgcttaaatattatataaacatttggaaaagtaacaaatagagtaaattgttaatgtaaatagttggtgcttactttcatttatgtttattatcttaaagcaattgatagattttacatctttgatataaagcactgccatatttatattttaaaaggaaattagacattttatatgtagctcagattaatgacatttttattttgtgtattagtttttgcttttctgagctttttaaagtctaacaaatctttttagtcatcttttatatacttttagttccacatgaaataaatgttgttaagcctgtaggactggatgaatggggttgtgaaactgatttgacaagagaataatttacaaaaatcaaatgagtattgagaagccacagaaatatcaaaaatggtgacatcactattaggatgaaaattttatgaaattccaatgctccctttaaccatataattaaattacaaaggtatacataattaatctaataaaggatcatgaggaatgccaaaagctgaaattttagcaagtctggtgttttaaattcattataaactatttattaactaatgtaatgtcctcctctaagaccatattgtaagagtcttgttaaaatgatggattcaacttctgcctcggatgagaggttggaaatgtagctgcttttctttagaaaatatgtagctgtcatcatttggtactgcctaaaaagagttagactctattggcaattgatagagtattacccacggtgcttattattgtttatgagcttccattgtaatgattcctttttatttgtagcagcataattatttccaaagaccccagtatttgctgctatttttaaaactcccctgatgtacctgaacaagaggatttcctcacatcatttccttgtgtctggacatcaggggtaacaactgtacttactttacaggaagaaattttaaaactgaaaactacctgggatcatagtgtttctgtgattttatttaattgtgtatagtaattatccagtgccagaaaaaccgtcacttgcaaaatactttgcactcaaaatgtttttacaatgcttctaaatgttactggtttctgctttcttttgactacttgactgacaaaatgatctgactactccatttaagagcaaaggtaactcatgtttaagtaattaactgcttgttttaagtgattatatttcttccactgtttttgaaaaataatcaaagatagcattcattgagagacagtgacagatataatttactacatatattgatttttaaataaagttgccttaaataagtgtatgtaagcagtagtagttgctatgtactgatttacctcaaggtgcaaaataattaaacctgtacatattccatttacaaaataaattcagccctgcactttctttagatgccttgatttccagaatggagcttagtgctactgaataccctggccacagagccacctcaggatattcttttctccaccctagtttatttatttatagatatctgtttacaaagtctgtagtaaatcctgatgctgaccatctgaaatgtactttttttctgaatgctgtttcaatctaaaatagcagcttttgagaaaacaatgatgtaaattccttatgataaaaggatgattctatatattctttaatgatattaaatatgccgaagccaagcacacagtctttctaaagtgtgtgtatgtttgtgtgaatgtgaatgatactgatcttatatctgttaaaagttgttttaaaaagctgtggcatcccattgttcatatttgccaagtcttctgtaaagatgtctaggacgaaatattttatgtgctaatgcatgtatttgtaaaccagatttgtttaccactcaaaattaacttgttttcttcatccaaaaaagtttatgtcttccacgtacttaaattttctgtgtgggtataatatagctttctaatttttttctttcacaaaggcaggttcaaaattctgttgaaagaaaaatgctttctgaaactgaggtataacaccagagcttgctgtttaaaggattatatgatgtacatcagttctataaatgtgctcagcagtttaacatgtgaatcctgttttaaagtgctcagatttcaactgtgtaagccattgatataacgctgtaattaaaaatgtttatatgaaataacttaatgttttaaatttatttatgtagatcacatcatttttatcagtatgcagtgcaaatatgtgaaatgtcttttggtttattccaacaattatttattttagaaagtaagtttaaagactttaaggacattcaaagtttaaaatagtgttcaaattgcaaaatttggcaatcttcatataaattggtttcttttctaacttttcaaaaactaacattaaatgtcaattataggaaaacatagttggaaatgtaatcatcccaaagatcatttttaaaatgaaatttaattagcacatattgaacatttgacttaattgttaaaccccagttttgttttgtttttttaatcagatttttgcacactgattagtttttgtgttgtggcttttgttgctttattattcaaggtttttttttttctttccccatgggggagattgtcttccaatgtttaactacgtttaaataaataaaaattgaattttattgttcatttatataaaatctgataccttgatgtaatttcacaatacagttccaatttttatggcttttataattacaatgatattttcttctataataaaatccaaagtaaacatttaaattgtagaactgatatttttcatttatatgaagtataagcctctactgggtctatattgtgaatcatcctgcctttcaaatttgtttcataattgttagatgaaaactatttttttggagatgttactgaagttgattgagcaataaaagtctacttaattaaaaaaaaaaaaaaaaaaaaaaaaaaaa

SEQ ID NO: 22961 - DNA, 8971 bp, Homo Sapiens
agcccaaaccgcggccctagccccggccgcacccccagcccgcgccagcatgatgaacaacagcggctactcagacgccggcctcggcctgggcgatgagacagacgagatgccgtccacggagaaggacctggcggaggacgcgccgtggaagaagatccagcagaacacattcacgcgctggtgcaatgagcacctcaagtgcgtgggcaagcgcctgaccgacctgcagcgcgacctcagcgacgggctccggctcatcgcgctgctcgaggtgctcagccagaagcgcatgtaccgcaagttccatccgcgccccaacttccgccaaatgaagctggagaacgtgtccgtggccctcgagttcctcgagcgcgagcacatcaagctcgtgtccatagacagcaaggccatcgtggatgggaacctgaagctgatcctgggcctgatctggacgctgatcctgcactactccatctccatgcccatgtgggaggatgaagatgatgaggatgcccgcaaacagacgcccaagcagcggctgcttggctggatccagaacaaggtgccccagctgcccatcaccaacttcaaccgtgactggcaggacggcaaagctctgggcgccctggtggacaactgcgcccccggtctctgccccgactgggaggcctgggatcccaaccagcccgtggagaactcccgggaggccatgcagcaggccgacgactggcttggggtgccccaggtcattgcccctgaggagattgtggaccccaacgtggatgagcattctgttatgacctacctgtcccagttccccaaggccaagctcaaacctggtgcccctgttcgatccaagcagctgaaccccaagaaagccatcgcctatgggcctggcatcgagccacagggcaacaccgtgctgcagcctgcccacttcaccgtgcagacggtggacgcgggcgtgggcgaggtgctggtctacatcgaggaccctgaaggccacaccgaggaggctaaggtggttcccaacaatgacaaggatcgcacctatgctgtctcctatgtgcccaaggtcgctgggttacacaaggtgaccgtgctctttgctggccagaacattgaacgcagtccctttgaggtgaacgtgggcatggccctgggagatgccaacaaggtgtcagcccgtggccctggcctggaacctgtgggcaatgtggccaacaaacccacctactttgacatctacactgcgggggccggcactggcgatgttgctgtggtgatcgtggacccacagggccggcgggacacagtggaggtggccctggaggacaagggtgacagcacgttccgctgcacatacagacctgccatggaggggccacataccgtgcatgtggcctttgcgggtgcccccatcacccgcagtcccttccctgtccatgtgtcggaagcctgtaaccccaacgcctgccgcgcctctgggcgaggcctgcagcccaagggtgttcgcgtgaaagaggtggctgacttcaaggtgtttaccaagggtgccggcagcggggagctcaaggtcacggtcaaggggccaaagggcacagaggagccagtgaaggtgcgggaggctggggatggtgtgttcgagtgcgagtactacccggtggtgcctgggaagtatgtggtgaccatcacgtggggcggctacgccatccctcgcagcccctttgaggtacaggtgagcccagaggcaggagtgcaaaaggtccgggcctggggtcctggtttggagactggccaggtgggcaagtcagccgattttgtggtggaagccattggcaccgaggtggggacactgggcttctccatcgaggggccctcacaagccaagatcgaatgtgacgataagggggatggctcctgcgatgtgcggtactggcccacggagcctggggagtacgctgtgcacgtcatctgtgacgatgaggacatccgagactcacccttcattgcccacatcctgcccgccccacctgactgcttcccagataaggtgaaggcctttgggcctggcctggagcctaccggctgcatcgtggacaagcccgctgagttcaccattgatgctcgtgcagctggcaagggagacctgaagctctatgcccaggacgccgacggctgtcccatcgacatcaaggtgatccccaacggcaacggcaccttccgctgctcctacgtgcccaccaagcccattaagcacaccatcatcatctcctggggaggcgtaaacgtgcccaagagccccttccgggtgaacgtgggcgagggcagccaccccgagcgggtaaaggtgtacggccccggagtggagaagacaggcctcaaggccaatgagcccacctacttcacggtggactgcagcgaggcggggcaaggcgacgtgagcatcggcatcaagtgcgccccaggcgtggtgggccctgcagaggctgacattgacttcgacatcatcaagaatgacaacgacaccttcaccgtcaagtacacgccaccaggggcgggccgctacaccatcatggtgctgtttgccaaccaggagatccccgccagccccttccacatcaaggtggacccatcccacgatgccagcaaagtcaaggccgagggccctgggctgaatcgcacaggtgtggaagtcgggaagcccacccacttcacggtgctgaccaagggagccggcaaggccaagctggatgtgcagtttgcagggacagccaagggcgaggttgtgcgggactttgagatcatagacaaccatgactactcctacactgtcaagtacaccgctgtccagcagggcaacatggcagtgacagtgacttatggcggggaccctgtccccaagagcccctttgtggtgaatgtggcacccccgctggacctcagcaaaatcaaagttcagggccttaatagcaaggtggctgtgggacaggaacaagcattctctgtgaacacacgaggggctggcggtcagggccaactggatgtgcggatgacttcgccctctcgccggcccatcccctgcaagctggagccaggcggtggagcggaagcccaggctgtgcgctacatgcccccggaggaggggccctacaaggtggatatcacctacgatggtcacccggtgcctggcagcccgtttgctgtggagggtgtcctgccccctgatccctccaaggtctgtgcttatggcccgggtctcaagggtggactggtaggcacccccgcgccattctccatcgacaccaagggggctggcacaggtggcctggggctgaccgtagagggcccctgcgaggccaagatcgagtgccaggacaatggtgatggctcatgtgctgtcagctacctgcccacggagcctggcgagtacaccatcaacatcctgtttgctgaggcccacatccctggctcgcccttcaaagccaccattcggcctgtgtttgacccgagcaaggtgcgggccagtggaccgggcctggagcgcggcaaggtcggtgaggcagccaccttcactgtggactgctcagaggcaggcgaggcggagctgaccattgagatcctgtcggatgccggggtcaaggccgaggtgctgatccacaacaacgcggatggcacctaccacatcacctacagccctgccttccctggcacctacaccattaccatcaagtatggcgggcatcccgtgcccaaattccccacccgtgtccatgtgcagcctgcggtcgataccagtggcgtcaaggtctcagggcctggtgttgagccacacggtgtcctgcgggaggtgaccactgagttcactgtggatgcaagatccctaacagccacaggcggcaaccacgtgacggctcgtgtgctcaacccctcgggggccaagacagacacctatgtgacagacaatggggacggcacctaccgagtgcagtacaccgcctacgaggagggcgtgcatctggtggaggtcctgtatgatgaggtcgctgtgcccaagagccccttccgagtgggcgtgaccgagggctgtgatcccacccgcgtccgagccttcgggccaggcctggagggtggcttggtcaacaaggccaaccgattcactgtggagaccaggggagcgggcaccgggggccttggcctagccatcgagggtccctcggaagccaagatgtcctgcaaggacaacaaggatggtagctgcaccgtggagtacatccccttcactcctggagactatgacgtcaacatcaccttcggggggcggcccatcccagggagcccgttccgcgtgccagtgaaggatgtggtggaccctgggaaggtgaagtgctcagggccagggctgggggctggtgtcagggcccgggttcctcagaccttcacagtggactgcagtcaagctggccgggcgcccctgcaggtggctgtgctgggccccacaggtgtggccgagcctgtggaggtgcgggacaatggagatggcacccacactgtccactacaccccagccactgacgggccctacacggtagccgtcaagtatgctgaccaggaggtgccacgcagccccttcaagatcaaggtcctcccagctcatgatgccagcaaggtgcgggccagcgggccaggcctcaacgcctctggcatccctgccagcctgcctgtggagttcaccatcgacgcacgggacgcgggcgaggggttgctcactgtccagatcttgggccccgagggtaagcccaagaaggccaacatccgggacaatggggatggcacgtacgctgtgtcctacctgccggacatgagtggccggtacaccatcaccatcaagtatggcggtgatgagatcccctactcgcccttccgcatccatgctctgcccactggggatgccagcaagtgcctcgtcacagtgtccattggaggccatggcctgggtgcctgcctgggccctcgaatccagattgggcaggagacggtgatcacggtggatgccaaggcagccggtgaggggaaggtgacatgcacggtgtccacgccggatggggcagagctcgatgtggatgtggttgagaaccatgacggtacctttgacatctactacacagcgcccgagccgggcaagtacgtcatcaccatccgcttcgggggtgagcacatccccaacagccccttccacgtgctggcgtgtgaccccctgccgcacgaggaggagccctctgaagtgccacagctgcgccagccctacgctcctccccggcccggcgcccgccccacacactgggccacagaggagccagtggtgcctgtggagccaatggagtccatgctgaggcccttcaacctggtcatccccttcgcggtgcagaaaggggagctcacaggagaggtgcggatgccctcggggaagacggcacggcccaacatcaccgacaacaaggacggcaccatcacggtgaggtatgcacccactgagaaaggcctgcaccagatggggatcaagtatgacggcaaccacatccctgggagccccttacagttctatgtggatgccatcaacagccgccatgtcagtgcctatgggccaggcctgagccatggcatggtcaacaagccagccaccttcactattgtcaccaaagatgctggagaagggggtctgtcactggccgtggagggcccatccaaggcagagatcacctgtaaggacaacaaggatggcacctgcaccgtgtcctatctgccgactgcgcctggagactacagcatcatcgtgcgcttcgatgacaagcacatcccggggagccccttcacagccaagatcacaggtgatgactccatgaggacctcacagctgaatgtgggcacctccacggacgtgtcactgaagatcaccgagagtgatctgagccagctgaccgccagcatccgtgccccctcgggcaacgaggagccctgcctgctgaagcgcctgcccaaccggcacattgggatctccttcacccccaaggaggtcggggagcacgtggtgagcgtgcgcaagagtggcaagcatgtcaccaacagccccttcaagatcctggtggggccatctgagatcggggacgccagcaaggtgcgggtctggggcaaggggctttccgagggacacacattccaggtggcagagttcatcgtggacactcgcaatgcaggttatgggggcttggggctgagtattgaaggcccaagcaaggtggacatcaactgtgaggacatggaggacgggacatgcaaagtcacctactgccccaccgagcccggcacctacatcatcaacatcaagtttgctgacaagcacgtgcctggaagccccttcactgtgaaggtgaccggcgagggccgcatgaaggagagcatcacccggcggagacaggcaccttccatcgccaccatcggcagcacctgtgacctcaacctcaagatcccaggaaactggttccagatggtgtctgcccaggagcgcctgacacgcaccttcacacgcagcagccacacctacacccgcacggagcgcacggagatcagcaagacgcggggcggggagacaaagcccgaggtgcgggtggaggagtccacccaggtcggcggggaccccttccctgctgtgtttggggacttcctgggccgggagcgcctgggatccttcggcagcatcacccggcagcaggagggtgaggccagctctcaggacatgactgcacaggtgaccagcccatcgggcaaggtggaagccgcagagatcgtcgagggcgaggacagcgcctacagcgtccgctttgtgccccaggaaatggggccccatacggtcgctgtcaagtaccgtggccagcacgtgcccggcagcccctttcagttcactgtggggccgctgggtgaaggtggtgcccacaaggtgcgggccggacgagcagggctggagcgaggtgtggccggcgtgccagccgagttcagcatctggacccgggaggctggcgctgggggcctgtccattgctgtggagggtcctagcaaagcggagattgcatttgaggatcgcaaagatggctcctgcggcgtctcctatgtcgtccaggaaccaggtgactatgaggtctccatcaagttcaatgatgagcacatcccagacagcccctttgtggtgcctgtggcctccctctcggatgacgctcgccgtctcactgtcaccagcctccaggagacggggctcaaggtgaaccagccagcgtcctttgccgtgcagctgaacggtgcccggggcgtgattgatgcccgggtgcacacaccctcgggggctgtggaggagtgctacgtctctgagctggacagtgacaagcacaccatccgcttcatcccccacgagaatggcgtccactccatcgatgtcaagttcaacggtgcccacatccctggaagtcccttcaagatccgcgttggggagcagagccaggctggggacccaggcttggtgtcagcctacggtcctgggctcgagggaggcactaccggtgtgtcatcagagttcatcgtgaacaccctgaatgccggctcgggggccttgtctgtcaccattgatggcccctccaaggtgcagctggactgtcgggagtgtcctgagggccatgtggtcacttatactcccatggcccctggcaactacctcattgccatcaagtacggtggcccccagcacatcgtgggcagccccttcaaggccaaggtcactggtccgaggctgtccggaggccacagccttcacgaaacatccacggttctggtggagactgtgaccaagtcctcctcaagccggggctccagctacagctccatccccaagttctcctcagatgccagcaaggtggtgactcggggccctgggctgtcccaggccttcgtgggccagaagaactccttcaccgtggactgcagcaaagcaggcaccaacatgatgatggtgggcgtgcacggccccaagaccccctgtgaggaggtgtacgtgaagcacatggggaaccgggtgtacaatgtcacctacactgtcaaggagaaaggggactacatcctcattgtcaagtggggtgacgaaagtgtccctggaagccccttcaaagtcaaggtcccttgaatcccaaaagtgcctccccagcctcagcccccacctccagccacacacacattacacacacacacacacacacacaaatgtgccacacccagacacgcacagaatcagacactacaaacacctgccttgggggtgaagtgaaggcccagcctccccaccccaccgcgccccaggggttggaggaccttgtctgtgtcagacagtgtccctccctggaatgtgacatgaggccgactggggccaggctcaggggcagaggctgggacacaaggggctggcgagggctgcgaggccagggaagccctgagtttctggcggggctgagcagtgggggagcattgtgttgtgggtgtctgtgtgtgaggtcaccctcaaactgcaccgccggccagataccctcctgaccccgaggacttggtctggtctctctggtggctacaaccccagagttttaaggacttggaaaggaagcacaatcagagaagaaaacagcccccaaccagcaggagcggcctggcacatggaccggcctgagcgatgtgcactccacccaagccaggctcccagggggcctgatttctctctcactgtctctttttttaaaatggttgcacggctctgccccatggggggccttttttacacactgcgaggcccagctttctaggggacttttgcacatgtcatgcagctcagctgggagctgcttaggtggaaaactccaaataaagtgcgcctgtcgcc

SEQ ID NO: 22962 - DNA, 3575 bp, Homo Sapiens
aggcatcgaactgcggtagtacgggttacggaatcactgtcgatgccctagctggatcaatgtttcgatctgatacgccagcttggcacgaggctgcctcaggaagcttggcttccctcccatgggaagtgctggaatccactcttgcctgaccctcccataagaaacaagggaaattcctttacgtgagccgccttgctcagaacaaagcttggcgtgtttcttattcctcatcaatctgacaaaatgggtatttatttgtgcctctcaagcgtgtggcttggacatgatgttccgcatcgtggaagtggccgtgcaccaagtggaatatctgttactatagtaacagttcctttttattgataccagaataaacaggaatgcaaaggctgtctcacttgttggcacatttcagcagcctccgttcccagaggtttaagaaccgccctctagaggcagccctccttgctagtctgggacttcccggtggagtgaggaacccagcaacacgctcctgacttcccttcccaaggactcgacctgagaaggacacagcagtctctgaatttcatgctctcctctttgatgtgaagaaaatgaaaagctgaacagttgtggaactgtggatagagttagacaataaggccgccatgtactcggagatccagagggagcgggcagacattgggggcctgatggcccggccagaatacagagagtggaatccggagctcatcaagcccaagaagctgctgaaccccgtgaaggcctctcggagtcaccaggagctccaccgggagctgctcatgaaccacagaaggggccttggtgtggacagcaagccagagctgcagcgtgtcctagagcaccgccggcggaaccagctcatcaagaagaagaaggaggagctggaagccaagcggctgcagtgcccctttgagcaggagctgctgagacggcaacagaggctgaaccagctggaaaaaccaccagagaaggaagaggatcacgcccccgagtttattaaagtcagggaaaacctgcggagaattgccacactgaccagcgaagagagagagctgtagggccagctgccgggctcaggccactgcccaccctggcctggacagcctccttcagcccttctgtacctggcagccctgggccccaggccctgggacgtctgtgatgttcccacctgcttctgtagaaatgtgtcaccccagagggcctggctctccctgggaggctggggcccctaagctcctaggttttccttccaagcacccagccctcctgctccaagagggataacctgcacccctccctgcaaggggttcagagcccagcacaggagctttctctggcagaattgaggaggaagaggtggccctctgacttgacaagccttctgttctgcccaggccttcccaccaggaatctccgaggctccccagggccccgcttctccgtacaccccagctcctaggtctcagagaactcccccacctgtggttttacctgcagccagcagagcttagcttcaaggacacctgccttcaaagccactgaggggaggaagggcagggcagactgcaggtggccttgttgctggcatcccggccaggtgggcggggattaacaaagacagctgtttagggtcttctcccttaacccatgctttcataaaccccttcggacagcttccccgtccaggctttctaaccacacctacccagggtgccgcattcctgcactcagaagtctgcagggtgcctcacaaacttgattgtgcataaaaatcactggggatcttgttaatacagcttctaactcaatagatctgggagatcctgcatttctaacaagctcccaggtaaggcggaggctgctggtgtgaggaccatgctgtgagcagcagggcgagagtgcccagggctgatatatattggaaatatcacccctgaagccatcgctggcccccacctcctgtggactgatgccccagggattcccaccccacttctgcaaccccaggtatccttcattatccaccccatcccagactcccaccccagggattgcccgtgaagactttggcctagcaaattgtgttggttatgtgagtgttgttttaatcagagatgtacatgattgccaatctgcatttcttaccagtgtgaccacactgttacgatgcaattctagccaaaaaaaaaaaaaaaaaaaaaaaaaaattttttttttttactttttcctagtcttatggaaagcaaatatacaatgattttcagtaggcttctggaatagaaacagtggtttgaagaccccactgccacctttatggactggcccctttgagtctgaatccccggcctctgtcacctgagacccaacccctagctgggccaactccagtgaattcacccatttttcttcttcagaaggcctttcctgtgtgagacccacatattttaaccttttgctcctatcccatttttaaagaattagagaataaaccaggcctgtttcttttcccctgaaatccctgcctctggcttcctaaacccatcatctaaggtgacagagcagtgctggaatagcatctcctttcactttcccaaaactgccacagatagctgccactggcatgctctttgattcctggaagcaaacgtgggactgtcggaggaaagggattgttctggtcttactcataactgggtggtttgagggtgactgaagtcgtgcttttcctgtgtgtgctgccagcacagggctgtaaatgcagatattgcgcctgtgtgcgtgtgtataagtcaagctccaagaggctcctgaatgtgactggcgtgctgagaatgtgtttacgctgtttaatgtctgccaggtgagggttacactgaagatgcacaatccctaaaataaagatcaccacttccccaaagaagcagccctcgggtccatgtgttgttcagacatgtgaagagaagcaagacagagggtctcagatggacgagggctctccaagggaatgcctggggattcacccagtggtccccagaggtgctccatggaggcaacaagtcattccatgaagccccagaggtagaagggacctcaagcaccacgccctccagggcagccgtgcagacgaccttggttcacttttcaggggtcgtcccaactctgtatctccagccactccaactgtggaggctgtaaatccagattttcactgttccagtctcctttgcagcttaggatggctatgtgatcaggtgtggccaatgaaattgaagaggaagtctacctgggcttctgggaaagcttttccaataaaagacacaggcatggctaacacctccctgggcctcttcttcctaccttgattgagggtgtgatgcctggagccacagcagccactttgctaccatgacaaaaaggccaagagaatcacagagtcattgaccctatcattatttcaccaagccaataccagccgccatccttctccagaattcttgtaaataaaataaatccctctttgtttaaaaaaaaaaaaaaaaaaaaaa

SEQ ID NO: 22963 - DNA, 1446 bp, Homo Sapiens
ggcacgaggtgaaagttttagacaaagcaactgtacctattattaaattaacagattcttttactgaagtgaaagttgatatcagctttaatgtacagaatggcgtgagagcagctgacctcatcaaagattttaccaagaaatatcctgtattgccatacttggttttagtattgaaacaattcctattgcagagggaccttaatgaagtatttacaggtggaattggttcttatagtctctttttaatggcagtcagtttccttcagttacatcccagggaagatgcttgcatccccaatacaaactatggtgttctcttaatagaattttttgaattatatggacgacacttcaattatttaaagactggcatccggataaaggatggtggttcatatgtggccaaagatgaagtacagaaaaatatgctagatggctacaggccatcaatgctttatatcgaagatcctttacaaccaggtaacgatgttggaaggagttcatatggggccatgcaagtgaagcaggcctttgattatgcctacgttgttttgagtcatgctgtatcaccaatagcaaagtactatcccaacaatgaaacagaaagcatactaggtagaataattagagtaacagatgaagttgccacatatagagattggatatcaaagcagtggggcttgaagaatagacctgagccttcatgcaatggaaatggtgttaccttgatagtagatactcagcagttagataaatgtaataataatctatctgaagaaaatgaagcccttggaaaatgtagaagtaaaacctcggaatctcttagtaaacactcttcaaactcttcatcaggtccagtgtcgtcctcttctgccacacagtccagctctagtgatgtagattccgatgcaacaccatgcaaaaccccgaaacagctgctttgccgtccgtccactgggaaccgagtagggtcgcaagatgtatccttggagtcctctcaggcagttgggaaaatgcaaagcacccaaaccactaacacatccaacagcaccaacaaatctcagcatggatcagcaaggctctttcgttcttccagcaaaggcttccaaggtacaactcaaacaagccatggttcctagatgacaaacaaacaacatcaaggcaaatccaataatcagtattaccatggcaaaaagaggaaacacaagagggacgcgcccctctcagacctctgtagatagtcagcgctgcgcggtggactgtcttctctgtgcaatgatctcatgctcaggacagttgcgcagggactcctgggagatattcaggagcctcacactgttcagacgttgacttagcaactgcgttttttcccagctcgccacagaatggatcatgaagactgacaactgcaaaaaaaacaaaacaaaaaaaaaaaaaaaaaaa

SEQ ID NO: 22964 - DNA, 3831 bp, Homo Sapiens
aactcatgcggccagagcgggaaagagactcgtctttgcgtccgagttctggagccgccgcaccccgactcctggggccgcggcagcggctgcgaggggacgggcgtccgctgtctcctgggttcccctcgtagcgacccgcgggatcggaaaaaaaggagaagatggaggaggagggtggcagcagcggcggcgccgcggggaccagcgcggacggcggcgacggaggagagcagctcctcactgtcaagcacgagctgcggactgctaatttgacaggacatgctgagaaggtgggaatagaaaattttgagctcctgaaggtcctaggaactggagcttatggaaaagtatttctagttcgtaaaataagtggccatgatactggaaagctgtatgccatgaaagttttgaaaaaggcaacaatcgttcaaaaggccaaaaccacagagcatacaaggacagaacgacaagtcctggaacacattaggcagtcgccatttttggtaacattacattatgctttccagacagaaaccaaacttcatctcattttagattatataaatggtggtgaactttttactcatctttctcaaagagagcgtttcacagagcatgaggtgcagatttatgttggagagattgtgcttgccctcgaacatctccacaagttggggattatatatcgtgatattaagcttgagaatattctacttgattctaatggccatgtggtgctgacagattttggtctgagtaaggagtttgtggctgatgaaactgaaagagcatattccttttgtggaactattgaatacatggcaccagatattgtcagagggggagattcaggacatgacaaggcagttgactggtggagtttgggtgttctaatgtatgaattactaactggagcatctcctttcactgttgatggagaaaaaaattcccaagctgagatatctaggagaatattaaaaagtgagcctccatatccccaagaaatgagtgctttagcgaaagacctaattcagcgtcttttgatgaaagatcccaagaagagattgggatgtggtccacgtgatgcagatgaaatcaaagaacatctcttctttcagaaaataaattgggatgatttagccgccaaaaaagtgcctgcaccatttaagccagtcattcgagatgaattagatgtgagtaactttgcagaagagttcacagaaatggatcccacttattctcccgcagccctgccccagagttctgagaagctgtttcagggctattcctttgttgctccttccatcctattcaagcgtaatgcagctgtcatagaccctcttcagtttcacatgggagttgaacgtcctggagtgacaaatgttgccaggagtgcaatgatgaaggactctccattctatcaacactatgacctagatttgaaggacaaacccctgggagaaggtagtttttcaatttgtcgaaagtgtgtgcataaaaaaagtaaccaagctttgcaagtcaaaataatcagcaaaaggatggaagccaatactcaaaaggaaataacagctctgaaactctgtgaaggacaccccaatattgtgaagttgcatgaagtttttcatgatcagcttcacacgtttctagtgatggaacttctgaatggaggagaactgtttgacgcattaagaaaaaagaagcacttcagtgagacggaagccagctacatcatgaggaagcttgtttcagctctaagccacatgcatgatcttggagtggtgcacagggatctgaaacctgagaatttattgttcaccgatgaaaatgacaatttggaaattaaaataattgattttggatttgcacggctaaagccaccggataatcagcccctgaagactccatgcttcacccttcattcatgccgcccagagctcttgaatcagaacggctacgatgagtcctgtgacctgtggagcttgggcgtcattttgtacacaatgttgtcaggacaggttcccttccaatctcatgaccgaagtttgacgtgtaccagcgcggtggaaatcatgaagaaaattaaaaagggagatttctcctttgaaggagaagcctggaagaatgtatcccaagaggctaaagatttgatccaaggacttctcacagtagatccaaacaaaaggcttaaaatgtctggcttgaggtacaatgaatggctacaagatggaagtcagctgtcctccaatcctctgatgactccggatattctaggatcttccggagctgccgtgcatacctgtgtgaaagcaaccttccacgcctttaacaaatacaagagagaggggttttgccttcagaatgttgataaggcccctttggctaagagaagaaaaatgaaaaagactagcaccagtaccgagacgcgcagagggtccagtgagagttcccattcttcttcctctcattctcacggtaaaactacacccaccaagacactgcagcccagcaatcctgccgacagcaataacccggagaccctcttccagttctcggactcagagcttaggcatggtaggagtgatcagtgatccattgcacctttattccctcagcatatgcctgagtcgatcttttatgcttttaaaaatgtttcccgttggtctcattggaatctgcctcctaatgatttttttcaggaaaacctgtttggttatcctcattcaaaagcactggacagagaatgttactgtgaatagagcacatattactctttttacgaacctagcatgatgccaacaagactattcttgaaagagcaaaggttcctgtaaatttaattagggctagatttgagctgcttgtaagtcacaggttttccagatgtctgccaacaagaaatgactcatactgtgatgataccttttgctttgccttgtggacaatgtgggtttttgaaatttgcacccttcaaacaatgatttatcagagaaaggggtctgttttcaaaaaagattctgtaatgaattttatgtgtggcatatacttatttcttgagagaagattttaacttattgtttttattttatggttacatatgatgataacctgctattattaaactttttctaaaaagtgaaaaaaaataaaaaagatataagaactcaaggtcccatactctgtattcgggatccatctgagatgcatgctaagctatgtgtatgtttttaattttgcactgctctttcctggcaatttgttttaatggttattgcagaatattaaggtacatgtctctctgttttaagtaatattgcactttataaaaaagtatgaataaagcaaactattttataaagtgcactgtttaaagcatttgcactgtatttttgccatttattttcattttctactttaaatttgtcctcacatgcctcttctactttgtatgcaacaagtagaatggggccttgttgtgtcatgtagtcagccacttatgcaccaatgtgaggaaaacctaaagggaaattaaactaaacactgtgcttcatatttgtacactgtgttgtactacagtgaggaatttcctcctgtagtcatatattatgtacataatattttagaatcatacctatgacttgtttggaaatttttctgttgaattttaaatccagaaagcatattttataaacttatgcagagcacttttattgctcaaaagttctgaattcatacagaaaacaagtactatgtgatgaaaacatttcattgaaagattgcggcatttaaaaatacaattaattcgttccctatgcaaaaaaaaaaaaa

SEQ ID NO: 22965 - DNA, 2238 bp, Homo Sapiens
ggcacgagggaaatgttatttcgctgcaactatttagctttagttggtggtggaaaaaagccgaaataccctcccaacaaagtaatgatctgggatgacctgaagaagaagactgttattgaaatagaattttctacagaagtcaaggcagtcaagctgcggcgagatagaattgtggtggttttggactccatgattaaggtgttcacattcacacacaatccccatcagttgcacgtcttcgaaacctgctataaccccaaaggcctctgtgtcctttgtcccaatagtaacaactccctcctggcctttccgggcacgcacacgggccatgtgcagcttgtggacctggccagcacggagaagccacccgtggacattcctgcacacgagggtgtcctgagctgcattgcactcaacctgcagggaacaagaattgcaactgcatccgagaaagggacgcttataagaatatttgatacttcatcagggcatttaatccaggaactgcgaagaggatctcaagcagccaatatttactgcatcaacttcaatcaggatgcgtccctcatctgcgtatccagcgaccacggcacagtgcatatttttgcagctgaagatccaaaaaggaataaacagtccagtttggcctcagccagtttccttccaaaatacttcagttccaagtggagtttctccaagtttcaggttccctcaggctctccgtgcatttgtgcctttggaacagagccaaacgccgtcattgcaatttgtgcagacggcagctactacaaattcctgttcaaccccaagggggagtgcatccgagatgtctacgcgcagtttctagagatgaccgatgacaagctgtgactccagctgggggcgccacagcacccaccacctgccgccttcagactctcggggctggtgccagtgccccaggggcctcctgggccacgggctggaggggctgcccagggaccttggtctcgaagccatacgtggttgtctgctttcctaaggactcccatttccagtattaaagagagaatcatcatcaaggcaccgtaggtaactcagtggctgtgaccagctcgactggcggccactggctgttcccatgagttcagctgtgacgttagcttccagtgtccgccgcatcctcacactgacgggggctccatacggacctggggactgggctgagagggtggacgagttcaggtttgtttttgcagcagattccgtcgttcttactgagtctgcagcgggggagtgaacaagtgtgcagatgtaagttcttacatgataagcagattgaatacaacaccagcagcttgccttagaaaaggagaaaggaattccttttcccgcccgaacatgaagaaaaacgacctgaccctgtagagagaacacagtgtgaatgtttcccctcgtgtgagcccagcctgtggtcttctccgtacccgcaacgtggtcatctgtgcccgtgacgtcacctgtgcccgtgcgtggcgtccccgtctccgttggggccattagaatgaggcagacaccaggccactctagaagccgagccgtcacacctcaggcgtgtgcggggcggggacggggggtctcctggttacattttggattaaacctgtttcccggttatgtgtagggaacagcagagtgatgcacgaactttgaacattcgttatggggaaaacatcctttaacttcggggtcgtctgccagagcagggtctgggagggtccatgcagttcccgctggtgtggagggaaatgccctggtctggcctccgagcccccaggtccaccgtctcccctcccctcatttgtaagaatagctacacactaacattttgggaaggagaggcacataactttttttaacatttggtaactaggttatgggctctacattgtcagctacttgggatatatatttaattttcttaaattcccgttaaactctattttatggttttgatttcagattgcaaacatgtaaaacctgcatagcagcgagtcctcggttttgccggtttctttagttctttactgtcactgtcatgtaatcagctaattctctgtggatgttgctgtaaagtatgcatgttcctttcatgtgtatttaatcatgatgtttaattttgcacacttatttgtaatgtttcttttaaataaaagtgactaattttgttgtagtctgaaaaaaaaaaaaaaaaaa

SEQ ID NO: 22966 - DNA, 2014 bp, Homo Sapiens
ctgctgccgccgccgccgccgccgtccctgcgtccttcggtctctgctcccgggacccggctccgccgcagccagccagcatgtcggggatcaagaagcaaaagacggagaaccagcagaaatccaccaatgtagtctatcaggcccaccatgtgagcaggaataagagagggcaagtggttggaacaaggggtgggttccgaggatgtaccgtgtggctaacaggtctctctggtgctggaaaaacaacgataagttttgccctggaggagtaccttgtctcccatgccatcccttgttactccctggatggggacaatgtccgtcatggccttaacagaaatctcggattctctcctggggacagagaggaaaatatccgccggattgctgaggtggctaagctgtttgctgatgctggtctggtctgcattaccagctttatttctccattcgcaaaggatcgtgagaatgcccgcaaaatacatgaatcagcagggctgccattctttgaaatatttgtagatgcacctctaaatatttgtgaaagcagagacgtaaaaggcctctataaaagggccagagctggggagattaaaggatttacaggtattgattctgattatgagaaacctgaaactcctgagcgtgtgcttaaaaccaatttgtccacagtgagtgactgtgtccaccaggtagtggaacttctgcaagagcagaacattgtaccctatactataatcaaagatatccacgaactctttgtgccggaaaacaaacttgaccacgtccgagctgaggctgaaactctcccttcattatcaattactaagctggatctccagtgggtccaggttttgagcgaaggctgggccactcccctcaaaggtttcatgcgggagaaggagtacttacaggttatgcactttgacaccctgctagatgatggcgtgatcaacatgagcatccccattgtactgcccgtctctgcagaggataagacacggctggaagggtgcagcaagtttgtcctggcacatggtggacggagggtagctatcttacgagacgctgaattctatgaacacagaaaagaggaacgctgttcccgtgtttgggggacaacatgtacaaaacacccccatatcaaaatggtgatggaaagtggggactggctggttggtggagaccttcaggtgctggagaaaataagatggaatgatgggctggaccaataccgtctgacacctctggagctcaaacagaaatgtaaagaaatgaatgctgatgcggtgtttgcattccagttgcgcaatcctgtccacaatggccatgccctgttgatgcaggacacctgccgcaggctcctagagaggggctacaagcacccggtcctcctactacaccctctgggcggctggaccaaggatgacgatgtgcctctagactggcggatgaagcagcacgcggctgtgctcgaggaaggggtcctggatcccaagtcaaccattgttgccatctttccgtctcccatgttatatgctggccccacagaggtccagtggcactgcaggtcccggatgattgcgggtgccaatttctacattgtggggagggaccctgcaggaatgccccatcctgaaaccaagaaggatctgtatgaacccactcatgggggcaaggtcttgagcatggcccctggcctcacctctgtggaaatcattccattccgagtggctgcctacaacaaagccaaaaaagccatggacttctatgatccagcaaggcacaatgagtttgacttcatctcaggaactcgaatgaggaagctcgcccgggaaggagagaatcccccagatggcttcatggcccccaaagcatggaaggtcctgacagattattacaggtccctggagaagaactaagcctttgggtccagagtttctttctgaagtgctctttgattaccttttctatttttatgattagatgctttgtattaaattgcttctca

SEQ ID NO: 22967 - DNA, 2648 bp, Homo Sapiens
ggcacagggcgaggttttatacacctgaaagaagagaatgtcaagacgaagtagccgtttacaagctaagcagcagccccagcccagccagacggaatccccccaagaagcccagataatccaggccaagaagaggaaaactacccaggatgtcaaaaaaagaagagaggaggtcaccaagaaacatcagtatgaaattaggaattgttggccacctgtattatctggggggatcagtccttgcattatcattgaaacacctcacaaagaaataggaacaagtgatttctccagatttacaaattacagatttaaaaatctttttattaatccttcacctttgcctgatttaagctggggatgttcaaaagaagtctggctaaacatgttaaaaaaggagagcagatatgttcatgacaaacattttgaagttctgcattctgacttggaaccacagatgaggtccatacttctagactggcttttagaggtatgtgaagtatacacacttcatagggaaacattttatcttgcacaagacttttttgatagatttatgttgacacaaaaggatataaataaaaatatgcttcaactcattggaattacctcattattcattgcttccaaacttgaggaaatctatgctcctaaactccaagagtttgcttacgtcactgatggtgcttgcagtgaagaggatatcttaaggatggaactcattatattaaaggctttaaaatgggaactttgtcctgtaacaatcatctcctggctaaatctctttctccaagttgatgctcttaaagatgctcctaaagttcttctacctcagtattctcaggaaacattcattcaaatagctcagcttttagatctgtgtattctagccattgattcattagagttccagtacagaatactgactgctgctgccttgtgccattttacctccattgaagtggttaagaaagcctcaggtttggagtgggacagtatttcagaatgtgtagattggatggtaccttttgtcaatgtagtaaaaagtactagtccagtgaagctgaagacttttaagaagattcctatggaagacagacataatatccagacacatacaaactatttggctatgctggaggaagtaaattacataaacaccttcagaaaagggggacagttgtcaccagtgtgcaatggaggcattatgacaccaccgaagagcactgaaaaaccaccaggaaaacactaaagaagataactaagcaaacaagttggaattcaccaagattgggtagaactggtatcactgaactactaaagttttacagaaagtagtgctgtgattgattgccctagccaattcacaagttacactgccattctgattttaaaacttacaattggcactaaagaatacatttaattatttcctatgttagctgttaaagaaacagcaggacttgtttacaaagatgtcttcattcccaaggttactggatagaagccaaccacagtctataccatagcaatgtttttcctttaatccagtgttactgtgtttatcttgataaactaggaattttgtcactggagttttggactggataagtgctaccttaaagggtatactaagtgatacagtactttgaatctagttgttagattctcaaaattcctacactcttgactagtgcaatttggttcttgaaaattaaatttaaacttgtttacaaaggtttagttttgtaataaggtgactaatttatctatagctgctatagcaagctattataaaacttgaatttctacaaatggtgaaatttaatgttttttaaactagtttatttgccttgccataacacattttttaactaataaggcttagatgaacatggtgttcaacctgtgctctaaacagtgggagtaccaaagaaattataaacaagataaatgctgtggctccttcctaactggggctttcttgacatgtaggttgcttggtaataacctttttgtatatcacaatttgggtgaaaaacttaagtaccctttcaaactatttatatgaggaagtcactttactactctaagatatccctaaggaatttttttttttaatttagtgtgactaaggctttatttatgtttgtgaaactgttaaggtcctttctaaattcctccattgtgagataaggacagtgtcaaagtgataaagcttaacacttgacctaaacttctattttcttaaggaagaagagtattaaatatatactgactcctagaaatctatttattaaaaaaagacatgaaaacttgctgtacataggctagctatttctaaatattttaaattagcttttctaaaaaaaaaatccagcctcataaagtagattagaaaactagattgctagtttattttgttatcagatatgtgaatctcttctccctttgaagaaactatacatttattgttacggtatgaagtcttctgtatagtttgtttttaaactaatatttgtttcagtattttgtctgaaaagaaaacaccactaattgtgtacatatgtattatataaacttaaccttttaatactgtttatttttagcccattgtttaaaaaataaaagttaaaaaaatttaaaaa

SEQ ID NO: 22968 - DNA, 3007 bp, Homo Sapiens
gcccggagagccgcatctattggcagctttgttattgatcagaaactgctcgccgccgacttggcttccagtctggctgcgggcaacccttgagttttcgcctctgtcctgtcccccgaactgacaggtgctcccagcaacttgctggggacttctcgccgctcccccgcgtccccaccccctcattcctccctcgccttcacccccacccccaccacttcgccacagctcaggatttgtttaaaccttgggaaactggttcaggtccaggttttgctttgatccttttcaaaaactggagacacagaagagggctctaggaaaaagttttggatgggattatgtggaaactaccctgcgattctctgctgccagagcaggctcggcgcttccaccccagtgcagccttcccctggcggtggtgaaagagactcgggagtcgctgcttccaaagtgcccgccgtgagtgagctctcaccccagtcagccaaatgagcctcttcgggcttctcctgctgacatctgccctggccggccagagacaggggactcaggcggaatccaacctgagtagtaaattccagttttccagcaacaaggaacagaacggagtacaagatcctcagcatgagagaattattactgtgtctactaatggaagtattcacagcccaaggtttcctcatacttatccaagaaatacggtcttggtatggagattagtagcagtagaggaaaatgtatggatacaacttacgtttgatgaaagatttgggcttgaagacccagaagatgacatatgcaagtatgattttgtagaagttgaggaacccagtgatggaactatattagggcgctggtgtggttctggtactgtaccaggaaaacagatttctaaaggaaatcaaattaggataagatttgtatctgatgaatattttccttctgaaccagggttctgcatccactacaacattgtcatgccacaattcacagaagctgtgagtccttcagtgctacccccttcagctttgccactggacctgcttaataatgctataactgcctttagtaccttggaagaccttattcgatatcttgaaccagagagatggcagttggacttagaagatctatataggccaacttggcaacttcttggcaaggcttttgtttttggaagaaaatccagagtggtggatctgaaccttctaacagaggaggtaagattatacagctgcacacctcgtaacttctcagtgtccataagggaagaactaaagagaaccgataccattttctggccaggttgtctcctggttaaacgctgtggtgggaactgtgcctgttgtctccacaattgcaatgaatgtcaatgtgtcccaagcaaagttactaaaaaataccacgaggtccttcagttgagaccaaagaccggtgtcaggggattgcacaaatcactcaccgacgtggccctggagcaccatgaggagtgtgactgtgtgtgcagagggagcacaggaggatagccgcatcaccaccagcagctcttgcccagagctgtgcagtgcagtggctgattctattagagaacgtatgcgttatctccatccttaatctcagttgtttgcttcaaggacctttcatcttcaggatttacagtgcattctgaaagaggagacatcaaacagaattaggagttgtgcaacagctcttttgagaggaggcctaaaggacaggagaaaaggtcttcaatcgtggaaagaaaattaaatgttgtattaaatagatcaccagctagtttcagagttaccatgtacgtattccactagctgggttctgtatttcagttctttcgatacggcttagggtaatgtcagtacaggaaaaaaactgtgcaagtgagcacctgattccgttgccttgcttaactctaaagctccatgtcctgggcctaaaatcgtataaaatctggatttttttttttttttttgctcatattcacatatgtaaaccagaacattctatgtactacaaacctggtttttaaaaaggaactatgttgctatgaattaaacttgtgtcgtgctgataggacagactggatttttcatatttcttattaaaatttctgccatttagaagaagagaactacattcatggtttggaagagataaacctgaaaagaagagtggccttatcttcactttatcgataagtcagtttatttgtttcattgtgtacatttttatattctccttttgacattataactgttggcttttctaatcttgttaaatatatctatttttaccaaaggtatttaatattcttttttatgacaacttagatcaactatttttagcttggtaaatttttctaaacacaattgttatagccagaggaacaaagatgatataaaatattgttgctctgacaaaaatacatgtatttcattctcgtatggtgctagagttagattaatctgcattttaaaaaactgaattggaatagaattggtaagttgcaaagactttttgaaaataattaaattatcatatcttccattcctgttattggagatgaaaataaaaagcaacttatgaaagtagacattcagatccagccattactaacctattccttttttggggaaatctgagcctagctcagaaaaacataaagcaccttgaaaaagacttggcagcttcctgataaagcgtgctgtgctgtgcagtaggaacacatcctatttattgtgatgttgtggttttattatcttaaactctgttccatacacttgtataaatacatggatatttttatgtacagaagtatgtctcttaaccagttcacttattgtactctggcaatttaaaagaaaatcagtaaaatattttgcttgtaaaatgcttaatatcgtgcctaggttatgtggtgactatttgaatcaaaaatgtattgaatcatcaaataaaagaatgtggctattttggggagaaaatt

SEQ ID NO: 22969 - DNA, 2290 bp, Homo Sapiens
aagcttgaatctacttttttttttttttgagacagagtctggctctgtcacccaggctgaagtgcagtggagcaatctcggctcattgaacctcttgggttcaagtgattcttgtgcctcagcctcccaagtagctggaattacaggcacataccactgcacccagctaatttttgtatttttagtagagatggggtttcactgtgttggccaggctggtctcgaactcctggacctcaggtgatccacccaccttggcctcccaaagtgctgagattataggcatgagccaccacgcctggccagatgcatgttcaaaccaatcaaatggtgttttcttatgcaggactgatcgatttgcacccacctttctgcacataagttatggttttccatcttatctgtcttctgattttttatatcctgtttaatttcttccttcattgttcttctctttttttatttattttatttatttttatttttatttttatttgagacagagtctcactctgttgcccaggctggagtgcagtggcacgatctcggctcactgcaacctctgcctcctgggttcaagtgattctcctgcctcggcctcccaagtagctgggattacaggctcccaccatcacgcccagctacttttacagtatttttagtagagacggggtttcatcacattggccaagctggtctcaaacttctgacctcgtgatctgcccgcctcggcctcccaaagtgctgggattacagatgtgagccactgcgcccagccttctttttatatttttaaatgtgtcttcccaaatataaatggttggtaagcatgccaaatatattcaataacccccctcctttatttttttttgttgaagtgaggctctccctatgttgcctaagctggtcttgaactcctggtctcaagcaatcctcctacctcagcctcctgctgtgttcatctacaaattgataagagtgaaagtcataatcctacaggaggattaccctatttatttcacaaaccctatttctaccggattttcatacaaggaatacaggcatgtgtttcacctcattaatttattttttcacttagttttgatgatattcacatatattatcaagtgtgcaaacattaaattcttgtgtacaaaactcaaatggtcttccaaataattccccattcttttttcttataaactttcacagctttacccttgacagactttactcaaggaaatctaagttggtcatatgtggttctttcactgattgctatttacttcattgtccagtagcttatgtatgaaaatataattataaaatgtaagggtcctacttccagtgaaactgaagggacttaggcccacttttatcctttactgagagcttatctctacttgataaaatttctactgtattcttggcttaactcaggtcctgtgattaaaaaaaaaatgcaaagtatttctaactttctttattgactgcttttcacactttatacaagttctggcccatatcttcagtttgttctgatttttttcaccaggtgtggtggcaggtgcctgtagtcccagctactccaggggctgaggcaggagaatggcgtgaacctgggaggcggggcttgcaatgagctgagatcacgccactacactccagcctgggccacagagcgagactccgtctcaaaagtaaacaaacaaataaataataaataaataaataaagggaaagtgccacaattttggatgaaggggttgagggactttacctcacgtccaggactcggattacagagacacaatggggctagattcccacagatggataagattaaactcctatatactccttttgctgacagaaggaccttgtttggaaaaagcgttttcagaataataaagttcctgagctcttcagaaaagtattttattgtcctgtaacacagtaacaagtagccaccaaaactgattttttaacccatctatcaatgacaactcatctctgtgaagatgctcttttttttttttttttttttttgagacggggtcttgctctgtcacccaggctggggagcagtgacgtgacctcggctccctgcaacctctctttcccgggttcagcaattctcctgcctcagcctccccagtagctgggattatagggcacctgccaccacacgcagataatttttgtatttttagtacagaccgggtttcgccatgttggatggtcgggccttctggtcacaaacttctgacctcagggtgatcctaagctt

SEQ ID NO: 22970 - DNA, 1710 bp, Homo Sapiens
aaacaacagaagtggggctatttaggcaccgccaatgtttattatattcatatggcagagaataaacacagcacactagaagtttgcgctttgggtattaaaaaaaaaaaaaaaagcaaaaccttcttaggtcactgactatcttcttttgctcctttctatctgactcctcaggcaaggtgcaattcaaatccctggagaacctctcaaatatagctgctgttcaatgttactcagaaataaggaaagaaatttgacacggagacactccacatcttggctgcctggaaaaatatcatctttgaggtcattcaactcactaagtcatttttattattgttttgtctgtctattttctggtacagtctcaatgaaagatatgtggccctaatcatgcaaaaccgatctggggggaatcagttgtttcttcaggtcttcgcaggattccagctcccccaactacctccgtcgccttctaaaactggcaggctctggacgttttgcatgctgaagaaaatcactgttttgcctccagaaaggaacataaatgttgcaacactgactcctcctctcatgaagaaagagtgaacaagtgcaccgagttgagcttcttctcacagagccaccgggctggggaccggggagcggaggctgaaatccccagacgccggttttctgggctgggctttctgccttactcactccttctccctctttctggattttaccgaccgttcgcgaaacagctttccacacaatggagcttcatgtcctcgtgcaggaagtactcatcgactgatgtggcagactttgctccctggcaaaagtgagtacccatggcgagctgagtcctccgacggcctcggcagggctgccgggcggccgctctccgggatgcgggttcgaggcccgcgtgctgaaggggagagcggggccaccggcgcgggctcctggagagaacgccagccaggagccagacgggcagccggcggggaagcccgggatccgcccgcctcccgcccggatgtcccttctctgaggggctaaaaatactcttaaggtgctttgcctccaccactgcccccaaccccagcttttacaaactgcactcggctcgcattcgcctttgtcaaaggcatcttcacctgtatccttgagcatgagtttcggcgttgattgtgggattctcagaatgcaaattatttgcgtcaaaataaaaagaaaagaaaaaaagagcggggagggggaaggggcgcagacaggtgatgtgatgaaagccggactcgagactctcccatcagcagcagccgccgccgcagcagcctcgcgggcatccggcggggaaagtttagggttagcaatgctgacctgaaaggtgttgctcctcccaaaagtcagcgggggtaggggcagatgagcagcctccgggccagaagccggagctggacggaggcacctaggcagaggaattgcagcccgggaggaagctggaaggagagcccgctggagaagggaggagggaagggaagaggagttggttaaagtcaggcaaactcaggtaactggagggccggcccgagtgctacggcaggggaaggcaagggctggagtgctggctctttgagtagaaaactatccttttagtgacctctacctgtatcctgggaagcaacccacactgccctgaaaacaagcactaggggattctat

SEQ ID NO: 22971 - DNA, 4137 bp, Homo Sapiens
gtgcaagcgattaagttgggtaacgcagggtttcccagtcacgacgtgtaaacgcggccagtgaatgtaatcgactcactataggcgaattgggccgacgtcgcatgctcccggccgccatggccgcgggattccatcctaatacgactcactatagggctcgacggccgcccgggcaggtcggtgtgaggagctgtgaaattagttgtaactgaaaatgtctgacggtctggataatgaagagaaacccccggctcctccactgaggatgaatagtacaccgggattcttcagcactcaaccacagctcctaccacttcccatggcccctgaagagaagaataagaaagccaggcttcgctctatcttcccaggaggaggggataaaaccaataagaagaaggagaaagagcgcccagagatctctcttccttcagactttgagcatacgattcatgtggggtttgatgcagtcaccggggaattcactggaattccagagcaatgggcacgattactccaaacttccaacataacaaaattggaacagaagaagaacccacaagctgttctagatgttctcaaattctatgattccaaagaaacagtcaacaaccagaaatacatgagctttacatcaggagataaaagtgcacatggatacatagcagcccatccttcgagtacaaaaacagcatctgagcctccattggcccctcctgtgtctgaagaagaagatgaagaggaagaagaagaagatgaaaatgagccaccaccagttatcgcaccaagaccagagcatacaaaatcaatctatactcgttctgtggttgaatccattgcttcaccagcagtaccaaataaagaggtcacaccaccctctgctgaaaatgccaattccagtactttgtacagaaacacagatcggcaaagaaaaaaatccaagatgacagatgaggagatcttagagaagctaagaagcattgtgagtgtggggacccaaagaaaaaatacacagtttgagaagattggacaagggccaatcaggcaccggtacacagcaatggatgtggccacaggacaggaggtggccattaagcagatgaatcttcagcagcagcccaagaaagagctgaatattaatgagatcctggtcatgagggaaaacaagaacccaaacattgtgaattacttggacagttacctcgtgggagatgagctgtgggttgttatggaatacttggctggaggctccttgacagatgtggtgacagaaacttgcatggatgaaggccaaattgcagctgtgtgccgtgagtgtctgcaggctctggagttcttgcattcgaaccaggtcattcacagagacatcaagagtgacaatattctgttgggaatggatggctctgtcaagctaactgactttggattctgtgcacagataaccccagagcagagcaaacggagcaccatggtaggaaccccatactggatggcaccagaggttgtgacacggaaagcctatgggcccaaggttgacatctggtccctgggcatcatggccatcgaaatggttgaaggggagcctccatacctcaatgaaaaccctctgagagccttgtacctcattgcaaccaatggaaccccagaacttcagaatccagagaaactttccccaatatttcgggatttcttaaatcgatgtttggaaatggatgtggaaaaaaggggttcagccaaagaattattacagcatcctttcctgaaactggccaaaccgttatctagcttgacaccactgatcatggcagctaaagaagcaatgaagagtaaccgttaacatcactgctgtggcctcatactcttttttccattttctacaagaagccttttagtatatgaaaattattactctttttggggttaaagaaatggtctgcataacctgaatggaaggagcaaatgactattctctgaagacaaccaagagaaaattgcaaaaagacaagtatgacttttatatgaaccccttctttagggtccagaaggaattgtggactgaatcactagccttaggtctttcagcaaacagcctatcagggccatttatcatgtgtgagatttgcattttactttgctgactttgttgtaatagatcccattcattgtcccctttgggtatttccaatacttgaatggcagattggagtttttcagagtatgtgtttcatctgctagtctttctctccttcatagcttttcttttcctggacttgctccttttgagttgcttttgcgtttctcatgcctaggcaagtgtaatagaaattatgtagctccttatgttggcaaaggagctctatatagtttcactttgtataaaagttaggaccagctgttgttacatgtaatattttagttcagaacttgacctgaaggaagggaagaaaagtatgtgatttttaccttttttaacaaatgtgaaaaagtcagttttagaaatttcgtggtagtaagttcggcatttgttacatgtatagagagaagactaataatctctatttataactaaatcattgagatagaaaaagattcccattgactgtagacttcttcccattttgtcttcccttctgcctgtttccccttcaggcttggctctaggaaccaaagtgatttgttgttgttccaacctgggctttgtgactttggttagtgccactaccttcttccctcctttcccccttcaatttggaaataaatttctgtatatgttgcaattttaggtttaggtttgttctttttctttttcattaatcctctctcacctcacagataccccctcccatggcaaataatataataaccagtgaattttcaggaatttaaaaattagcttttttccacttaaaggagaaaaatatttgggactagcagcagaggcagtaagagatgtgaaccttggtgagctctgatacagtgagaagagattatactcatgaaagagaatgttagtgttacagagaagcagccgatagcaaatcaactgtagagacttggcggcggtggcattgccccaggtcgtcagcagtgtggtattatctatgagaacttgagcgacagagtatttcttgatgaatttatagatcatttgagatgttgagttactttagtttagttttgttttgttttttcaaataagtagagactattgtaaaaaacgagaaaggaaaatgaaatgtgcgtgttgatagcaataatttgtttcttttaaagattctaaaaggtctgagacctgtagcattaattatttgagtgccctcccttctcccctcccctcccttttctcttctcttttttcctctcctctccttctcctttattcattgttttgcttttggagtaggtgttgttcaagtatctgtggtttggttctggcattttgttcccaccatccccttcccccattaacttcccccctgcttgccatcctgcagtagtataaatcatgaataaaaaataattttgctgttgtagtatacattggagaaactggcaggttttatttccattattttatttccactatatctatgataagatgcaattataaggagagaagtgactgttttttattgataaggcaagattttcagaaaaatgagtaaaataattaatgaaacatatttagagcacttaatggtctctgttttcaatataattcttgatttcatttttctctgggaatatattggccttctacagctattactgaattatagaaactggtttatttctggcagaaagctgcagtgccacctgagttccaaattttaccattctttgtaaacagttggatggattatgataaagaagatgctaccaatgaaatagaaaaccaacgagatgagaagactgtgatcctcatgtactcagaggcacttccctcctaagtcaaagaccatcctcactgactatgtgccaacgcctcgtttcaggcttgtgactcaacaaagggcttttccattgatagaagcagtttgggatttgtagttgcgacttcttcgatagttacctgcacgtccattgctggcaactgacttgtcattaaaacctggctctttggttaaggaaaaa

SEQ ID NO: 22972 - DNA, 1926 bp, Homo Sapiens
cgcagcgggttgggtggcagcagcatcgagtagcggccgcttaggcagcaacatccgcaacaagtgtagacaaggtcccgcctgactccgctctggaaagtccttttgaagaaatggccctggtgaggggcggctggctgtggagacagagctccatcctccgccgctggaagcggaactggtttgccctgtggctggacgggaccctgggatactaccacgatgagacagcgcaggacgaggaggaccgtgtgctcatccacttcaatgtccgtgacataaagatcggcccagagtgccatgatgtgcagcccccagagggccggagccgagatggcctgctgactgtgaacctacgggaaggcggccgcctgcacctctgtgcggagaccaaggatgatgccctagcatggaagacagcactgctggaggcaaactccaccccggtgcgcgtctacagcccgtaccaagactactacgaggtggtgccccccaatgcacacgaggccacgtatgtccgcagctactacggaccgccctacgcaggccctggcgtgacgcacgtgatagtgcgggaggatccctgctacagcgccggcgcccctctggccatgggcatgcttgcgggagccgccactggggcggcgctgggctcgctcatgtggtcgccctgctggttctgagccctgggactcggagcactgacccctgcgcttggattgctagactcctcttcctcctggaccccatcctctaccatccaagccctgtcccactttggccctatcctctccattagctccttccgggtttggaccattccccccactccctacccttaatccccacatgggaagaagctatcatcacaggtacaaacatcgcttgaagtcttcacatctaccactagacacccccaaaatctgttatagacatttatggatacatttcctctaaacacaacagggcacagcaaatacgacttcatttggcttcgagttccccaggcgctgtagacacaacatgaatcgggctctctgctctctccttagggagctcgagtcctggtggggagaacaggagtaaacaaggacttgacaaagctgaagagttatcagtcctttgacaaggacaggtggggcagggagcaagacaggtaggctggaagaacagttattggcaagtatgcagagccgtgaacgtcatggcatgtccaaggaattaaatgggagttcatttgggctggggtggaggctgggatcagaccgtggtgggccttcaagctaaggagcttcctaggtgaaaggggagatgtgagccttctctggagggaagtttcatgattgcatctataatgaatatattgcctgttttgtgaatactgacacatgtccatacctaaaacactcctgagttaagtcccatccttcccacaaacagcttcctggctggtacccatgataacaattgagctgaacctggggacccctggttggggaacaggtgagttctatttgagacttccagccctagaaagctgcctccgtccagaaatgcctctcacaccaggagctcggccctctctttatagctgtgactgtcaccctctcaggctttgtctcatccttcattctgaataagatggcagtgttctcctctggggcctgatccacctctacaccagcccaggaagccccatctgtgcctgccctcaggtggtccaccagtctccccctttggttcccttccagtctcttccccctttctatcccaatcaccaatagaaatgctaacatccctgcctggtagccagactagcccactaaagctcccctgtaaatgggggctccattagttctgctgccgagactaataaagatttggttggttctagcagtaaaaaaaaaaaaaaaaaaaaaaaaaaaa

SEQ ID NO: 22973 - DNA, 1429 bp, Homo Sapiens
  misc_feature (1298)..(1298): n is a, c, g, or t
gcacgagggcgcatgactagttggggccaaaccagtgctcctgccacctctctggctgccccctagagcctgcccatcccagcctgaccaatgtccacagccagggagcagccaatcttcagcacacgggcgcacgtgttccaaattgacccagccaccaagcgaaactggatcccagcgggcaagcacgcactcactgtctcctatttctacgatgccacccgcaatgtgtaccgcatcatcagcatcggaggcgccaaggccatcatcaacagcactgtcactcccaacatgaccttcaccaaaacttcccagaagttcgggcagtgggccgacagtcgcgccaacacagtctacggcctgggctttgcctctgaacagcatctgacacagtttgccgagaagttccaggaagtgaaggaagcagccaggctggccagggagaaatctcaggatggcggggagctcaccagtccagccctggggctcgcctcccaccaggtccccccgagccctctcgtcagtgccaacggccccggcgaggaaaaactgttccgcagccagagcgctgatgcccccggccccacagagcgcgagcggctaaagaagatgttgtctgagggctccgtgggcgaggtacagtgggaggccgagtttttcgcactgcaggacagcaacaacaagctggcaggcgccctgcgagaggccaacgccgccgcagcccagtggaggcagcagctggaggctcagcgtgcagaggccgagcggctgcggcagcgggtggctgagctggaggctcaggcagcttcagaggtgacccccaccggtgagaaggaggggctgggccagggccagtcgctggaacagctggaagctctggtgcaaaccaaggaccaggagattcagaccctgaagagtcagactggggggccccgcgaggccctggaggctgccgagcgtgaggagactcagcagaaggtgcagacccgcaatgcggagttggagcaccagctgcgggcgatggagcgcagcctggaggaggcacgggcagagcgggagcgggcgcgggctgaggtgggccgggcagcgcagctgctggacgtcagcctgtttgagctgagtgagctgcgtgagggcctggcccgcctggctgaggctgcgccctgagccggggctggttttctatgaacgattccggcctgggatgcgggccaggctgcaggcggcatagttgggcccattcgtcctggaaagggactggggggtcccaacttagccctgggtgggccgggccgggntgggctggggtgggccccagtcggctctggttgttggcagctttggggctgtttttgagcttctcattgtgtagaatttctagatcccccgattacatttctaagcgtgaaaaaaaaaaaaaaaaaaaaaa

SEQ ID NO: 22974 - DNA, 3014 bp, Homo Sapiens
ggtacatggaaggccacaggaagaaacaagatcttgagctgagcaagaacatcccagcatcttcattgactttaaaagtatattctggagtcttccgtggttcactattccagtactacagagattccttatattacatggcaggaggggggtaaactgagggatagtgaagacaacaataaattaatcaagagctttcctcatatctcagaacctatcctctgtaagaatgtcagaaaaggttgactggttacaaagccaaaatggagtatgcaaagttgatgtctattctcctggagacaaccaagcccaggactggaaaatggacacctccacggatcctgtcagagtgctcagctggctccgcagagacctggagaagagtacagcagagttccaagatgttcggttcaaacccggagaatcatttggtggggaaacgtccaactcaggagacccacacaaaggtttctctgtagactattacaacaccaccaccaagggcactccagaaagattgcattttgagatgactcacaaagagattccttgccagggccccagggcccaacttggcaacgggagttcagtagatgaagtttccttctatgctaaccgcctcacgaatctagtcatagccatggcccgcaaagagatcaatgagaagatcgatggctctgaaaacaaatgtgtctatcagtcattgtacatggggaatgaacccacacccaccaaaagcctcagtaagatagcatcagagcttgtgaatgagaccgtctctgcatgttccaggaatgctgccccagacaaggctcctggctctggagacagagtctcaggatcatcacaaagtcccccaaatttgaaatacaagtccactttgaagatcaaggagagcaccaaagaaagacagggtccagatgacaagcctccttctaagaagtctttcttctataaggaagtgtttgaatctcgtaacggagattatgccagagagggtggaaggttctttcctcgggagagaaagaggtttcgagggcaggaaaggcctgatgactttacggcttctgttagtgaagggatcatgacctatgctaacagtgtggtatctgatatgatggtctccatcatgaagacactgaagatccaagtgaaagacacaaccattgccaccatcctactgaagaaggttctgctcaagcatgcaaaagaggtggtctcggatctcatcgactccttcttgaggaatctccacagcgtcacagggaccctcatgactgacacacagtttgtctcggctgtgaaaagaactgtcttctctcatggaagccaaaaggccacagatatcatggatgccatgctaaggaagctgtacaatgtaatgtttgccaagaaagtccctgagcatgtcaggaaagcccaagacaaggctgagagttattccctcatctccatgaaaggaatgggtgatcctaaaaaccgaaatgtgaactttgccatgaaatctgaaactaaattgagagaaaaaatgtattctgaacccaaatcagaggaggagacttgtgcgaaaactctgggtgagcacattatcaaagaggggcttaccctgtggcataaaagtcagcagaaagaatgtaaatctctaggtttccagcatgcagcattcgaagctcccaacacacagcgtaagcctgcatcagacatttcctttgagtaccctgaagatattggcaacctcagccttcctccatatcctccagagaaacctgagaattttatgtatgattcagactcctgggccaaggacctgatcgtgtctgccctgcttctgattcaatatcacctggcccagggaggaagaagggatgcacggagcttcgttgaagctgctggcaccaccaactttcctgccaatgaacctcctgtagctcccgatgaatcttgccttaagtctgctcccattgtaggtgaccaagaacaagcagaaaagaaggacctaaggagtgttttctttaatttcatccggaacttacttagtgagaccattttcaagcgtgaccagagccctgaacccaaggtgccggaacagccagttaaggaagataggaagttgtgtgaaagaccgttggcgtcttctccccccaggctatatgaggatgatgagacccctggtgccctttctgggctgaccaagatggctgtcagccagatagatggccacatgagtgggcagatggtagaacatctgatgaactcagtgatgaagctgtgtgtcatcattgctaagtcctgtgatgcttcgttggcagagctgggagatgacaagtctggagatgccagtaggctaacttcggccttcccagatagtttatatgagtgcttaccagccaagggcacagggtcagcagaagctgtcctgcagaatgcctatcaagctatccataatgaaatgagaggcacatcaggacagccccctgaagggtgtgcagcacccacggtgattgtcagcaatcacaacctaacggacacagttcagaacaagcaactccaagccgtccttcaatgggtagctgcctctgagctcaatgtccctattttgtattttgctggtgatgatgaagggatccaggagaagctacttcagctctcagctgctgctgtggacaaaggatgcagtgtgggcgaggttctgcagtcggtgctgcgctatgagaaggagcgccagctgaatgaggcggtggggaatgtcacaccgctgcagctgctggactggctgatggtgaacctgtaatcggcaaccccactgctttcccctcttctggcagtggggccggcccttatccccgcccttctttctcacttccacatctccccctctatatcctcacagagccctaacattatcttcacaccactctcatcaaagacatgtcatcttgtgctagccactggattttgcagattttcctgtccatgcaagcaaggacgtaaaattaaaaaattacaattaaaaa

SEQ ID NO: 22975 - DNA, 6582 bp, Homo Sapiens
tgctgctgttaatcatttcagagaagaacactgaactttgaaaaaaatgttggaagccattgacaaaaatcgggccctgcatgcagcagagcgcttgcaaaccaagctgcgagaacgtggggatgtagcaaatgaagacaaactgagccttctgaagtcagtcctgcagagccctctcttcagtcagattctgagccttcagacttctgtacagcagctgaaagaccaggtaaatattgcaacttcagcaacttcaaatattgaatatgcccacgttcctcatctcagcccagctgtgattcctactctgcaaaatgaatcgtttttattatccccaaacaatgggaatctggaagcacttacaggacctggtattccacacattaatgggaaacctgcttgtgatgaatttgatcagcttatcaaaaatatggcccagggtcgccatgtagaagtttttgagctcctcaaacctccatctggaggccttgggtttagtgttgtgggactaagaagtgaaaacagaggagagctgggaatatttgttcaagagatacaagagggcagtgtggcccatagagatggaagattgaaagaaactgatcaaattcttgctatcaatggacaggctcttgatcagacaattacacatcagcaggctatcagcatcctgcagaaagccaaagatactgtccagctagttattgccagaggctcattgcctcagcttgtcagccccatagtttcccgttctccatctgcagccagcacaatttcagctcactctaatccggttcactggcaacacatggaaacgattgaattggtgaatgatggatctggtttgggatttggcatcataggaggaaaagcaactggtgtgatagtaaaaaccattctgcctggaggagtagctgatcagcatgggcgtttatgcagtggagaccacattctaaagattggtgacacagatctagcaggaatgagcagtgagcaagtagcacaagtccttaggcaatgtggaaatagagttaagttgatgattgcaagaggtgccatagaagaacgtacagcacccactgctttgggcatcaccctctcctcatccccaacttcaacaccagagttgcgggttgatgcttctactcagaaaggtgaagaaagtgagacatttgatgtagaactcactaaaaatgtccaaggattaggaattaccattgctggctacattggagataaaaaattggaaccttcaggaatctttgtaaagagcattacaaaaagcagtgccgttgagcatgatggaagaatccaaattggagaccaaattatagcagtagatggcacaaaccttcagggttttactaatcagcaagcagtagaggtattgcgacatacaggacaaactgtgctcctgacactaatgaggagaggaatgaagcaggaagccgagctcatgtcaagggaagacgtcacaaaagatgcagatttgtctcctgttaatgccagcataatcaaagaaaattatgaaaaagatgaagattttttatcttcgacgagaaacaccaacatattaccaactgaagaagaagggtatccattactgtcagctgagatagaagaaatagaagatgcacaaaaacaagaagctgctctgctgacaaaatggcaaaggattatgggaattaactatgaaatagtggtggcccatgtgagcaagtttagtgagaacagtggattggggataagcctggaagcgacagtgggacatcattttatccgatctgttctaccagagggtcctgttggacacagcgggaagctcttcagtggagacgagctattggaagtaaatggcataactttacttggggaaaatcaccaagatgtggtgaatatcttaaaagaactgcctatagaagtgacaatggtgtgctgtcgtcgaactgtgccacccaccacccaatcagaattggatagcctggacttatgtgatattgagctaacagaaaagcctcacgtagatctaggtgagttcatcgggtcatcagagacagaggatccagtgctggcgatgactgatgcgggtcagagtacagaagaggttcaagcacctttggccatgtgggaggctggcattcagcacatagagctggagaaagggagcaaaggacttggttttagcattttagattatcaggatccaattgatccagcaagcactgtgattataattcgttctttggtgcctggcggcattgctgaaaaggatggacgacttcttcctggtgaccgactcatgtttgtaaacgatgttaacttggaaaacagcagtcttgaggaagctgtagaagcactgaagggagcaccgtcagggactgtgagaataggagttgctaagcctttacccctttcaccagaagaaggttatgtttctgctaaggaggattcctttctctacccaccacactcctgtgaggaagcagggctggctgacaaacccctcttcagggctgacttggctctggtgggcacaaatgatgctgacttagtagatgaatccacatttgagtctccatactctcctgaaaatgacagcatctactctactcaagcctctattttatctcttcatggcagttcttgtggtgatggcctgaactatggttcttcccttccatcatctcctcctaaggatgttattgaaaattcttgtgatccagtacttgatctgcatatgtctctggaggaactatatacccagaatctcctgcaaagacaggatgagaatacaccttcggtggacataagtatggggcctgcttctggctttactataaatgactacacacctgcaaatgctattgaacaacaatatgaatgtgaaaacacaatagtgtggactgaatctcatttaccaagtgaagttatatcaagtgcagaacttccttctgtgctacccgattcagctggaaagggctctgagtacctgcttgaacagagctccctggcctgtaatgctgagtgtgtcatgcttcaaaatgtatctaaagaatcttttgaaaggactattaatatagcaaaaggcaattctagcctaggaatgacagttagtgctaataaagatggcttggggatgatcgttcgaagcattattcatggaggtgccattagtcgagatggccggattgccattggggactgcatcttgtccattaatgaagagtctaccatcagtgtaaccaatgcccaggcacgagctatgttgagaagacattctctcattggccctgacataaaaattacttatgtgcctgcagaacatttggaagagttcaaaataagcttgggacaacaatctggaagagtaatggcactggatattttttcttcatacactggcagagacattccagaattaccagagcgagaagagggagagggtgaagaaagcgaacttcaaaacacagcatatagcaattggaatcagcccaggcgggtggaactctggagagaaccaagcaaatccttaggcatcagcattgttggtggacgagggatggggagtcggctaagcaatggagaagtgatgaggggcattttcatcaaacatgttctggaagatagtccagctggcaaaaatggaaccttgaaacctggagatagaatcgtagaggtggatggaatggacctcagagatgcaagccatgaacaagctgtggaagccattcggaaagcaggcaaccctgtagtctttatggtacagagcattataaacagaccaaggaaatcccctttgccttccttgctgcacaacctttaccctaagtacaacttcagcagcactaacccatttgctgactctctacaaatcaacgccgacaaggcacccagtcagtcagagtcagagccagagaaggctccattgtgcagtgtgcccccaccccctccttcagcctttgccgaaatgggtagtgatcacacacagtcatctgcaagcaaaatctcacaagatgtggacaaagaggatgagtttggttacagctggaaaaatatcagagagcgttatggaaccctaacaggcgagctgcatatgattgaactggagaaaggtcatagtggtttgggcctaagtcttgctgggaacaaagaccgatccaggatgagtgtcttcatagtggggattgatccaaatggagctgcaggaaaagatggtcgattgcaaattgcagatgagcttctagagatcaatggtcagattttatatggaagaagtcatcagaatgcctcatcaatcattaaatgtgccccttctaaagtgaaaataatttttatcagaaataaagatgcagtgaatcagatggccgtatgtcctggaaatgcagtagaacctttgccttctaactcagaaaatcttcaaaataaggagacagagccaactgttactacttctgatgcagctgtggacctcagttcatttaaaaatgtgcaacatctggagcttcccaaggatcaggggggtttgggtattgctatcagcgaagaagatacactcagtggagtcatcataaagagcttaacagagcatggggtagcagccacggatggacgactcaaagtcggagatcagatactggctgtagatgatgaaattgttgttggttaccctattgaaaagtttattagccttctgaagacagcaaagatgacagtaaaacttaccatccatgctgagaatccagattcccaggctgttccttcagcagctggtgcagccagtggagaaaaaaagaacagctcccagtctctgatggtcccacagtctggctccccagaaccggagtccatccgaaatacaagcagatcatcaacaccagcaatttttgcttctgatcctgcaacctgccccattatccctggctgcgaaacaaccatcgagatttccaaagggcgaacagggctgggcctgagcatcgttgggggttcagacacgctgctgggtgccattattatccatgaagtttatgaagaaggagcagcatgtaaagatggaagactctgggctggagatcagatcttagaggtgaatggaattgacttgagaaaggccacacatgatgaagcaatcaatgtcctgagacagacgccacagagagtgcgcctgacactctacagagatgaggccccatacaaagaggaggaagtgtgtgacaccctcactattgagctgcagaagaagccgggaaaaggcctaggattaagtattgttggtaaaagaaacgatactggagtatttgtgtcagacattgtcaaaggaggaattgcagatgccgatggaagactgatgcagggagaccagatattaatggtgaatggggaagacgttcgtaatgccacccaagaagcggttgccgctttgctaaagtgttccctaggcacagtaaccttggaagttggaagaatcaaagctggatccagtacatctgagtcactggaaagtagctcaaagaagaatgcattggcatctgaaatacagggattaagaacagtcgaaatgaaaaagggccctactgactcactgggaatcagcatcgctggaggagtaggcagcccacttggtgatgtgcctatatttattgcaatgatgcacccaactggagttgcagcacagacccaaaaactcagagttggggataggattgtcaccatctgtggcacatccactgagggcatgactcacacccaagcagttaacctactgaaaaatgcatctggctccattgaaatgcaggtggttgctggaggagacgtgagtgtggtcacaggtcatcagcaggagcctgcaagttccagtctttctttcactgggctgacgtcaagcagtatatttcaggatgatttaggacctcctcaatgtaagtctattacactagagcgaggaccagatggcttaggcttcagtatagttggaggatatggcagccctcatggagacttacccatttatgttaaaacagtgtttgcaaagggagcagcctctgaagacggacgtctgaaaaggggcgatcagatcattgctgtcaatgggcagagtctagaaggagtcacccatgaagaagctgttgccatccttaaacggacaaaaggcactgtcactttgatggttctctcttgaattggctgccagaattgaaccaacccaacccctagctcacctcctactgtaaagagaatgcactggtcctgacaatttttatgctgtgttcagccgggtcttcaaaactgtaggggggaaataacacttaagtttctttttctcatctagaaatgctttccttactgacaacctaacatcatttttcttttcttcttgcattttgtgaacttaaagagaaggaatatttgtgtaggtgaatctcgtttttatttgtggagatatctaatgttttgtagtcacatgggcaagaattattacatgctaagctggttagtataaagaaagataattctaaagctaaccaaagaaaatggcttcagtaagttaggatgaaaaatgaaaatataaaaaaaaaaaaaaaaaaa

SEQ ID NO: 22976 - DNA, 1850 bp, Homo Sapiens
cggcgccggggcggcagcagaagtccggagtcagggcgtgtggctgaggagatgccactaagcacagctggcatcctgagctcctcttctgccgcttccaacaggtcaaggaataaggctcgctatcggaccaaagccgtgagctctgaggtggatgagagcctctttggagatatcaagtccccagcccagggccagagcgacagccccattgtgctgctccgagataagcatacccttcaaaaaactctcactgctttgggcttggatcgcaagccagagaccatccagctcatcacccgggacatggtccgagaactcattgttcccacagaggatccctccggggagtccctaatcatcagccctgaggagtttgagcgaatcaaatgggcatcccatgtcctgaccagagaagaacttgaggccagggaccaggccttcaagaaggagaaggaagccaccatggatgcagtgatgacacgaaagaagatcatgaaacagaaggagatggtgtggaacaacaacaagaagctcagtgacctggaggaggtggccaaggaacgggcccagaacctcctgcagagagccaacaagctgcggatggagcaggaggaggagctcaaggacatgagcaagattatcctcaatgctaagtgccatgccatccgggatgcccaaatcctggagaagcagcagatccaaaaagaactggacacagaagagaagcggttggatcagatgatggaagtggagcggcagaaatccattcaaaggcaggaggaactggagaggaagaggagggaggaaagaattagaggaaggcggcaaattgtggaacagatggaaaagaaccaggaggagcgatcgctgcttgctgagcagcgggagcaggagaaggagcagatgctggaatatatggaacagctccaagaggaagatctaaaggacatggaacgaaggcagcaacaaaaactgaagatgcaagctgagattaagcgcatcaatgatgaaaaccagaaacagaaagcagaactgctggctcaggagaagctggcagaccagatggtgatggagtttaccaagaagaagatggctcgagaagcagagtttgaggctgagcaggagagaatccggagggagaaagagaaggagatcgcacgcttgagggccatgcaggagaaggcccaggattaccaggcagaacaggatgccttgcgggccaagcgcaaccaggaggttgcagacagagagtggcgcagaaaggaaaaggaaaatgcgcggaagaagatggaaacagaggctgagctgcgaaaaagtcggctcgaacaggtggctttcaaggagcacgctctggctgttcaggtgcacgggaccgggatgagttcgagaggattcttcgggctcagagagaacagattgagaaggagcggctggaggaggagaaaaaggccacagggcgcttacagcatgccaatgagctccggcgccaggtgcgcgagaaccagcagaaggaagtgcagaaccggattgccacctttgaggggggccggcgcctcaaagaggaggcccagaaacgccgtgagcgcatcgatgagatcaagaggaaaaagcttgaagagctgagagccactggccttcccgagaagtactgcattgaagctgagcgcaaagctaacatcctgccagctacctctgtgaactgaggggagccttcgtggccctcaggatgccttcgggggacagattctgcccagtctctgggcatccataattgctgctaacctagacatttcatagttacagattaaatctacttgactaaaaaaaaaaaaaaaaaaaaaaaaaaa

SEQ ID NO: 22977 - DNA, 50768 bp, Homo Sapiens
  misc_feature (50698)..(50698): n is a, c, g, or t
ggatcctctagagaggaaactgtcattccttagctgcagtcccctcttcaactgaagaattacatttcaccactaggtgtccacaggggaacaaaggatatcttacacttgcccattccaagtccctttcacacacactgcactccataaacaacttgtcctaggtcaatttataaaaaccttaaatcttattttatgttgtactactacagcttaggtcttcatttactttaacttataagatatcctggccggacgcagtggctcacacctgtaatcccagcactttgggaggccgaggcaggtggatcacaaggtcaggagttcaagaccagcctggccaatatggtgaaaccccgtctctactaaaaatacaaaaattagccgggcatggtggtgcacgcctgtagtcctagcgattcaggaggctgaggcaggagaatcactcccttgaacccgggaggcggaggttgcagttaactgagattgcgccactgactctagcctgggtgacagagcgagactacgtatcaaaaaaaaaaaaaaaagagaaaactttcctctaacaaccacactgacttccagaagagtcaaaggcagccctttagcaaatcttaccacaaccatcccttctctgccttcatcttggstactcttttttttttttttcctgaactccagtgatcctcctgagtagctagggactactactagggacgacttaggtgtgcaccaccatgcccagctaaatttttttttaatttgtagtatagatgaggtctcactaggttgctcaggctgtactccaactcctgagttcaagcaatcctcctgcttcggcctcccaaggtcctaggattacaggcatcagtcactgtgtgtggtctatcttcgttactcttaaacttatcttcacattagtgacaaataacctcattctgtagtttttttttttttttttttttgagaaagggtcttgctctgttacccaggctggagtgcagtgatcacagctcactgtaacctcaaactcctgggctccggtgatcttcctgcctcagcctcctcagtagctggcactaggggcacatgctgctgtgcctggctgatttttttttcttgtttttgtagagaccagttctctctaagcacaaagacttatttgtgctttcaacatcaaaacttataacaggcctgtaatcccaacactttgggaggctgaggcaggtgggtcacgtggggtcaggagttcgagatcagcctgggcaacatggtgaaacccctatctctactaaacatacaaaaattagccaggcatcatggcccgcgcctgtggtcccagctactagggaggctgaggcaggtgggtcacgtggggtcaggagttcgagatcagcctgggcaacatggtgaaacccccatctctactaaaaatacaaaaattagccaggcatcatggcccacgcctgtggtcccagctactagggaggctgaggtggaaggatcgcttaagtcctggggtcaaggttgcagtgagttattatcgtaccactgtactccagcctgggcaacagtgagaccctgcctcaaaaaaaaaaaagaaaatgaaacaaaaacttacttgcctactcccacctaattaggtaggaacatcacctatatcccaatatttaactttgttacataatgtttgagctgaggaggaagttctgagatcataaagaacaattcctttatttttcagagaatctgtgtgcctagagaggttatatattttgttctcaccatttagcagtttgaaaaatctgtatcacttttatatcacagaacattcctcaacaatgaatcgtcatggtcccatttaaaaagccttgatgcaggcactaccatccgtgcttcatacatcccaaacctcttcacgtagatagttatcccagcctttgcctctaatgcactgatttctaattctaaatgcagagatggtgaatttgcagcaactaggcaaggagcttttggggctacctgggcctgcaattgtctaagaaataagttttaagaattcagaggctgaaaacagcaatcctacttgggatgtcgtcatgcttacttcagcctgaatcacacagaagaaagccttcaagcatggrcctgaagcaatgctgtaaacacaaacatcaaaaggaagaggaggccaggtgtggtggctcacgcatgtaatcccagcactttgggaagcggaggcaggtggatcacctgaggtcaggaattcaagatcagcctggccaacatggtgaaaccctgtctctgctaaaaaaaaaaaaaaataaaaaataaataaaaaatacaaaaactggcccggcatggtggttcacgcctgtaatcccagcactttgggaggccgaggcaggcagatcacgaggtcaggagatcgagaccatcctggctaacacggtgaaaccccgactctaataaaaatacaaaaaattagctgggcatggtggcacccgcctgtagtcccagctactcaggaggctgccgcagaagaatcgcttgaacccgggatgtggaggttgcagtgagccaagatcgtgccactgcactccaacctgggcgacaaagggagactccgtctttaaaaaaaaaaaaaaaaagaacaggaagggtagagtagggcaatctaatatagaaaggaggaaccagggcaagaggaatgaaggaaaaccttggacacagttgattcctagtcagtaagcagtgtttatgactaagaagacccctccgttcactactaaacacagtgaatgacacacacacagcaggagtacaatattatataacaaatgaacatatgccaaaaactacaaaatggaacccaaagaagaggttccaacctgagattcatttcctgggggacagaagtatgaccgtgtccccaccctatgaaaatacaggtaatggggtcactgtataatacactggactccaaaaatggagtcgggaagccataaactagctgtggactctgagcagatccctttcacttttctttgcctcagtttccccatgtatgaaatggaggtcatacccccatcttcaaagtgtggacacagtttataacacatgcaaaaagtattcaaaaaccatacaaatgaaagcgcatgacggacatccctacttacatgtctcataagcaatctcaaacttaacaggcccaagatgaaattctcaatcatcccccaacacctactcctcacctttcccacctcagtaaatgtcaccacttcagtactctgggaaccattcttggttttcctcaaccaatccatcatccagtcctattcactttttttttttcctcgagacaaggtctcgctctgtcacccaggctggagtgtagtggtgtgatctcagctcactgcagcctcgaattcctcggctcaagggtttctcccacctcagcctcccaagcagctgggactacaggcgcgggccaccacaccaggctaatattttgtaattttgtagagacggaatcttgccatgttgcccaggctgctcgcaaactcctgggctcaagcgatcctcccctttggccccccaaagtgctgggattacagccgtgggccactgcaccaggcccttcattcacttctatctgcactgtcaccaccctaatgtaagcgaaaatcatctctcacatgataatgaagcagccaaaatggtctctgggcttctcctgtactctctccagtccacaccagggctctaaaccctttaaactacccactgttcttgaaagaaaccaaacttctgaatctggcttaaaagaccctacatgacctcttcccctgctgctccctcaaaccactctccccgtccctgaccttgtgccagcacactggcgtttctgtagttctcaactgtattctgtttcctcctgacaaactcttaatcatcctttgggtctcatttcagagctgggtccccgccatacactctcagagcaccctgaagtacttaagcatttgtgtaattattttattacaaaaagtataaaatcacaaacttaaaaacccaatcgactataagctccataagggtaagtactgtcatctgtttggttcacctctgtatccccaggaaaacagggtccagcacacggtctgggctcaatatttgaacccagacgaggtgaggggggacaaagtagccacctaaaaatcctaactcaaaaagataaagttctaaccgtatgtggatgcccattttgtttcaactctctccaccctcattctcaacggctcaggccaaatcatacatgggaccagatacctcaggtctccaagctcaggcagcccccgctgtcttccaccccataaagttctaagtccaaagtgagcccgtcctagctctggggcgagagaaaacaggcctctttcgcccctgcaggtgagggtcccggaccgcccggaggcaggttcctcatccagacctactggccaggactcctccacactattccgtgcagccatgacgcacgcagaccgcagcacttcgtcagcgaagaagccgctgagcgcgaggcgcttcttcgcggcttctcaagcaccgttcaaaccgcgcgtcgggcccaagtgcctagcttcgagtcgcaaagcctcagatgtccaccctattcaaggagaatggactgaaaagacgacgaccccggtcctctctctttaagaaccacccccattcgagcctgacgggggctctcagtaaactcgcgagagccaccggcttccgcccgcttcctcctctcgccttgccgggccggaagaaaggtggcacctcccaccccccagccttacctcacaaggcggcgcggacccagctgcggccaatcggcgggctcattgtaggctgcggggcagagagccaatgagaagtcgcggcggacgcccagcttctcctcactcgcaccggccccctcccttccgcctgccgccttccactccgcccctggcggaggaagtgatgtcacaggccccatgtgagcggattgcaacacatgcagctgcctggagagagggagccggtgtcctacgtcagagccgccgccgccgcggagccgccgccggggaggagcagccgctgccgcccaggactgggcccttaggtaaggcacagggagggaaaggccggtgacctttgtggcgagctgcaccggacgggaggagagggcctctgggggatggcgaggaagggggccgctctgccccagcggcggcgctaactctgtggtcttggtgtctccgggccccgccgggccgctctagggaggaggaggcgagaagatggcggacgaccccagtgctgccgacaggaacgtggagatctggaagatcaagaagctcattaagagcttggaggcggcccgcgggtgagcgccgcgtccggcaccctccgtgccctcttggttcccggacccctcaggatggacgcccccgcgccgcatggccggatgaggagaaccaggcactagccaactcccgccttctggatctctgggtagtagcccctgacccaggggcgagggtcggcgcggttggcccgagaaggggtcctttccccgcatgggggtaaggggcccgcgctccccggtttagatcactcggcccccctcgtggtaggccaccgctacttttgcacctctcccgggcccttaagtccaggtcctccctcttcgggctccaggtgctgccacccgactcgggtgctattgtggcaaagtgttcggccttcctttcccagggcccttccctgatttcctcttctcccttcatttctcagccaggcctcattaaaatggcctctcccttctgggcttctgagacccgggtgggtgaagtttggatgggacgggaagcagaggtggccagggacagcttctttctgattcctgatttctctgggtcttccacctgtcccaagatgacttctcccaagtcctctaattaccccggagcttcctggttttagctgttccaggacccacctataaactgaaaatgccaacgtacgcgcgatgtgaggggtgctgggtaggttttggttaatgaatctgcatgtgtatgtccaggagaaatacgggttagggggccgtttgataggaatcataactacagagtccctgctggcatttctctgaaacttgtggggatatcgctgtagagaggcgcctgatgtgcttgatgcttgttgagtgagattcataattgaattaaatgggctttgagtcttgtacattttgataagaaactgtaggtgtgtccattggggggagagtaggctagattaaaattagctgtgtgtgtgtgttttcttttttttttaacgttgttcgtttgaggaaggtgtgccaggggtattcctgtttcttttattactttattttgttcctttcccagtcatagaaactttttacttacaggaagtgcccccccccccaaaaaaaagtgtttggaacattattacatacttgtatgtctgagcattcttagaatagtagaatggcctgcctcaggccatgtgaaaagttgatttcagcacaagaatttgacattctggtttccagcccaggattgtcatttatgggtagatttgcaattttagaatgacagcccctccaagctcttcattattactgttatatgaaacaggatgtgcttaattgtactgaaggcccaattcacaggttggttttactagtgttttgttcttaataaattagggacagttctgtttggaatgaggcttctaaaagtttggccccattcagtgacgggcttgtgctcactccttcggtttactggagaaacgttagtttaatatgaatcgaagacagcggcttgttagtccttaggtttttctttgaattcaatagaatatccagaccttcttaatgatcttacaggaacttgtgccgtatgatagagtgaccagttattcccaaaatgtgagaatactgtacagaaagggtaatataggtcacgacccattatgttgcactaccaagaattagccaggttcttttgtttcagtaggatcttgttttgttacttgaagccttcaatccagtattgcattttatagattgctgttgttgcagtattgtatataggtggatgtgacctctggatttgttcttactgctttcagtagcaggcaggttcacacattttaatttgcatacgttatattctctgaaacagtccaaaaaattaaatcatgactataatttgcctgtttgaatgaagtaacattgaagatgacattgcttaataagtaacagcattcctttctactgcttaatgaaggaaactcattcttaaatttgttctacccatgttacctagccactagaaacttttaagcgcctctttaaggcttttgaaggctttacctctttgtttagcaaagttcagtaaagtttaaagcatgctaaaaatgaagttataagacacaacttgtatttcaagttgttgagtttggatatttcagacatgattaagctgtctaaaatagctggaggaccttccgctacacattgtggttaataatcatgtcctactttgcttttaatcaggatttggttgcatcttgatcccatggaaatttaaaatcttggccatctctgagtattggtaagggagtcagaagattccccagtatataccagtttttggaggtgggaatattttcattgccaacttgtgttaaagtcagactctagattttcatagatagggtacagtggaaaatgttattcctactttacctagtgataaaatatctttagaagaattgtaatgggctttaaagacttaagtggatggcaaaatgaatctgtatttgctgatgttttggggatactctggttttcaggaggaaactgaggttttcaggcatggttattaggacaaggtagtgagacttagtggttgagtaacagtattgttttggaaatgaaaaagccctttcctccccttagcagtgtagaattctaggcataggaatcatggatttgtttttaacagtagttattaaaatatgctagaataagagtgattttgaaattaagataatcctatgtggttatctcttgatatatgacccaaatttaatgtagcttgaaaaaggaaccacctgcaaaatgggctcactaactacatctgaataaagggaagtatgttggcaaaataatttattaagcacatactatattatagactgtgctacagtacattattaagtcatttaatcctcacaagtattgccaccatttggtagacaaggcacctgaggctaagagataatttgtccaagatgtcacagcaaaaatgtagcagagttcagaacttaaaccaatgtgctataatgggtatattttattttcagaaaatacaaaactagatttccttaaaatgtagtctgagctataacagattctattttatgttacacgtgtgtagaagagcatttatagaggccacattactaaaatggggaacttcatagcattctgttttgtaaccagcatcatacttaatcttctgagttgaaaggagtgtcacacataaacttgatttttgatttgggtagaacatgcttatttggtttcagataagcctggtcgaatgttagtttgtgtgtgctagtaaaataaccagttaattattttggtagacataggccccacttaaagttgatggtagttcttccctgttcatgattgctcctggtatatgctccacagttggcttatgaaggacaaatgtatacataaaccaatactgtggttgagggtatcttgaataaggaactaaaacaggtcaacgtatgttggaaaaagggggagaattattggttgttttttcccttggtgttttctgagcaggcaagaggtggcctcagaaataatgttggacaccttatagttttaaggtaatgttaataaaatcataactagagcctgtgctagccagggacagtggtgaatgtgacaaaggaatggacagtgttaatttgggttaggttgtgtctgtgggtgttaaaatgtcttcacttatcttcactaggaaaccttatgtgtttcttatccaatgaacacttggtcagataaccctcataaccataacccttgtttgaaggtcagtgagcttgcaaacttctgctgtagtgtttggacattttaaaaactgtttacttaaaaataacttgttgatatcttaattctaaatgaaataaaattggttgttcctgcccccaaatataaccatttttaaagaatccccactgaattcctcacattatatagatttaacagtgttttggcgagatcattgaataggttaatgttttaaatcttagagataattaatatgaacagattgcttaatttatatactttgaataaattaaggtatgttggatgtgtttgagtaccttccccaagtaaacattgttggttaatagaatattcacctaaatggtggtggaaataatattctcaaagcactgaatttcacattctttttttttttccctcactatcgttgaagggctggttgtagctaaaatgatacattgtggtctttgatacaaatacctgaaccatttaaagttcaggctcataaagaagactttttttgtcctctattctggctctttccatgcctcccttcccccaaactgttggttagacaaattaataggccacatgaggactgggcacgttgactcacacctgtaatcccagcactttgggaggccaaggtgggtggatcacttgaggtcaggagttcaagaccagcctagccaacatggtgaaaccctgtctctactaaaaatacaaaaatgagctgggtgtggtggcttgcacctgtaatcccagctactcgggagactaaactcagtctcagaaaaaaaaaaaataataataataataggggcctggtgcggtggctcacgcctgtaatcccagcactttgggaggccaaggtgggcaggtcacaaggtcaggagatcgagaccatcctggctaacacagtgaaaccctgtctctactaaaaatactagccaggcatggtggcgggcacctgtagtcccaactactcgggaggctgaggcaggagaatggcttgaacctgggaggcggagcttgcagtgagccgagattgcgccactgcactccagcctgggcgacagagcaagattccatctcaaaaaaaataataataacaataataataaataaagaccacatgagaaaaaagtcaagaactagactattttaagttttgtgagaagagatgaatatagaacaaacaactacagacttctcactctttccaaattttggtttccacatgtgtaactatggacattaatcttggattaggtggtaacagttgagataatatgggttaaaatacttaacaccacatttgccacatagagagtgctctgtaatgttagctctttccttttgtatatacaaacattgattctgtagagataccctaatggagaactgtattattaaaagatcaggatacagatgccacaggtctgaactatgagaaagaggagaaatagatgagagagaaaagaggtagtaaagggaagaggacagagtatatatgttagaaaggatgtggtggtggtccttagtttcctccaagtatgtaggctgcctgcttcaactcagaactagtcctaacagccgttgtatctggcatggtgttctatgcactgtgaacctaatgaacaattactccctttgaatttcaagtcttgacagacctcctattgtaatagcagatatacttatgcttccagggaaggaaggcttactctggacatattgcaaggtaagcaagagtacataattagagtatcatttaaggcagagtgctgtgtaggttataggtctctcccatcctccacaccagttggaccctttcttcacagggctcgttttctttgaacttgagattgaggatcggcccagtacagcaccaccccctgtcctgggatggtacttcattgttaaaaaagttagtgtcagctttgcagcagggctataaatggtcttcgatcctatttgaagagtaggaaggagaaatttgccttcccactgctggatctgttcaactaagaggctggacagtagaaattacttctcagtccagcctattctctagggctctcagaatagaaccttctcctaggatacattctgtaggtgtcttttaattcttcagcagcctactatcttagtgagggggagaaggaattaggaaggttcaggctttttttccccggcaggttagaaattgagagtctgaggtttctcactgggtactgtcctcagagagtatgatgaagctccctctgatacggttttatcttatgccatttgacacacatccttgcccactctctttactcttctcacaatcctttcaggttcagaggacttgacattttcaggtgcctggcaactggttcttatcatacagatagctctgcatgttgagtttgtactcttgttttcacattttcatttgttcttctaagatctcctttagaagaatgatcatagtcaaaataaaaggttctttttgttttcctgctgtgtctgtgaccttataaactagattttcctccaaaatacacatctgggtatatgaatatgaagccagaaatgcacttttactattaaccagtaagctaatgggcttcaccaaacatctgctgtgagttgggcactagacattttggaagaaatatgtaataaaatgaaaacatgatctgccacacaaccatggaatgataatataaaccattttcaactccatattagtgagtacagaataacacagtacatgttgaaggggatttagtataagcagatgattaaggtctttttttttttttttttttttttttttgaggcggagtctcgctttcccgcccaggcttgagtgcagtggtgcgatctcagcttactgcaacctccacctcccaggttcagctcagcctcccgagtagctgggattacaggtgtgtcccaccaagcctggctaattttttctttttttttttttgagacggtcttgctctcttgcccaggctggagtgcagtggcgtgatctcagctcactgcaacctccacctcccaggttcaagcgattctcctgcctcagcctcccaagtatctgagattacaggcacccgccaccacagccggctaatttttgcattttttagtagagacagagttttgccatgttggcaaagctggtctcgaactcctgacctcaggtgatccgcccgcctcggcctcccaaagtgctgggattacaggcgtgagccaccgcgcctggccgaaattcatcttttattaaaaggaggttgcagtgagccgagatcgtgccactgcactccagcctgggcaacatagccagtctctgtctcaaaaaaaaaagccaattattcatccatgggcttcagtttccccatctgcttcatgggggaactaatgctttcttcttcttctttaaaaaaggtaacattggctgggtatggttgctcatgcctgtaatcccagtactttgggaggtctaggcaggtagatcactgaggtaaggagttcaagaccagcctggccaacatggtgaaaacctgtctctactaaaaataaaaaaattagttgggtgtgttggcacatgcctgtaatcccagctactcgggaggctgaggcaagagaatcgcttgaacccaagaggcggaagttgcagtgagccaataccagcctgggctatagagggagactctgtctcaaaaaaaaaaaaaaaaaagaaactagttttctgaggatgagtaagcatacatttgacccccccccttataaccttataacagctctgtgaggaaagctattattgccatttcatggatgaagaaattaaagtacatacagggagtaaatagctgcctaatatcacagcctttagtaagggtcagtgccagattctgtactcacttttctgatttcaaagcctgtggtgctaatttgtacaacactaccttgccctttggcaagtatttcttttgctgaatagagacgtctcccattcccttctgaaaggaagactcttgtccatggagatttgtaatttagtaggaggagcaggtgtgctgagactcaggtgcaaagatttaaaagaaaacagacatgctatttccaccctaggaagaacttggatactgaacatgtttattcttgacgagcatcagtggagagagaaataacttgttgcaaaatccctccccaggagctcattcgtatattagaaagatctaagtagtgaagtaatgaatcccgaacactggttgtgattgcagtctcttgctttgcactgttgtaagaacactagagaaattttccagcttcaaagctgcttcctggtggaatattccactgggtttgtgaagatcttttaatttttctttttaagactaataatgcctatcattgtagaaaaagtgtacacactctaccagatgtgtacatttttgttttagatgactgagtaaatctttgttctctgggggacagaaagctaaaatgaacctttgtgaactttattctgaaaatgtttggacatctgagttattctgtaccctagggtggaggttgctgtaatgtctcagtaagttccggtcttggtatttctcccatttggtaatagcatctgactctaaggtcaattgcataaactaatttcaggtaactttcctagtccctttgaagggtaacagaatcatccctcctaatttgatagtctaactaaaccttttataaaaggcagccccatccacctcctaacatgcctcatagatggtagtagcagagggagtggggtggcattaatgtgaggatcaacaaaattaaaatgacacttcataagggttggttttgtttagtgctggttttcttaaggtaaacgcctaatatagtatgatggtttgaacttttaggtgcagtgaaagatggggacagttagtcaatttaaggcacattagttcctctccaaggactgacaatttgttgttggtttttgttttgttttgtttttgaggtggagtcttgctctgtctccaggctggagtgcagtggtgcgatcttggctcaccgcaaccactgcctcccaggtttaagcgattcttctgcctcagactcccaagtaactggtactacaggtgcgtgccaccacatccagctaagttttgtatttttagtagagacagggtttcaccatgttggccaggatggtctcgatctcttgacctcgtgatccgcctgcctcggcctctcaaagtgctgggattacaggcgtgagccactgtgcccggccagatttttttattggtattttatttggtagtttagaataaatctctggtgtttgcttaaaaaagagtatatagagatgatggtaggaattggccatttattcatttttcaaatgtttgagcaccactatgtgctaaaatgatttttgccctcaggatgcttatatacacttgggctgggcccggtggctcacgcctgtaatcccagcactttgggaggctgaggtggatggagaggtcaggagttcgagaccagtctggccaacatggtgaaaccctttccgtactaaaaatgcaaaaattagccaggcgtggtggtccgtgtctgtaatcccagctacttgggaggctgaggcaagagaattgcttgaacccgggaggcggaggttgcagtgagtcgaaatggcgccactgtactccagcctgggttacagagtgagactccgtctcaaaaaaaaaaaaagaagcttatatacacttactgtaaacaatgtgtttcattgtttgatacttggtggaagagaaaagagaagttgagtatcaggtccctgtgaagactggccataggttatatcagaatactgaactcatgccacacaagttttagaaaggaatgaatttctatggttctcccttatgataaattacagagtttccagtgttctggccatattatttttggtatagctcttttgttctgtggaagatttggcaagtcctgtaatcccgtaaaggtgaccatcatctgctacaaaaaatcagctcatacttcaggacctaacaggattcaaataagacttcaaccccatctgatattacctctctcccctccccatttctagttgggctgtgctacttctttccaactggtactactggtggaggggaggcgatagtcaagaactagagctccatctcattaccatttagtgatcagttactatctgctctccaagctaggcacttgacatatatgatctcgtagaatcctcatgatcttgtgaagtaagtagaaacagacccacagggatttgtgtggtttgccttcggtcacacggccattaagtgatagagctggacgtgagcctgaatctgggctcctcctattctgttcccatattaaccccatatcaaaaagaccatcttagtttaaaagtttaaacttagttttgcaaatttgggagaagaaaaatggaaaacacacagtgaataaaacaatgacagttttggaaatggagtagaaattgaagaggaactgattgattttcaggtggtgatccatgtaatactgctggcttagtgactttcccagaaatgatctggctgagatttatttatttatttattttattttatttttttgaggcggagtctcgctctgtcgcccaagttggagtgcagtggctcgatctcggctcactgcaagctccgcctcccggttcacaccattctcctgcctcagcctcccaggtagctgggactataggcgcccgccaccacgcccggctaatttttttgcatttttagtagagatggggtttcaccctgttagccagggtgatctcaatctcctgacctcgtgatccgcccaccttggcctcccaaagtgctgggattacaggtgtgaaccactgcacctggcctctggctgagatttaaattgagctttgtgaggcaggcacagatgggagcttgaaaagggaagtggtgaaaaatttggccatccatagcctaggcacaacccagccatcaaaccctgggatgaaagcttcttggggagcatgtactgtacatcccggttagggagtatagtaagcagtgtctaaaacgttcctggtcctaacctgaaagtagttaacgtgatttacaagtgatgacttggatggcagagtacttgagggggagtgagtgttcgggctggtaaagttgagtatctctgagctgtcacaattcattatggttgtattatagctaggttgtcttaggttttgggggttttttgatttttgtttttgtgctgctataacagaataccacagattggtgttctggtaagggcctgctctctgcttttaagatggcaccttgaacgctgcatcctttgttggggaggaacactgttcctctcatggcaagagaacaaaagagagatggcccactacttataagcaccttattttatcttttttgtgtgcgcgtgtgactgtagctctcaggtcttataagcaccttattttaaatagcagcatgaatctattcatgagggcagagccctcataacctaaacacattccatatgccccacctttcaatactattgcagtggggattaagtttccaacacatgaatttggggggacaccttcaaaccatagcatagggtaaatgcagcaagcaactgctctgggttcttcttctttgggtggaggtgaggttgtggaggcttgttaccttcagcagacctagagatgaccctgtgaagaaagcaagccagatgcagtgattctcaaccctagttctgcattagaatcttgcgtatttgaggccgggcacagtcgctcacacctgtaatcccaattctttgggaggccaaggcagacagatcacttgaggtcaggagttcgagaccagcctggccaacatggtgaaaccctgcctctactaaaaatagccaggcattgtggcgcgtgcctgtaaccctagctacttgggaggctgaggcaggagaattgcttgaactggggaggcagaggttgcaaagatcagagatggcgccactgcactccagcctaggagacaagagtgagactctgtctcaaagaaaagaatcagctgggtgcggtggctaaagcctgtaatcccaacactttgggagactgaggtgggtggataatttgagatcaggggttcgagaccagcctggccaacatggcaaaaccccatcactactaaaaatacaacaattagctgggcgtggtagtgggcgcctgtatcccagctacttgggaggctgaggcagaagaatcacttgaatccagcaggcagaagctgcagtgagccgagatcacaccactgcactgtagcctgggtggcagagcgagactctgtctcagagaaaaaaaaaatctttcatatttcaaaattgagactgtctcaaccaaaatcatcaccaccctcactctccctattcagaaactattgagtcaggatggaggaagaagggatcttttgtgtctgagcatgtattcttttattttgcttctttagaaagctctaaaaggattcagggctgggaggtatgcaaactgaagtgttcttgagcattgttgatgatggtgaacattgattaagatccttgtgggtcaggcgggcacggtcgcttgcgcctataaccttagctgctcagtgagtctgaggtgggaggagtgtttgggcccaagagttcgtgaccagcctgggcagccttgtgagatcctatctcgaaaataaaaagaaaaattagctgagcgtggtggtgcgtacctgtagtcccaggctagggtgggaggatcacttgaacccaggagtttccaggttacagtgagctgtgattgtgccactgcactccagtctgggtgacagagcaagaccccatctctaaaaaaattatctttctacttgagttttgtttgggatttatttggtttagttctgttacaattcctttttttcacctgtttgatttttcagacgttaaccctctgggcgaagcattgatgaaagctttgataagccaaagtgcccctaaaaccaatgagaacaagaagagaatctgagtgcagaggcccctgggagctttgagggatacattgctgtatgttgtctcttgttttgcccagtttttacaacctgcatgtgacacattgctgtaccccatgattcactagttctttgatttcggaagaggagtatagggatagtagaaaaacgaaggaaaactattacagttaaagaaggttgtagtttgcctgtgtagccagcatctccttagtgagagctttatttttcattttcccctgaagggtgttcactttaaaagacatggaagtattcagcttccttaattttattttgggtgtttacacaaactggtctaacaactttgattgacttgcaggagtgagggtaaatgaatgtttatcttgtttggaaactttactggaaaaacgttaatctgcttgttttttttgtttgtttgtttgtttggttttggtttttgttggttttgtttttgttttttgagatggagtctcgctctgtcacccaggctgtagtgcaatggcgggatcttggctcactgcaacctctgcctcccaggctcaagccgattctcctgctgggattacaagcatgcactaccacgcccagctagtttttgtatttttagtagagatgggtttcctcatgttggccaggctggtctcaaactcctgaccacaggtgatccacctgtctcggcttcccaaagtcctgggattacagacatgagccaccatgcctggcccagtctgcttgtattaaacctaacatacaaaacatcagaagttattaaagtaccctttaaatttttaaagtgaaagccatccatttaataatctgcatttcccctccctagtcaggtgtcttattttaaaggtaaattcagaaacttaatgtttcccccatagaaggtagggggagggggcatgcagggaaactagtgaaaggtaattttttgcacctaattcaaaaggaataagaagccaagaccaagtttcaagttttgtttcatttatcaactttgtagaaatctaccaaacaaaaaacaattcttaggcaagctacacttttgagccattttttaaagtggaatcctataacaagattacattcttaggtgtatttgctccttggtcctctggaatgttacatggatatggaatgtaaggttgcccaactgggctatacagtagggttgcttaatgaatgtttatcttcttaaactatcagcagtggaaagtaagtagctgcttatcttaaggtcattgctttgccctccacatcattatcttatttgaagggttgctgtaaggcattttgagttctctcagttaatttgtcccaaatttctcccctctttagccttaaacgttccaaatctttggggtttgttgcctgttcttcctcagctctgagactttacctttgccatccgttttcattccattccctgccgactgcatcttaggaaactattctctgtaagtcagagcatgtcggctttttaaaaaaccaacaccttttaagaaaaaacttccagccgggcatggtggctcacgcctgtaatcctagcactttgggaggctgaggcgggcggatcacctgaggtcgggagttcgagaccagcctgaccaacatagagaaaccccgtctctactaaaaatacaaaattagtcaggcgtagtggcacatacctgaaaccccagctactcaggaggctgaggcaggagaatggcttgaacccaggaggcggaggttgcagtgaggtgacatcgtgccactgcactcctgcctggggaacaaaagggaaaccccctctcaaaaaaaaaaagaaaagaaagaacttcctacaaacccctagggttgtaggccccttgagaattggcttaccaagcataagccagtaaaattggtactcaagtgttttccccatcttttatctcttcgtattctccctgtgcatgagtggacccctgtgtcaggtaggtggcacctacagtctagattgtgatggaagttctgtttagttgcccagtgtttccagtctcttccaaagcaagtatcttttctctccattggcatgtatgtagagtttgacataactccagaaggaattatcaaaaaggttttttggaaattacagtttagaagcctagcaagtgtttgtgatgataactgaagcagtgtatcataaatttccttgattccgtggtttggccagaatgcttgctcccctatccaaggggtggcagcagagcacacaccatactgtcctgtgtactgtctttgattagcttgtaatttattggggaaaatagcacagaagtttatgaaccagccttcaaggtagacacccaaacagaattctgatttttggatatgtaactttggctgccaatctgagagtagctatttttgatagtgggaggactggacagccagctcatctagttagaaagaaaactgttttctgggccgggtacagtggctcacacctgtaatcctagcactttgggaggccaaggcaggtggatcatgagctcaggagttccagaccagcccgaccaacatggtgaaaccacatctctactaaaaatacaaaaattagaaggtcaggcatggtggctcatgcctgtaatcccagtactttgggaggctgaggtgggcggatcacaaggtcgggagatcgagaacatcctggctaacatggtgaaaccccatctctactaaaaatacaaaaaattagctgggtgtggttgcatgcgcctgtagtctcagctcctcaggaggctgaggcagaagaattgcttgaacccaggaggcagagcttgcagtgagctgagatggcaccactgcactccagcctgggcagcagagcgagactccatctcaaaaaaaaaacaatagctgttgggcatgatggtgcatgcctgtaatcccagctactccagaggctgaggcaggagaattgcttaaacctgggaggcggaggttgcagtcagccaagatcatgccactgtactccagcctgagcaacagagcaagactccatcctggggggcagggggtaggcgggaagaaaaccattttctgcctggaaaacctgtggaattaaccactaggagaaaacttccagggcaagaggtcctgttaatgagatcccttcccaatgcaaataccgaagacactatagtacacgtttatgaaattttgctttatgaaaataagctttctaggacccaatttgagatattttcatattttaaacacctgtagttaaaagctaatatagggggtttattttcgttcccctcacagtgctgcttctgttcttactagtcacttaacacgtaagcccatttaatttgactctgtaaccagctttctgatttctttttcttgccagcttccactggactctggataggtgagattttattaaagctggcatattgggctactgtgagatgatgcactctcagtaattaggggaaagtttagatggttctggcagtctaactacaatattaaacttatataccctttaagggtatagatccaataatctataaggatctcaggaagtaactttcttacagtctcgtgaaatatcagatagaaacagtttataaagtgataacacatttcttttttttttttttttttaaacagagtctcactctgttgcccagactgaagtgagtggcgtgatctctgctcactgcaacctctgtctcccaagttcaagcgattctcctgcctcagccttcaaagtagctgggattataggcgtgtgccaccacacccagctaatttttgtatttttagtagagatggggtttcaccatcttggccaggctggtctcgaactcctgacctcaggtgatccacccgcctcggcctcccacagtgctgggattacaggtatgagctaccgcgcctggccaggtgatactgcattttttagtgtgcttcggttcatatcagatcagcctttgccttcaagatgtaagtcagctcaatttatactggtagctattgtactaaagccagcctttagatcaggtcagggcagatttgggatttctagtttcctatatgttgtagatttgattctgtttatactgctgcttgttctcataaaattattaataggccagacatggtggctcacgcctgtaatcccatcactttgggaggctgaggcaggcggatcacgaggtcaggagttcgagaccagcctggccaacatagtgaaaccttatctctactaaaaatacaaaaattagccaggcgtggtggcgcacgcctgtactcccagctacttgggaggctgaggcaggagaatcgcttgaacccaggaggtggaggctgcagcaagccaagatcgccccactgcactccagcccgggtgacagtgtgagacttcatctcaaaaaaaaaaaaaattattaatagtaagctggtttttcttaacatgataaaattagaatttattgataatttagtaaaaacacaaattactacttctcgggaaaacatgctttggcttttatgggggaaactgtcaggttgagaccaagagacattaaaagaaatatcctgggtcctattatttttagtcatgatgaatgtattttgtataccatcttcatataataaaattaacttccaaaaatgtaaaaaagaaaaaaaaagggaaaggaaggaagaaaagaaagaaagaaatatcctggccgggcacggtggctcatgcctgtaatcccagcactttgggaggccaaggcgggcggatcatgaaktcaggagatcaagaccatcctggccaacatggtgaaaccccatctctactaaaaatacaaaaattasccgggtgtgatggcktgtgcctgtattcccasctactggggaggctgaggcaggagaattgcttgaacccacgaggcagaggctacagtgagccgaratcgcgccactgcactgcagcctggtgacagaacaagactctgtctcaaaaaaaaaaaaaaaaaacggaaagaaattttttttttttttaagaagacacagtttcaytctggtttccaggctgaagtgcagtggtgtgatcacggctcactgcagcctcaacctctagggcttaggtaattctcccacctcagtctcccaagtagctgagattacaggcacataccaccatacttgcctaatttttgtagagacaggtctcactatatttttttggtttttggtttgttgttttgtgacagtctcggtctgtcacccagtctggagtgtagtggcacgatttgggctcactgcaacctccatctcccaggttcgagcgattctcgtgcctcagactcccaagtagctggaattacaggcgtgtgccaccatgcccaacttttttttttttttttgagacagagtctcactctgtcacccaagctggagtgcagtggcacgatctcggctcactgcaccgcaacctctgcctcccaggttcaagcagttttcgtgcctcagcctccagagtagctgggattacaggcatgagccaccacgcctagcacacccagcaactttttgtatttttagtagaggtgaggtttcaccatagtggctaggctggtcttgaacccctggcctcaagtgatctgcctgcctcggcctcccagagtgctgggattgcaggtgtgagccaccatgcccagccagggtctcactgcatttcacaggctggtctcaaaactcctaggcgcaagcagttctgcctcaagcctcccaaagtgctgggattaccagtgtgagccacctcgcccagcctttcccctttaaagtgcattatttcactgtttttccagagttgtgcaaccactaattttaaaatattttccttaaaaaaagaaaaacagtatttccatcaacctaaaaatccctgtaccctttaacaatcactctgcattcctccctctcctcagcccctggcaaccactaatctacctttgtctctctggaatgcctattgtgaacattttgtgtaaatggaactatacaatatgtggtgttttttttgttttgagacagtttcactctgttgtcaggctggagtgcagtggcgtggtctcggctcactgcatcccccacctcccgggttcaagcgattctcctgcctcagcctccccagtagctgggactacaggcacatgccaccacgctcggctaatttttttgttttttccttgagacggagtctagctctgtcatccaggctgcagtgcagtggctctatctcggctcattgcaacctccgcctcccgggttcaagcgattctcctgcctcaccctcctgagtagctgagattacaggcacacaccaccacgcccggctaatttttgtatttttagtagagacggggtttcaccatgttggtcaggatggtctcggtctcttgacctcgtgatccgcccaccttggccccccgaaatgctgggattacaggcgtgagccactgtgccctgtctacaatatgtgttcttttgtgacagtttttacttgatgtagtgtaagggtttttttgtttgtttgtttgtttgtttgttttgagatggagtcttgctctttcgccccaaccagactgcagtggcgctatcttggctaactgcaagctctgcctcccgggttcacaccattctcctgactcagcctcctgaatagctgagactacaggcgcctgccactgcgcccggctaattttttgtatttttagtagagatggggtttcaccatgttagccaggatgatctcgatctcctgaccttgtgatcctcctgcctcagcctcccaaaatgctgggattacaggcatgagccaccacacctggccaatgtagtgtaagttaatgcaatatgtcatttattttattgctgaatagtttttagcatatgaatgtaccacattttgattattcatttatcagttggacatatgggttgtttctttttttcgtttgttttgtttttttttttactattatgaataatgcctccatgaacattgaagcacaaatttttgtgtgttacatattttgtcagttctcttgggtatctaactaagagtagagtggttgggtcatatggtaactctgtgtttaaactcctaaggactgccagactgttttctggaagtattgtaccacttaacattcccaacagcattgaatgaagatttcgatttcttcacatgctatgtctttgtagaaatgtctcctcacaccctttgcccattttttatttgggttttttgttgatgaattatgagtttttacatattctttatattctttacataaatcttaagagataatatgatttgcatatattttctcccattctgtgggtctttttactttcctaatgctatcctttgaagtccaaaggtcggtttttgggtttttttgagaatgaaagcaagttgattagagaagtaaaaaaaaccaaaaaaacaaaaaacaagagaatggctactctgtagagcagcctaaaagtttttaattttgaaatccacttgatgtagatcatctaatattttaaatagtcgtttatccatgttgtgactaaactaagaaaaatcaggatgagaaaagaaatgaaacttacaggaatcctttttgaaaaggaatcacctagaatgaactccccaggtgattttcatctgcaaaaaattgagaactgaactactgttttggggaagtgcatgctctaaaaaattttaacttacaggctgggcgcggtggctcacgcctgtaatcccagcactttgggaggctgaggcagggggatcacctgaggccgggagttcgagaccagcctggccaacatggtgaaacccagtctctactaaaaatacaaagaaaattaactgggcctggtggcacaagcctgtaatcccagctacttgggaggctgaggcaggagaatcgcttgaacctaggaggctgaggttgcagtgaactgagatggtgccactgcactccagcctgggcaacaagagcaagactccatctaaaaaaaataaataaataagttataaatggactaagtagttgatttttaagaatttttttcgttgtaaaaaatacataacatgaagtttaccatcttaaccatttacaagtgtatagttcagcagtattaagtacattcacactgttgtgcagccagtctctaggacttttcgtcttgtaaaactaaaacaactattaaacaactgcctagttccaccttactccagttgctggcaactgcatttctactctctgtctctatgaactttaatattctaggttacctcatgtaagcagaatcatacagtatttgtccttttctgtctggcttatttttcttagcataatgtgttcaaggttcatccattttgtgtgtcagaatttccttcctttaagactgaataatatttcattgtgcacacacaccacttttttttatttgttcatccaccagtggatgtttgggttgcttccacctctaggctattgtgaataatgctgctatgaacattggtgtgtaagtccccgctctcactcttgggtatgtaattgaaagtagaatggctagatcatatggtaattaggtgttaaaaaaaaatttttttttttggaagagctaccacacttatcccacatggctgtaccattttatattcccactggcaatgcacaagggttccaatttctccacatcctcaccaacactttgtttccttccttccttttttgagacagtcttatactgttgcccaggctggagtgcagtggcaaatcatagctcactgcagtttctaactcctgggcttgagtgatattcctgcctcagcctcctgaatagctagggctacaggcctgcatcacgtgacacccagctgattatttattttttgtacagatgggggcctcattatgttgcccaggctgttctcaaactcctggactcaagtgatcctcctaccttagcctcccaaagtgctgggattacaggtgtgagccactgtgtttgctttgcatagaagtaggaattttccgatgagatatttcttgactggtagtgatgataagtgtctttggaagttgtagacaaaaaagatatgttactggcattggtgttgaaatttaaagggggcttaaaaatgggttggtaactgctcagaagggacctcccatgtggcagggccttgatggtatttacccatttcctttagattttctagtttatgtgtatggaggtgttcataagggtctctcagaatcattctacttctgtgagatcagttgtaatgtcacctttgtcatctctgactgtacttatttggatcttctgtcgttttttctttgttaatgtagacagtggtttatcaatcttgtttatgctttcaaaaaaccaacttctggttaagttgattatttccctggattttggggtcttaattttgttcagttctgctctgattttagttcttttcttttgctaggtttggaattagtttgctcttatgtttctggttttccaagtatgatattggatcattagtttgatatctttctgacattttgagatacgcatttaacaagtgccccataaacatatgaaaaaaatgctcaacatcattaatcagagaaatccaaatcaaaaccgcaatgagacaacatctcacacacatcagcattgttattattaaaaagttaaaaaaccaaaatcttccataggtcagattttggtcccgttttttagttctaaaaacttgagtttggttgggcacccagaatttatcaggctgtcagtcattcctccttttaatcaaactcaaatgcaattaatatgttgccatttaaagagaatgagtttgtgagagagagatttttttttttttttctcgagactaagtctagctctgtcgcccaggctggagtgcagtgacatgatctcggctcactgcaacctccgcctcccggattcaagtgattctcgtgcctcagccacctgaatagctgggattacaggcacttgccaccatgcccagcgaattttttttttttttaattgagacgaggtttcactctgttggccaggcttgcctcgaactcctgaccttgtgatccgcccgcctcggcctcccaaagtgctgggattataagcgtgagccatcgtgcccggccgagagagagagatttcataactgggacatttctgtgacttccacagttctcctttcccatcattagaatactaaattcttgattacaaatatgcctagactttggaaagactcattgcatcatcctgtcatggcgtctcccactcaaccaccacatttgaaggctctcccacggacagattcactaccaaattccagcctgttgacactccttatttatcatagatagcttctttctttaggaaatgaggtgtttctcaagtatctctccaagtgtattctttacataacttacctcactattcaatcaaattgagcactagattctgaacactgttcctaactctgtgtatacgttcataaacaagactaatatagtccctacattactcctttgagagtgacctgtttccataactttggggcatctccctgtagcttgcttttaccagagagaaacatgagtttacttacatgatatttaaatccctaatgagttattctttcttccacagcaatggcaccagcatgatatcattgatcattcctcccaaagaccagatttcacgagtggcaaaaatgttagcggatgagtttggaactgcatctaacattaagtcacgagtaaaccgcctttcagtcctgggagccattacatctgtacaacaaagactcaaactttataacaaaggtaatctggagtttgctccttttccttctctacacattttggttatgttttatactgtgatgctgctatggtgctttgttcactaatgttcccttaagtcggctgtcatcagtgtctctttggccttggtggttagcttttttgttttgttttgttttttgtttattgaaagttaagtaggccaggcacagtggctcatgcctgtaatcccagcactttgggaagctgaggcaggtggatcacttgaggtcaggagttcgagaccagcctggacaacatggtgtgaaaccctgtctctacaaaaaatacaaaagttagccaggcctggtggcacacacctgtagtcccatctactctggaggctgaggcgagagaatcaactggacccgggaggtgggagttgcagtgagccacgatctcgctgctgcacactagcctgagtgacagagtgaggcgttgtctcaattttttttttttttttttttttttgggatgagacagagtcttgctctgtcacccagagactgaagtgcagtaatccgatctcagctcaccacaagcctcccaggttgaagtgattcttccgtctcagcctctcgagtagctgggactacaggtgcccatcaccacgcctggctactttttgtatttttcgtagagatggggtttcaccatgttggccaggttggtcttgaattcctgacgtcaggtgatccgcctacctcggcctcccagagtgctgggattacaggcgtgagccaccaccacgtccagcctgtttactttaaagaataaatcgtactgaaacgtctcagaagaagttttaaaattagggagagagttctgcctgagagatttcaagctttttctgctttatttaaattatgacttaaaggatcaggcagggaaaataggctatgggaacattttctattaattgacgaaaaactagatatggggtaaagtagaaaaattgtttgtgttctttgcagtacctccaaatggtctggttgtatactgtggaacaattgtaacagaagaaggaaaggaaaagaaagtcaacattgactttgaacctttcaaaccaattaatacgtcattgtatttgtgtgacaacaaattccatacagaggtaagaagtcaaacccagaacattttcatcgctccagaattctttccccgtacccattagcagtcagtcccccatccctcccacttacctgtctcattctaggcaaccactatattttctttccatagatatgcttgtgctgtacttcttttatttttatttttttatttttatttttttattttttttttagacggagtctcgctctgtctcccaggctggagtgcagtggtatgatctcggctcactgcaagctccgcctcccagattcaagggattctcctgtctcagcctcctgagtagctgggattgcaggcacatgccaccacacccagctaatttttttgtatttttagtagagatggtgtttaaacacattggtcaggctggtctcagactcctgacctcgtgatccacccaccttagcctcccaaagtactaggattacaggcatgagcaaccccgcccagcctggacattttatataatggaatcatatagtttgtggccttttgtgactggcttcttttactttatacttttaaggttccatgtggtagcattcatcagtacatttcatcccttttgattaccaagtagtattccattgtatacctatatgccatatttcatattttatatagcttctcgtttcatcagttttacatttgagtggtttgcactgtttggctgttctgaataatgctgctgtgaacattcatggacaagtttctatgtgaccatacattttcatgtttcttagatttgtggaatcgtgtaggttatatagtaattatgtttaactttttaagaagttgctagactgttttccaaaccgttgtaccattttacaaagctgtctgttttcaaaaagtaaggcaatttacatttattatgacactagtcattcagcatgttttgagacagagtctcacactgtcgcccaggctagagtgcagtggtgcaatcttggcccactgcaacctccatctccatggttcaagcgattcttgtgcctcaagcctcctgaataactgggattacaggtgtgcaccaccatgcctggctaattttttgtgtttttttagtagagacagagttttgccatgttggccaggcctgtcccaaactcctggcctcaagtgatctgctcgcttcagcctcccaaagtgtgtgtgtgtgtgtgtgttttgatttttgtgggtacatagtaggtgtatatggggtacatgagatgttttgatacaggcatgcaatgtgagctatcacactatggaaaatagggtacccatttcctcaagcgtatatccattgtgttacaagcagtccagttatactctttgagttattgcactcagttttcacataacaattgtaaaatttttagtagcagaactgtaagaactcattttcccccctttcccctgaaacttttgagtgacaaagctgccataggatgaacttgaacagtggaaaggaaacctcattagagtgacctaaatcagtcaacagtagaacaatcaagaattcacagctggctccttagttcattctcttgcctttcatcaacctagggaaaaacctctacagtggaattagaactgacatttgtcgacagtttacagtggatgatttttgctaacttgatgggaagtccatttatagttggatcttggtcgactgcatagacaatccagactgtttttctcttcactaccacactctacttacagcagagggtttttcagggagcctctcagccactgaaaccacttacctgtatctggttggatgaaagccgattttgaatcttgttgatttaaacagtgccaggtacccatgttgtctggcttttgctcacttactgagttagccttgttggcttttttccaaaccttaactccttttctaagatactgtttaatcttgctaactttgtacattttagctttaactgagagggttatatcctgtttatcagggtaattatatattctaataagggatatgcctattccctgataagcagatttattaaaaacttcaatctacctaacgggtcattttgataaggctatattattaacgtgcaatattcatattcatgtcttttttctttttctttttcttttttctgagattgagttttgctctgttgcccaggctggagtgcaatggcacgatctcggctccttgcaacttccacctcccgaattcaagtgattgtcctgcctcagcctcctgagtagctgggattacaagtgtgcaccaccacgcccaactaatttttgtatttttagtagatgagatttcaccatgttggctaggctggtctgaaactcctgacctcgagtgatccacccaccttggcctctcaaagtgccattgcaggcatgagccaccacgcccggccacaatattcatgtcttaatgccaactatctagcatggtttgttaaagatggattcttagttgatccatctgctttctagtcaattattgaaggggctattttcttaaaatggaatggtaaggccaggtgttgtggctcacacctatgtaatcccagcactttgggaggccaaagaggaggatcagtttataaaaataaaatggaatgggtaacaatttcttacttccaaagagattgtcccctggcaattagagatcaactaagtgtgtagtattccgattccactgtgagaactcttatctatgtatgtcccaggactgtttcaatattttctctttgggaaggcataaagggatataaagttaacatagaaggaaggttttcctcataaaactcagaatcattagctgcaatacctttaaagacatgctggctcatgcctgtaaccccggcactttgggaggctaaggcagaaggatcatttgagtccaagacttcgaggctgcagtgagctatgatggctactgcactccagcctggccagcaaagtgagaccctgtctcaaaaaaaaaaaaaaaaggaacaagttaaagtttttttgttttttgagacaaggtctctggatcacccaggctggagtacactggcacaatcttggctcactgcaacctacacctcccagactaaagcctttccaagtagctggtagggactacaggcacgtgtcaccacagccacctaatttttgtatttttttgtagagacagtgtttcgctatgttgcccaggccagtctcaaactcctgagctcaagccatctgcctgccacagcctcccatagtgctgggattacatgtgtgagccatcatacccagcttagaactctatattataaaactgaaactgtatccattgagcaataattccttgttcccccttttttccagcccctggcaaccaccatttgactttttgtctctgattttgattactccaggaacctcatataagtggagtcatacagtatttgtccttttttgacagggttatttcacttagcatgtattcaagtttcatccctgttgtagtgtgtttcaaaattttcttcctttttgagattgagtagtattaactgctgtatgtaatattgctataaacatgggcatacagatatctttctggttttatatttacatgcccatgtcaaatgtgttgaaaagcttcacatagatatcattcgttatttccttattgggttcaaatttgtccataagagttacatgtttataactgaagtctataaattattccgtagaaggttttcccacagtgctaatagcatggtgagtggagtgaaagggcttgtatatatcctttcagagtttttttgaccttagcaaagctttgggattcaccgtgtggtacttgtgtttgcttttcaggctcttacagcactactttcagatgatagcaagtttggattcattgtaatagatggtagtggtgcactttttggcacactccaaggaaacacaagagaagtcctgcacaaattcactgtggatctcccaaagaaacacggtaatacaggaggagaacatgaacccacttactttgtgtctagcaataagaaaacagtatggtgggccgggtgcggtggctcacgcctgtaatcccagcactttgggaggccgagccgggtggatcacgaagtcagaagttcgagaccagcccggccctgtctctactaaaaatacaaaaatgtgacgggcgcctgtaatcccagctacttgtgaggctgaggcaggagaattgcttgaacccgggagacggaggttgcattgagccaagattgcgccactgcactccagtctgggcgacagagtgagactctgtctcaaaaaagagagagagagaaaacagtatgatgtgaggggagtgaatccagatgatggggagagaagcctcctgtaatgactggtgcctcattggtacttacagctcctctcttgacatagacttagtagtcgctctctgaaaacaagtagcagtttatgctgaacgtttagttaagggaatggtgatttttctttgtccttttcttagatgatgacatgattattttatttttaatttgaagacatcttgtagttcttaataattgcctttttctcttgctacttttgtgtcaaaggtagaggaggtcagtcagccttgcgttttgcccgtttaagaatggaaaagcgacataactatgttcggaaagtagcagagactgctgtgcagctgtttatttctggggacaaagtgaatgtggctggtctagttttagctggatccgctgactttaaaactgaactaagtcaatctgatatgtttgatcaggtaagtaagaagtagatgctttattatgtaagaccctaggtaggagtaggtgagtcctctgtgtgagcactggaacagacacatctttttaaaattccttgggttaaaaacttgcctctgagttaaacagcaggtttacagatgtttatcaggaaacattcccctgtgcttttctgaaccccttctcttctgaaatcaaccatttttaggtgggcttcttatggatcctgtggaggttccttgtttagttgggttgtcagaattggctgtagaatggagtttgatttcaaagaaactaaaacctgttccttattttctttttctgatttattcttggagatacatagcagcaaagctctcagcagtatgacagctgattcagcctaaagcatttaaagcacattttataacatgggctcagccataatacactttcaagatctggaggaagtagccttatggtagaaggtccaccaaagaaattgcctttaaaaaaaaaaaaaaatatatatatatatatatatatatatatatatatatattttttttttttttttttttttttttgagactgggtctggctatcttgcctaggctggagtgcagtggcaatcatggctcactgcagcctcgatctcccaggcttaagtgatcctcccagctcagcctcccaagtagctgggactacagggatgtgtcaccatgcccaactaatttttgtactttttggtagagacagggtttcaccatgttgcctaggctggtctcagaattcctggactcaagctgtctgcctctcctagcttcccaaagtgctgggattataggtgtgagccaccctccccagcccgtcttaacctctactaccttatttggcaggagccagtggtcccccctttcctccacaataacttatttttgtttgcacttaatgagttgtcctatagtaggtctaataaaatgtgtgatataattggcagtgctgttcactttaagagcagcttttgattaaattgggctccttccccatatttagacttcagtgatcataatgctgagctttgcataccattaagagttagtgggtttgagtaaaggtgttttaataatattttaaataagtaccagtaagtactaataatattttttttgtgtgttagaggttacaatcaaaagttttaaaattagttgatatatcctatggtggtgaaaatggattcaaccaagctattgagttatctactgaagtcctctccaacgtgaaattcattcaagagaagaaattaataggtatcggtgaaatgcaactacttattctgtgaaatgttttcgtgtgtgtgtgtgtgtgtgtgtgtgtgtgtatgtgtgtgtgtgtatgtacgtgattgtatgtatgagacaaggtaccaaaaatgtaaaaaggaatatttagtatttttattaactcttttgcctcagtaaaagcattattttttatcttctttagtcattaggtcgaataggtgtgtttgtatctactagggaaactttaatatatatcctgttgactgatccctaatcgtaggacgatactttgatgaaatcagccaggacacgggcaagtactgttttggcgttgaagatacactaaaggctttggaaatgggagctgtagaaattctaatagtctatgaaaatctggatataatgagatatgttcttcattgccaaggcacagaaggtatgagaattagaaaataaggttgctatttgttactgagccaggaagcctggggtggagatttgggagggatggctgatttcaggagcaatcagaaggtagatctacccattgttccccagtccttcagtctgtagcacattcctgcatagatttttctgcttgaactgtttaacgtctgcttaagattgttacatctgctgaggaccaggactatatcttgaacatctctgatgttccttatggttgaagcattgtacctagtagacactcagtgtatgctaacatgtttatggaaaaaatgttgagagattgagtccctgagcccttttctcatctaacctcatcttatggagcttacacagattagtatatgagagccaggttaacacattttttcctcctaatactacagaggagaaaattctctatctaactccagagcaagaaaaggataaatctcatttcacagacaaagaggtatgtgattattttcttggtttgatgatacgtgcaagcgtaaatccgtgtgttagagtactggctgtgtagagggtgagctttgggaaaccaaaccttatactaattgggggtgctgtgggaggtggtcatctatctgccacatacgaatctgatttcagggaaggagctgcagctttttttttttttttttttttttttttttttgagacaaggtcttgctctgttgcccaagctggagtgcagtggcatgatctcggctcgctgcaacctccacctcctgggctcaagtgatcctcttgcctcagcctctctggtagctgggactacaggcatacaccaccacgcccaactaatttttgaattttttgtagagaggcgttttcaccatgttgccctgggctggtctcaaactcctgagctcaagcaatccacttacctcggcctcccaagtggtgggattacaggtgtgagccaccatgaccggtctttttttttttttctttgagatagggtcctggtctgtcacccaggctggattcagtggcacaatcatagctcactataacctcgaacccctgggctcaggcaatccttctgcctcagtctactgagtagccaggagtacaggcacaagccctcattcccttttttttttttttttttttttgaggtggagtttgctcttgtcacccaggctggagtgcagtggtgtgatctcggctcactgcaacctccacctcccgagttcaagcaattctcctgcctcagcctcccgagtagatgggactacaggcgcccgccaccacgcctgactaatttttgtatttttagtagagactgggtttcatcatgttggccaggctggtctcgaactcctgacctcaggtgatccacctgccttagcctcccaaaatgctgggattacaggcgtgagccaccatgccaggcagcctaattttttttatagaaatggggtcttgctgtgttcaccaggctggtcttgaactcctgggcccaagtgatcctcctacattggttttccagagtggtgagattacagacgtgacccaccatgcctggcctggtttttgtttgtttgtttgtttttgtctttgtttttaagtagttaagcaatcaggaaaacatttcattatccttgaaatttaatagggaggaaaatgtaatttacataatgcctctcctgcactgtgaaacctgtgctgctttcttcacttgatcagctcttccactgcagtggcttctctggtttgctctaagtgcatcacaacagttgaaagtatgaccctcccgtatgagataggtttaaatgatagcttcctcaaattctggtttggagagctttgttctctacgaggccactcccaaaagcagtcctggaatgtctcttctgagccattgaatgggtgctgcttagagacactacaacagcctgacttctagagtcaacagtaggaatcataagctgaatacccactgagtttttgtgttggtatttcatagctgagggtagagcctgaggagaagtgttgtttgaaataatccgaatttctctgctgatatccattaggttatcaaaaccagagatgacttacagagctttacacacagacatgcctataaatgggaggatgagagtgataggtgggcaaggggctgtgagagggactaattagccttcatatatcctaatcccccatttttgtatctcatggtcatccctgtagaccggacaggaacatgagcttatcgagagcatgcccctgttggaatggtttgctaacaactataaaaaatttggagctacgttggaaattgtcacagataaatcacaagaagggtctcagtttgtgaaaggatttggtggaattggaggtgagtagcaaatcagcaaaccaaacttaaaaccagggtctcaggtcaaggtccctcctggctagccctagccctgcttccggtgaggtgcttattatctgctgggataggtgattgacgcagcaggtgcaggttcctaatttggacccatgtttattattacctctttgctttctgcaattctgcaagagaatagggcttcccttattcccttaccagccacctacacacatgcccatcccatgaacacaggtaatttaccttttggtttgtttccccaggtatcttgcggtaccgagtagatttccagggaatggaataccaaggaggagacgatgaattttttgaccttgatgactactaggtagtcgacatgggtccggcaaaacgtgcctcaccctccagcatccaacccaaggagcatacccatggtggaatccaaacagatccctgccttacaattggaacatttccagaacttaatccatgagcattggatattgaaaagaaaaccgaaacaaaaccagacccagccctacactttggtttgtcatggtgtcagcgcagcagcctacaactaagttcctaaacgccactttggactaatttaaaaaagaatcccagtttttacttttactggatggtgaaattggttgctcttgtattttatgaaaaaaaatgatttttttaaccttcatacatagaagcaaaaatactttaactgctgtaaaccttcaaaagttaatagaagtgagatcatactggtttgtttcttattttgattggagaaaaattaaattgctgcatttcgcagtgacccatttacatggcattctcagcttagactgcgtaagaagaaatatatgtggtgaaatgttggaaccatttctctcttggtctctgtttaatgttgaaagggtgagctaataggaggcactttcaacttcactccctcacgctaccccgtccccctccagactggcagtttcaaggatgcaaattgcattgcaaaatcaaactgactcatgaagcatttgggccagtgcactgtttacttccatctgtttgcagacacatttgtgcccggcgtttgggagccctttgtatcaatgttctgacaagggtccctataaccttaacctactcgaaaccggtttgggatggatatgatggggcttctgtgctattgctgggattgggagaaataaaacatgcaatttaagtggaagcgaagaaatttaaagaggattttattttgcttgggtcaatccttgttaaaagggaggtggatgtgttttccttgtgttggatggcatgagattatgtgaatgttttgatttattaaaatgaactgcaaggtttttcacaggaacgacagacatgtatgactgcatgtaattataaactcctgacctcctggtggggttggagcatctgtttcaaatgtgggacttacaagcacttctcacatgagaaattaggggcgggtgggaagggatgggacacagcttctggcaccatggatttaagaccatgttggatccaaaagttggcctgaaaccctgaagcttatgcttcacagctgggctgtaagtcagacttgaacccagctgatatgcaaggtcatggcgtgcccagggtggtgacagttgaacaaagtgtatagtacgtgcccagtggtagcgatggaaaaaagtataccaaatggactttgaaggaccaaaggttttaaaagtcaattggtatcacctccacactgactagggtagtggggtgcatttggttttcaaattgggtacttttaacactttagtgcctgactgctgttctttactgacttgattcagtcactcgtagctttattggtctgaaccagctccttgttcccaggttacagacctgcctatcgttccaataatcctgtttcacttgaatgaagggagtatgtcttaaatgtaaagtttctggttctcacactgtactctgaggtccaaatactgtctgtcaatgtgtaacctgatgtctcaaccccctgtgagaagagtccattatttggtgttcaccaacgtgggagacttcaccggaacaggcttttttgctttgggctctgctatttgtttgcagaacacccaagagcgagcaaacatgctctcttcacagcagtaccttagggttttgccattgtaaatgggtctgatgtgatatgacaagaccagagaaattggatgtaaatttacatttttgaatatgcttgttgtttcacatgatacatttagggtatgcagctccttttgtagtttttatttttactatttaagtttggaaatgatgccaaatttttgtatttctttaatcaatgtgttctcttcggtgatatatattgcattatatattgatgtgtgtatcaatatatattgatatgtattacacttacacatacaaacacatataagagggggtgaaaaccgtagcctttgcattctctatagcctctgcagagagatactaagcagcaaaatcttggtgttgtgatgtacagaaatggagaagagtattaaaccatatttaagaatatactttgtgtgcttgagattttttaggactggtctagaaaggcctgaactgtggagacagttctccaaggcatacctcagattagtcacggccaatagcatttcagccttgggtttgagttgtgtttactacatttgtctatggaaaggtatatgcaaagtttttctgaggtcatgatcccagagttatgctagaagaagaaggttcaggttgctggggccaaactaatttgtattctcccccattctatatgcatgccaaagggaatcttgcttttttttttttttaaggtatgttaagtatattatcccataacccagcatcccatggaggtagatggtgtacccaattttacaggtgatgaaacagaacaaaagaaggttaagtagcagctctttagtgataacaccaaaattttatcccaggccttattccaaagttctctctgtatctgtctttgagtcctataatagaatggtccagatggaatagcagaaactaggcctgggccctctctctctcccacgctccttcatcttacataccttacactgggtaggagagtagtagcccacccaaaagcaggtcaggggctggtccagaggagcagggctcctaggccaggttcagagcagaagaggatttgttttctttgttttcccccaaggttgaggtgcttaaagagcctctttggtagtttaggaagcctagttgaggagccaaggtggtgcatggtttgctttctccaggtttgagaaaactgttttaagtaaaattgaccagtaatggcacttggcgtacttttcacccattttcttacctgatctaggtgatagctctgacgacgaaactcaattaccagctgggaaggggcgaacatgcctgtgctggtggaagtgtaattttccctcctaatgcgtgtctaggtgctgttcttgaagacaaaattgttggaaggcagcacagtggtgcaggatatatgggctgtggtccttgcctgtctgggcctgcagcacttgccatcttttgttctctggctccaagacgcatgccatgacactcccagacaggcacggtggatttagggctgagagccaaggtggaatttaagtttcatgccagcttctcctttgttgccagcttgagtgaatgccaggggattcctgcctgccaagtccagccctgatgggactgggtctcaggggacctaggaactgaacagccaagtggtgtgggagcatccgattagagctagggaagcagggcacagttacttgcttgttttgtggcagtttgggtgctgcaagttgctgaggatgtggctgaatagcaggcactagaaataacaggtgaaaacaattcaccacctaaagggttctctgtaaatcaagtctaaaaccctgtctggtgaattctgtttcagatacagccatctccaggagtccttccctgaaactggcaggcttacctggggcttagctaagagcccagaaccaaacaagggagtcaagaaaagctctggttctgctgggcaccatggctcacgcctgtaaacccaacacttcaggaggccaaggcaggtggatcacccgaggtcaggagttcaagaccagcctgaccaacatggtgaaaccccgtctctactgaaattacaaaaactagccgaacaggtggtgggcgcctgtaatcccagctactcaggaggctgaggcacaagaattgcttgaacctgggaggcagaggttgcagtgagacgagatggcaccactgcactccagcctgggcgacagagagactgtctcgaaaaaaagaaaaaaaggctctggctctgcagttaactgggtttgtgacttcacagtatcaggcagtccctgaatctgaagtgccgtgccagccagcttcccaggaagctatcaggagagtgcagtaggaagcaggatctctgaggtctgaggtagaaatcctggcgccacctgagaggctggcaaattattccatgtctttgagtagcagtttcaccacctgtaataaggattaaatggagtaaggcacatgaaggcacttagcaaggactgggatggcagctactcatggttcttcctctcccaaccttggtcctctggaagtggccagggaaagtttgtgctggtgaccacaaggtggtggtatagagttaaggatgctgactggaagaaatttgcttcatctgaagtaggggggatttctgacaagcattaagaggtgcctgggacaacttgctttgcccttaaattttaggaaagtggagagggcagtttaacaaaggagtagggatgagtgaacggagaggagatcccaggagtctcaatccagctctgcccagttttcttactccttattctgggctttgagctatccgtctgtgaagtaactatagtcactgacatttgttgaacagttatgtaatccttagaaaaacgtagtgagggagatgctgtttatatcttcccatccacgttctactaagtggcaaaatctgggactcaaagtcaggtctgtttggttccaaagccagtgcaaatgcaggtcatccctacagagtgaaataaaacagcatgaagaagggcttcctggggggcccttggccccaagtaggtgagcaatcctggaagtgatgagaagaaggcaaagctgtacctgggaatgtcaagcccattctcagaaaggactctcagaaagagtctcattcgactctagtccttagtctacagccatacctttatatagcttttctccacaatacccaatacttagacttcttaaggaattataattttagcacctaatttttttttttttttttgagacagggtcttactctgtcacccaagctggaatgcagtggtgcagtcttggctcactacagcctcaacctcccaggatcaagcgatcctcccacctcagcctcccgagtagctgggactgcaggcacacaccaccacacctggctaatttttggttttttgttgtttttgtagagatgaggtttcgccatgttgcccagcctgggtgtttttttttttttgagatggagtcttgctctgtcacccagactggagtgcargggtgcgatctcggctcactgcaagctctgcctcccaggttcatgccattctcctgcctcagcctcctgagtagctgggaccacagacgccagccaccacgcccggctaattttttgtttttgtttttttagtagaggcagggtttcgccgtgttagccaggatggtgttgatctcccgaccttgtgatccgcccgcctcagcctcccaaagtgctgggattacaagcgtgagccactgtgcccagcctccccaggctggtcttgaattcctgagctcaagtgattggcccgcctctgtctcccaaagtgttggaattccaggtgtgtgccactgtgccgggccccttaattttagcactagaaagggtcttgcaccttacctattccaatcccctcactaaagacagaagaaagctgaggccagagaggaatatagtgacctgtcaggctcatgcagcaaattagcagagccaacatgaacacttgctccaactccagattcggtgctcttaacagccggatgatcttgttattcttcatccaggccctgttctctctaatgttataaatgagagaagggacaattggagggagcacgtggcytgaaaccaaagagctaggagaggaaagktgsccaacatccagatggagttatgaaagctgtttgaagtcacttccctgtgagtcaaggttggcttgggtgtgtggatcaacttgcttcttcagcccccggccttccaaattagccccatctagctctccctgactgccacagacttccagctcctcccactctgctgagatactatacctaggcttagccccttctgcttgcctgtccatccccactcaaagctagagggcaaacccatttccaaggaagccaggagaataaggaaggagggtggaaacttgagagaaaggctccgagcaggaatggcaaggatcttctgagaggcaaagatgcagagatattccgattcctgggagaaggcatgaggagaaatcagggcttgatgatgccaggaccctctgccccatgttgtattactgtccagacccaaagacatgcccagcctaggctctctggtggggaaaggcaacatgagccagctggggtgggcctggagggcctgcagagggggactctttgtaataaggcaggatgttgcctgggagagagttgctcctccagataaagacgaatttctgtgctcagggctagaggccctcccttgcacccctgtcgggctctgattctgaaaggtaacatggaaggagttctaccccagtctcctccagccttctccacagacgcactccacggccacctctattccttaaatgagacttgggttaagccagtctcattccttgactcagcaagcatttagacatgtcccgtgtactaggtcccgtgcaagattcagtggcaaacagtgcaggtgcacaccctgcccttcggtgttgaaggtccagcagtggagactctgaacaaggaatgacaatgagtgttaaaggacaaggggagtgcagggtggctccttcctcctctgggggtgctaggtctatgtggggacctgggttagctggagagatgagagggtgagtttggagaggcacgtggatcagtcctgactggatccaaaggccaggaagacattcagatttcaggacactgttttttcttttcttttcttttcttttcytttttctttttctttctttcttttttttttttttttttttttttttttttttttttttttttttttttttttttgagacagagtctctctgtgttgccaggctggagtgcagtggcgtgccctcggctcactgcaacctccacctcctgggttcaagtgattctcctgcctcagcctcccgagtatctgggactacaggcgtgcgccatcacacctggctaatttttgtaatttttagtagagacagggtttcaccatgttggccagaatggtctcgatctcctgacctcgtgatccgcccgccttggactcctaaagtgctgagattacaggkgtgagccaccgtgcccggctaggacactggttttttcatcctgctgtcatttctgtggattggttattaacagctttattgaggtataatttacaaactataaaattaacccactgtaggtatagtttggctatttatttttaaaagtaaatgtgtgtaggccaggcctacacgcctggcctctaatatcttgatcccggaaggtggaggctgcagtgagccaagatcccaccactgcactccagcctgggtgacagtgagactctgtctcaaaaaaaaaaaaaaaaaagtaaatttgtatagttatgtaaacatcccacaactcacaacttaatgttcagcatcccaaaaagattatttgtgctcttttgcagtcaatctctgttcccacatccaaccctgggcaactactgatcaatctacttgctttgttttttttttattttttatttttggagacagagccttgctctgtcgcccaggctggagtgcagtggcgcgatctcagctcactgaaacctccgcctcccgggttcaagcaattcttatgcctcagcctcctgagtaactaggactataggtgcctgccaccacgcccagctaattttgctatttttagtagagacgaggtttctccatgttggccaggctggtctcaaactcctggcctcatgwtatctgcccaccttggcctcccaaagtgctgggattataggcattagccaccacgcccagctgmtactgatctgctttctacctctacagttctggccttcctagaaatttttatattaatggaaaagcacaacatgtagtcttttatgtgaagcttctttcatttagataaatttttgagatacatctatcctatctttctttcttttttttttttttgagatggagtctcactctgtcacctaggctggagtgcagtggctcaataacagctcactgcagccttgatctcctgagctcaagtgattctctcgcctcagcctcccaagtagctgggattacaccaccatgtcaggctattttttgtatatatatatattttttatagagatggggtctccttatgttgctcagggtggtcttgaactcctagctctaagtgatcctcccgcctcagcctcccagtgctaggattacaggtgtgagtcaccatgcccagcctgttgcatgttcatttttattgttgagtagtatgatacaataagaaatacatatacaggtctttgctccactcctttcctggcatgcagctcctaaaacccatggaatctccagagtgatgagagtgtcttttctatgctaatatgattactgatgactgggggcccctaggtagcttcaggatggggactggtcaccagaacgaccaaaacgtgattagagagtagagcttttgggccaggcgcggtgcctcatgcctgtaatcccagcactttgggaggccaaggcgggcagatcatttgaggttaggagttcaagaccagcctgactaacatggtgaaatcctgtctctactaaaaatacaaaaaaacattagctgggcctggtggcatatgcctgtaatcccagctactcaggaggctgaggcaggagaatcgcttgaacctgggaggcagaagctgcagtgagccaagatcactccactgcattccagcctgggcaacagagctagacctgtctccaaaaaaaaaaaaaaaaaaaaaaaaaaaaaagtgcagctttcagcacctgcctcccacctccagagagcggaaaggggctggaggttgacttaatcactgatggccaatgattttatcaatcatccctatataatgagacctccataaaaccccctaaatgatggggttcaggaagcttccaggttggtgaacacattgaagtgctgggagggtagcatgcccagagaggggatgaaagctctgcacccataccttgccctatgcatctgttctgttgagttgtatcctttataataacctaccataatgtgtagatttttcctgagttctgtgagctgttctagcaaattatcaaacttgaagagggggtcatgggaaccccttacagccagttagtcagaagtacaggtggtaacttgtgactggcatctaatattggggcagtcttatggaactgaacccttaatctgtggggtctgttaacttagggtattagtgtcagaattgagttgaattgtaggacaccaagttgtgtctggagagttggagaataggttgatgtgggaacaaaactccacacatttggtgtcagaagtgttgtgggtaaaacagcacaaaagtagtattccattgtatgaatataccgcattttgtttatctcttccactggtggatatttggacggtgtccagtttttagctgtttgaataatgctgctatgaacattcacatactagtctttgtgtgaatatatgttttttgtttctcgtgggttgatactgtatatctttggagaaatgtctattcaactccttcgcccatcttgaattggtttatcttgttgagttataacagttctttatactctagataccaaacccttattagatatattatttgcaagtattttcactttcttgataatgtcttctgatgcacaaaactaattttggtgaagttcaatttatctgtttttctgttgttgccatatctgttgtttgccaaatccaaggtcatgatttacccatgttttcttctcttagagttttagcccaggcacagtggcttctgcctataatcccagcacattgataggccaaggcaggaagatggtttgaagccaggagttcaaggccagcctgggcaacatagcaagacctcaactctacaaaaaatttaaaaattagctgggtgtggtggtgcacacctgtagtcatagctgcttgggaggctgaagcaggaggattgtttgagcccatgagtttgaggttgcaataagctatgactgtgccatctcactccagcatggatgacagagcaagaccctatctattatgtgtcactggcccattttgagttagtttttgcatatggtatgaggtcaggggtctgacatcatacttttgcatgtgagtatctagttgttgtggggttgggcattgtggctcacacctgtaatcccaacacattgagagcccaaggcaaaaggatcacttgagcccaggagttcaagaccagcctggacaacatagggagaccccatctctacaaaaaagttagctggatgtggtggcactcacctgtggtcccagctactggggaggctgtcgtgggaagatcacttaagcttcggaagtcaaggctgcagtgagccatggtgctgccactgcactccagcctgagtgacagagcaagaccctgtctcaaaaaaaaaaaaaaaaaaaaaaaaaaaaaaaaaagttgtgcaagcaccattttgttgatgaaactattatttcccccatttaatgctctttgctcccttggagaaaatcagttgaccataggtatatgggattatttctgaactctgaaytctctgaattacttctgaactcagaaataatcccatatacctatggccaactgggtatggtataataatcccatatacaactgatatagatatataggtttgtatttctaactttattataccagtaccacattgttttgatttatgttacgttgtagtatgtttatttgtttgatctttttttgagacagagtctctttctgttgcccaggctggnatacagtgacaggatcatggctcactgcatactctacctactgggctcaagcaaacctccmaccttcaga

SEQ ID NO: 22978 - DNA, 1587 bp, Homo Sapiens
gccggggggaggggccggggcggtggcggctgtggccggtactggacccggcgggatgagcgaggtggaggcggcagcggtggctacagcggtccccgcggcgacggtgcccgcgacggcggcaggggtggtagcggtggtggtaccggtgcccgcaggggagccgcagaaaggcggcggggcgggcggcgggggcggagccgcctcgggccccgctgctgggaccccctcggcgccgggctcccgcacccctggcaatccggcgacggcggtctcgggaacccccgcccccccggcccggagtcaggcggacaagccggtgctggcaatccaagtcctgggcactgtcaaatggttcaacgtccggaatggttacggattcatcaacaggaatgacaccaaggaagatgtctttgttcaccagacagctattaaaagaaacaaccccaggaagtttctgcgcagcgttggagatggggagactgtggaatttgatgtcgtggaaggagagaagggcgcagaagccactaatgtaactgggcctgggggagtacccgtgaagggcagccgttatgcccccaaccgacgtaagtcccgccgattcatcccccggcctccctcagttgccccaccacccatggtggcagagatcccctcggcggggacaggacctggcagtaaaggggagcgggctgaagactctgggcaacggccccgacgatggtgccccccacccttcttctaccgacggcggtttgtgcgaggcccccggcctcccaaccagcagcagcctatagagggcactgacagggtagaacccaaagagacagccccattggaggggcaccaacagcagggagatgagcgagtccccccgcccagattccggcccaggtaccgaaggcctttccgccccaggccacgccagcagcctaccacagaaggtggggatggtgagaccaagcccagccaaggtcccgctgatggttcccggcctgagccccagcgcccacgaaaccgcccctacttccagcggagacggcagcaggcccctggcccccagcaggcccctggcccccggcagcccgcagcccctgagacctcagcccctgtcaacagtggggaccccaccaccaccatcctggagtgattccaactcaactcaaaggacacccagagctgccatctggtatctgccagtttttccaaatgacctgtaccctacccagtaccctgctccccctttcccataattcatgacatcaaaacaccagcttttcaccttttccttgagactcaggaggaccaaagcagcagccttttgctttttcttttttcttccctccccttatcaagggttgaaggaagggagccatccttactgttcagagacagcaactccctcccgtaactcaggctgagaaggaaccagccagctcttacctcctcctggttgcttttcttgcccccaccccaagtttatttttgttttcccccggccccctacctctgaagccattttatgatctgtcatgtgccacctgagcctccagtaaaaacaaaaacaggccaaaaaaaaaaaaaaaa

SEQ ID NO: 22979 - DNA, 2010 bp, Homo Sapiens
  misc_feature (354)..(354): n is a, c, g, or t
  misc_feature (998)..(998): n is a, c, g, or t
cgcgcagcagcagcagcagcagcagcagcagcagcagcagcagcagcacccgcatccgctgcgggagtccgagccggaaccacacccaagtagctgccctttcctcttctgtcatctcaccgccccaccacagaccgcgttccccgaggaaaccggccgcccacgcccggagcatcctcccctgttgagcgggcgctgacggacccggcggcatgatgcggctgcgaagctcggggatgctgcgggacctgctcctgcggtcgcccgccggcgtgagcgcgactctgcggcgggcacagcccttggtcaccctgtgccggcgtccccgaggcgggggacggccggccgcgggcncggctgccgccgcgcgactccacccgtggtggggcgggggcggctggccggcggaccccctcgcgcggggcctgtccagctctccttcggagatcttgcaggagctgggcaaggggagcacgcatccgcagcccggggtgtcgccacccgctgccccggcggcgcccggccccaaggacggccccggggagacggacgcgtttggcaacagcgagggcaaagagctggtggcctcaggtgaaaataaaataaaacagggtctgttacctagcttggaagatttgctgttctatacaattgctgaaggacaagagaaaatacctgttcataaatttattacagtaagtttttatatttttctatcttaacttaaaaaaatcaataataataaatatatacagtattattgaaatatagtcttaaaggtcgtctgacatgtagattctgactgacaatatttctcttattatgttttcaaatttttgtcatgctcatttcaaggtaatcagtgaaagaaaaagaaagaaacaatgagaaacttgtccagaaagtgggtaatagtgacactaagatgccatattcatgttcaagtgttgggtagaagtttttatatacaggaataaaatcttatagttggtataagnatatacattatttgcactatatatttacaaactcttattttttttaaaaacaggcactcaaatctacaggattgcgaacgtctgatcccaggttgaaagagtgtatggatatgttaagattaactcttcaaacaacatcagatggtgtcatgctagacaaagatctttttaaaaagtaaaagtttctgccaaacctttaatggtgatttgctatgctatacggtgattctgcttttaaaacaaaattgcatctttgaaggccactgcttcctgtgtaatggaaaaaggggatttataaacatcatttgtttgaagaacttggtacatattagtcataatacaccgggctaagagtattctttctttaaatctgttctaagcaaatttagccaccgatgtttccagtttacagtacttggagattgcattcagtttgagtagagcacatcctttgtcctgtcattgcttatattgatccccaattcatctgcatgacttgcacgctttctcagcatggtctctagttcttttccacaaggtgatttaggtgacatcataaaatgagagggcttcagacagacctgtgttcctcacatttacatacctcgattgtctgctcctctcctctcttcagacatattgatacataggcttttggctattttcattttcttcaaaacagtaaagaactaaaggcaactttggcgattaaagccttgatttggttgaatgagaatttttactttgatgttcctgtatttgcatatatttattatttatcttcattaatgtgtttctattagtttgattacttaaagattaatggacatgtgtgtaatggatcccaaagaatcaaatagtattttaaactactactatttaagtagaaactagtataaaactgtaaatactactataagacattggctttttccagacatggatccggggggttctgcatctacaagaaagtttgttatgtatggttgtatttacttttgttttatcttct

SEQ ID NO: 22980 - DNA, 5919 bp, Homo Sapiens
cccaaagttcgaaaccaacagaacgaaaagcaacgaagcacacttaaagtgaggaacccggcaagcggcgaaattcttgctgaagagaagaaaaagcgaaaggttttccgctgcaaccaatcagatgagaggattcttggcacgcccctttctatctaccaatcaacatctagctcaatggggcagtccattgccacagggaaagggcttggtgcagcttccctcacaacacacacgtcattctaggccattccacgaactgtgctcaaaagaggaaaacagtgcaacagttccaaagctgatcagtctcgtggtgagcagcgaaactatagacttctctaacaaaaccatggattctaggagggactgggaaagagaaaaacgaattctggaaggcaaactacaactcccaaaggcccttgcgcggactcagcgcgcgagggacgaagggcgggcgtggacgagccggtggctgcagcggcggcggtccccggagtcctgtgaagcgcccctgtccgcgcctctgtggggccctcagagagggctgccaggacgcgagccactgaggagccgctcagccagcgccatagcccttaggactatcggtcacattctcgcgctcctgctccggctcctccatcttggcctcggcagtggcggctgccgggaggatgtgccgccttctggcagggggaagaaggaggagaagatgaagaagcaccggcgggccttggccctggtctcctgcctctttctgtgctctctggtctggcttcccagctggcgtgtatgttgtaaagagagttcctcagcttcagcgtcatcatattactctcaagatgacaactgcgcactagaaaatgaagatgtacaattccagaaaaagaatacagagtcaaaaaagttaagtccaccggtggtggagacactccctacagttgatttgcatgaagagtcttccaatgcagttgtggacagtgaaactgttgaaaatatttccagctcatctacctcagaaatcactccaatctcaaagcttgatgaaatagaaaaatctggtactattccgatagccaaaccaagtgaaactgagcagtctgaaactgattgtgatgttggtgaggcccttgatgctagtgctccaattgaacaaccttcctttgtcagtccacctgacagccttgttggccagcatatagaaaatgtatcatcttcacatggtaaaggaaagataacaaaatcagaatttgaatcaaaagtttcagcaagtgaacagggcggtggtgatccaaaatctgcattgaatgcttcagataatttaaaaaatgagagctctgattatacaaaaccaggagacattgaccctacatcagtagcaagtcccaaagatccagaagatataccaacatttgatgaatggaagaagaaagttatggaagtagaaaaagaaaaaagtcagtcgatgcatgcatcttctaatggaggttcacatgccaccaaaaaggtccagaaaaatcgaaataattatgcctcagtagaatgtggtgccaaaattctagcagctaatccagaagccaagagcacatctgctattcttatagaaaatatggatctttacatgttgaatccttgcagcactaaaatttggtttgttattgaactttgtgaaccaattcaagtaaaacagcttgatattgcaaattatgaattattttcttctactcctaaagattttctggtttctatcagtgacagatatccaacaaataagtggattaagctgggtacttttcatggtagagatgagcggaatgtacagagtttccctttagatgaacagatgtatgcaaaatatgtcaaggttgagttgctatcacattttggatcagagcacttttgtccattaagccttataagggtatttggcactaacatggtggaagaatatgaagaaattgctgattcccagtatcactcagaacgccaggaactatttgatgaggactatgattatccactggattataatactggagaggataaatcctcaaaaaatcttcttggttctgctacaaatgccattctaaatatggtgaatattgctgctaatattctgggagcaaaaactgaagacctgacagaaggaaataaaagtatatctgagaatgccactgccacagctgcacctaaaatgcctgaatcaactcctgtttcaactcctgttccatctcctgagtatgtaaccactgaagtacacacacatgacatggagccgtcaacaccagatactccaaaagagagtcccattgtacagttagttcaagaggaggaagaggaggcaagtccatctacagtgacccttctgggcagcggtgaacaggaagatgaatcatcaccctggtttgagtcagagacacaaatattttgcagtgaactgaccacaatttgttgtatttctagtttttcagaatacatatataaatggtgttcagttagagttgctctttatcggcagcgcagccgaactgctttgagtaaaggaaaagattatcttgtgttagctcaaccacccttactacttcctgcggaatcagtagatgtttcagtattgcaacctctgagtggagaattggaaaatacgaatatagaaagggaagctgaaactgttgttctgggtgatttaagtagtagtatgcaccaggatgacttggtgaatcacactgtagatgcagttgaacttgaaccaagccattctcaaactctttctcagtctcttcttttagatattaccccagaaatcaatcccttgcctaaaatagaagtatctgagtctgttgaatatgaggcaggacatataccatcaccagtgattccccaagagagttctgttgagatcgataatgaaacagaacaaaagtctgagagctttagttctatagagaaaccatctattacctatgaaacaaataaagttaatgagttaatggataatattataaaagaagatatgaactccatgcaaattttcacaaagctgtctgaaacaatagtgccaccaataaatacagccactgtacccgacaatgaagatggggaagccaaaatgaatatagctgacacagcaaagcaaactttgatttctgttgtggattcttcttcattacctgaagtaaaagaagaagaacagtctccagaagatgcccttttgagagggttacagaggacagctacagatttttatgctgaattgcaaaattctacagatctaggatatgctaatggaaatcttgtacatggatcaaaccaaaaggagtcagtatttatgagacttaataatcgtattaaagccttagaagttaacatgtctctcagtggtcgctatctggaggagcttagccaaaggtaccgaaaacaaatggaagaaatgcaaaaggctttcaacaaaacaatcgtgaaacttcagaatacttcaagaatagcagaggagcaggatcagcggcaaactgaagccatccagttgctacaggcacagctgaccaacatgacacagcttgtttcaaatttatcagcaacagtagcagaattgaaacgggaggtttcagatcgacaaagctatcttgtcatatctttggttctttgtgttgtcttgggactgatgctttgtatgcagcgttgtcgaaatacttctcaatttgatggagattatatttcaaaacttcctaaaagtaatcagtatccaagccctaaaaggtgtttctcttcctatgatgatatgaatttgaaaagaagaacttcattcccactcatgagatccaagtctctacagttaactggcaaagaagtagacccaaatgatttgtacattgtagaacccctcaagttttctccagaaaagaagaagaagcgctgcaagtacaaaattgaaaaaattgagaccataaagcctgaagaaccattgcaccccatagccaatggcgacataaaaggaagaaagccctttacgaaccagagagatttttctaatatgggagaagtttatcactcttcttataaaggtcctccatctgaaggaagctcagaaacttcatcacagtcagaagagtcctatttttgtggcatttcagcttgcacaagtctgtgcaatggacagtctcaaaagacaaaaactgagaagagggctttaaaacgaagacgatctaaagtccaagaccaaggaaaattgataaaaactctaatacagactaagtcgggatcattgccgagcctgcatgacataatcaaaggaaacaaagagatcaccgtgggaacatttggtgttacagcagtctcgggacatatctaaaattaattgaacttttcatacagaagacttttttgttgttgttctttgaagaacagtctgtagtatttgaagggtttgggggagggagaaaatattaatgggaaaggcattcagaaattatggtttctacctttttaaaaagtagatgggattgtgctcaatcttggttaatgagctacagttttacaaagctgatcacttcctataaggacaatggtagacattttataaagatgttttttcacaagattaattactgggacaaaagtaatttggaagcccagttccttaggtgggataggaatgaaagcctaaacctcttcctttagctttgttcctatttcttgcaccttcccatatttatgtgccttttgtctatttataatgccactggaagaggagggataactttttctgttatttgatttcttttataactttgttaggtttttgaagctgcaaacactacaatgctttgagggggtctgtgcctgaagctcaggagtgtggatcagacagtctaaagatcctaaaaacttgccaactggatctttgtttagcaaactcactggaaatgaacacttaatggaatttttaagtctgttctgttaggtagatggtgatgctcttgttattttcacttattcaggctggattacttcttacttagttactaactcaatgaggaaaaaatccctacaggatctttttttgcaaacaactgatatatgcagacaaatttttgacaaattcaccttttaaacacgacgttaaccgatttgtgaaggttttctttagcttacattttaaacatacacaataaacactaatcctccaaactttcactgtttttattagtatgaatataaaatttgaaggtttggccaattagtacaagtctcatgatataatcacagcctgcatacatatgcacagatccagttagtgagtttgtcaagcttaatctaattggttaagtctaaagagattattattccttgatgtttgctttgtattggctacaaatgtgcagaggtaatacatatgtgatgtcgatgtctctgtctttttttttgtctttaaaaaataattggcagcaactgtatttgaataaaatgatttcttagtatgattgtacagtaatgaatgaaagtggaacatgtttctttttgaaagggagagaattgaccatttattgttgtgatgtttaagttataacttattgagcacttttagtagtgataactgtttttaaacttgcctaatacctttcttgggtattgtttgtaatgtgacttatttaacgccttctttgtttgtttaagttgctgctttaggttaacagcgtgttttagaagatttaaatttctttcctgtctgcacaattagctattcagagcaagagggcctgattttatagaagccccttgaaaagaggtccagatgagagcagagatacagtgagaaattatgtgatctgtgtgttgtgggaagagaattttcaatatgtaactacggagctgtagtgccattagaaactgtgaatttccaaataaatctgaacacttgtctttatt

SEQ ID NO: 22981 - DNA, 1429 bp, Homo Sapiens
gccacgaaggccggagagccggaaccggagtcgcagcggcggagacccctgtgcggtgcggagggggcggcggccccgactctgacccgcgccgggggtgggccatggcggagatcagcgacctggaccggcagatcgagcagctgcgtcgctgcgagctcatcaaggagagcgaagtcaaggccctgtgcgctaaggccagagagatcttggtagaggagagcaacgtgcagagggtggactcgccagtcacagtgtgcggcgacatccatggacaattctatgacctcaaagagctgttcagagtaggtggcgacgtccctgagaccaactacctcttcatgggggactttgtggaccgtggcttctatagcgtcgaaacgttcctcctgctgctggcacttaaggttcgctatcctgatcgcatcacactgatccggggcaaccatgagagtcgccagatcacgcaggtctatggcttctacgatgagtgcctgcgcaagtacggctcggtgactgtgtggcgctactgcactgagatctttgactacctcagcctgtcagccatcatcgatggcaagatcttctgcgtgcacgggggcctctccccctccatccagaccctggatcagattcggacaatcgaccgaaagcaagaggtgcctcatgatgggcccatgtgtgacctcctctggtctgacccagaagacaccacaggctggggcgtgagcccccgaggagccggctacctatttggcagtgacgtggtggcccagttcaacgcagccaatgacattgacatgatctgccgtgcccaccaactggtgatggaaggttacaagtggcacttcaatgagacggtgctcactgtgtggtcggcacccaactactgctaccgctgtgggaatgtggcagccatcttggagctggacgagcatctccagaaagatttcatcatctttgaggctgctccccaagagacacggggcatcccctccaagaagcccgtggccgactacttcctgtgaccccgcccggcccctgccccctccaacccttctggccctcgcaccactgtgactctgccatcttcctcagacggaggctgggcgtggggggggctgtcctggctctgctgtcccccaagagggtgcttcgagggtgaggacttctctggagaggcctggagacctagctccatgttcctcctcctctctccccacttgaaccatgaagtttccaataatttttttttctttttttccttcttttttctgtttgtttttagataaaaattttgagaaaaaaaatgaaaaaattctaataaaagaagaaaaatgaaaaaaaaaaaaaaaaaaaaaaaaaaaaaaaaaaaaaaaaaaaaaaaaaaaaaaaaaaaaaaaaaaaaaaaaaaaaaaaaaaaaaaaaa

SEQ ID NO: 22982 - DNA, 4417 bp, Homo Sapiens
ggcacgagtggcggaaaggctgcggccccgcgccagagggccggtggctcctccgggcttctgaggacccgcagggagcgggcctcatcatttctgtctcctgtttctccacttccttctctattggttggtccactgatgtatggacttgcacatgatgaactgtgaacttctagccacatgtagtgcccttgggtacttggagggagacacttaccataaggaaccagattgcttagagagcgtgaaggatctgatccgctatttgaggcatgaggatgagacacgagatgtgcggcagcagctgggggcagcccagatcctacagagcgaccttctgcccatcctcacccagcaccaccaggacaagcctctctttgatgctgttatcagactgatggtgaacttgacacaaccagccttgctctgttttggcaatctgcctaaggagcccagctttcggcaccattttttgcaggtgctaacttatttgcaggcctacaaagaggcctttgccagtgagaaggcttttggagtcctcagtgaaaccttgtatgagctgctgcagctgggctgggaggaacggcaggaggaagacaacttgctgattgaacggatcctactgctggtcagaaatattctccatgtcccagctgaccttgatcaggagaagaagattgatgatgacgccagtgcccatgaccagctcctctgggcgattcacctcagcggcctggatgacctgctcctctttctggccagctcgtctgctgaggagcaatggagcctacatgtgctagagattgtctcccttatgtttcgtgaccagaaccccgagcagctggcgggagtagggcagggacgcttagctcaggagcggagtgcagattttgcagaactggaggtattgcgccagcgagagatggcagaaaagaagactcgagccctccagcgaggcaacaggcattctcgatttgggggctcctatattgtccaggggttgaaatccattggggagagggacctcatctttcacaaaggccttcacaacctacgaaactacagttcagatttgggaaagcagccgaaaaaggtgcctaaacgtcgccaggccgcccgagagctgtccattcagcgccgttctgccctcaatgtgaggctcttcctcagagacttctgctctgagttcctggagaactgttacaaccggctcatgggatcagtaaaggatcacctgcttcgggagaaagctcagcagcatgatgagacctattatatgtgggccttggctttcttcatggccttcaaccgagctgcctccttccggccaggcctggtttctgagaccctcagtgtccgtaccttccacttcattgagcagaacctcaccaactactatgagatgatgctgactgaccgcaaggaagctgcctcctgggcacgccggatgcacttggctctgaaggcctatcaggagctgctggcaacagtgaatgagatggacttatctccagatgaggctgtgagggagagcagccgcatcatcaagaacaatattttctatgtgatggagtaccgagaactattcctggcactttttcgaaagtttgatgagagatgccagccccgctctttccttcgtgacctggtggagaccacccacctcttcctcaaaatgttggagcgattctgtcggagccgtgggaacctggtggtgcagaacaaacaaaagaagagaaggaagaagaagaagaaggtcctagaccaggccattgtttctggtaatgtcccatctagcccagaagaagtggaggctgtgtggccagccctggctgagcagctacagtgctgtgcccagaattctgagctcagcatggactccgtggttccctttgatgcggcctcagaggtgccagtggaggagcagcgggcagaagctatggtacggatccaagactgtctcctggctggccaggccccacaggccctgactctcctgaggtctgctcgggaggtgtggcctgaaggagatgtgtttggctctcaagacatttctccagaggaagagatccagttgctgaaacaaatcctctctgctccacttccccggcagcagggcccagaggaacgtggggcagaggaagaagaagaggaggaggaggaggaagaggaggagttgcaagtggtccaggtgtcggagaaagaatttaattttctggactacctgaaacgctttgcatgttcaactgtcgttcgagcctatgtgctgctactaaggagctaccagcagaatagtgcccacactaaccattgcattgtgaagatgctgcaccggctggcccatgacctcaaaatggaagccctactttttcagctgtcagtcttctgcctcttcaatcgtctgcttagtgaccctgctgctggagcctacaaagagctagtgacttttgccaaatacatcctgggcaaattttttgcactggctgcagtcaaccaaaaagcctttgtggagctgttgttctggaagaacacagctgtggttcgagagatgactgagggctatggctccctggatgacaggtcttccagtcgcagagcacctacatggagccccgaagaagaggctcatcttcaggagctgtacctcgccaataaggacgtggaagggcaggatgtggtggaagccatcttggcccacctgaatactgttcctcgaacacgcaagcagatcatccaccatctggtacagatgggactggctgacagtgtcaaggacttccaaaggaaaggaacccatattgtactgtggacgggggatcaggagttggagctgcagcggctttttgaggaattccgggactcagatgatgtcctgggtcatatcatgaagaatatcacagccaaacgctcacgggcccgaatagtggataaactcttggctctggggctggtggctgagcggcgggagctgtacaagaaacggcagaaaaagttggcatcctccatcttgccaaatggagcggagtccctgaaagatttttgccaggaagatctggaagaagaggaaaacctgcctgaggaagacagcgaagaggaagaagaagggggctcagaagcagaacaagtccagggtagcttagtcctttcaaatgaaaaccttggtcaaagcctgcatcaggaaggcttttctatcccgctcctatggctccagaactgcctgatccgagcagctgatgatcgggaagaggatggctgctcccaggccgttccattggtgccactcacagaggaaaatgaggaagccatggaaaacgaacagtttcagcagctgttgcgcaagctaggggttcggccccctgcctctgggcaggaaaccttctggcgaattccagccaagctgagtcctacccagctccggagggcagcagcttctttgagtcaaccagaggaggaacagaagctgcagccagagctgcagcctaaagtccctggagagcaaggctctgatgaggagcactgtaaagagcaccgagcacaagccctgagggccctcttgctagcccacaagaagaaagcgggcctggcatccccagaggaggaagacgctgttggtaaagagccgctgaaggcagcacccaagaaacgacaattgctggacagcgacgaggaacaggaagaagatgagggcaggaacagagcaccagagttgggagctccaggaatccaaaagaagaaacgataccagattgaggatgatgaggatgactgaagagctaagaagcctaggggtagagatagacacgtttttagatggtgcattcaagtcagagttggaagggtcatacaggacccagaagctcctcttactggacagagcagtagaatcccaggctctttcacggatttaggctgagaaacttcagcagcagtattggacttctctgctgtcagtctttgtttctcccagtttttatcggtatgccccagcagctctctggagatttagttctcttcttctaggaaccatttcttttggttattggagctccttagcaaataagaggagtgagtgaaatagagaaagcaccccggaccccttttattggtctgttcctttggctttctcttggaggtgggtcgcagcaccagatggggagctttatgacatgacaggcgggagttttgtaccacttttagaagataccagatgcctctgtcctcattttgtttcctatgatcatcctctagataccagatagaggcccattcctgcatttgagatagggttggaatatagtactctagatgatgaatgtgtttgctttgtgtttggtattaaacatgtaagattagaagttctcaaaaaaaaaaaaaaaaaaaaaaaaaaaaaaaaaaaaaaaaaaaaaaaaaaaaaaaa

SEQ ID NO: 22983 - DNA, 3264 bp, Homo Sapiens
ggtgaagaaatagggcctttccgcctgcgggcccagtgagtcgacacggtgggggcccgcgatccccggaacttaccactgaataaatccagtccagcgtgcgacgacttactggcttcatggggtcgcagccgccgctggggtctccgctgtctcgcgaggagggtgaagcgcccccgcctgctcccgcttcggagggtaggcggagaagtcgccgggtacgccttcgcggatcctgccgacaccgacctagctttctgggctgccgggagctcgcggcgagcgccccagccaggcctgcgccggcatcctccgagataatggcatcagctgctaaggaatttaaaatggacaacttttcacctaaagctggcactagcaaattgcaacagacagtaccagctgatgcatctcctgattctaagtgtcctatatgcttggatagatttgataatgtgtcttacttagatcgctgcttacataagttctgttttcgctgtgtacaggagtggtcaaaaaacaaagctgaatgcccactatgtaaacagccctttgattctattttccattctgtgagggcagaagatgacttcaaggagtatgtcctaaggccttcgtataatggttcttttgtcacccctgatcgacgatttcgctaccgtacaactctgacaagggaacgaaatgcttctgtgtattcacctagtggtcctgtgaacagaagaacaacaactccaccggatagtggagtactgtttgaagggttaggcatttcaacaagacctagagatgttgaaattcctcagtttatgagacagattgcagtaaggaggccaactacggcagatgaaagatctttgcggaaaattcaagaacaagatattattagttttagacgaactctttatcgtgctggtgctcgagttagaaatattgaagatggtggccgctacagggatatttcagctgaatttttccgtagaaatccagcttgccttcacagattagtcccctggttaaaacgtgaacttacagttctttctggagctcatggatctttagtgaatattgtccagcatattatcatgagtaatgttactcgctatgacttggagagtcaggcatttgtgtctgatttaagaccatttttacttaatcgaactgagcattttatacatgaatttatcagttttgcccgatctccttttaacatggcagcctttgaccagcatgccaattatgattgccctgctccttcatacgaagaaggcagccattctgattcttcagtcataacaatatctccagatgaggctgagacccaagagctggatattaatgtagccactgttagtcaggcaccatgggatgatgaaactccaggaccatcttactcaagctcagagcaggtacacgttactatgtcttctcttttaaatacttctgacagttcagatgaagaacttgtcacaggaggagccacgtctcagatacaaggagtacaaaccaatgacgacctaaataatgacagtgatgattcttcagataattgtgtcattgttgggtttgttaaaccactagctgagaggaccccagaacttgttgaactgtcctctgattctgaggacttaggttcttatgagaaaatggagacagtgaagacacaagaacaggagcaatcttacagttctggtgatagcgatgttagtagatgctcatctccacactctgtccttggaaaggatgaacaaataaataaaggtcattgtgattctagtacaagaatcaaatcaaagaaggaagagaaacgatctacatcattgtcatctcccagaaacctgaactcatctgtaagaggagacagagtatattctccatataaccatagacacagaaagaggggaagatcaagaagttcagattcacgttctcagagtagaagtgggcatgatcagaagaatcatagaaagcatcatgggaagaaaagaatgaaaagtaaacgatccagaagcagggaaagtagcagacctagagggagaagagacaaaaagagatcaagaactagagatagcagttggtccagaagaagccaaactctgtctctaagtagtgaaagcacaagcagatcaaggtctcgtagcagtgatcatggtaaaagaagatcacggagcagaaatagagatcgttattatttaagaaataattatggaagcagatacaaatgggagtatacttattacagtagaaacaaggacagggatgggtacgaatcatcttacaggaggaggactctgtccagagctcattattctagacagtcttcaagtccagaatttagagttcagtccttttctgaaagaacaaatgctaggaaaaaaaataatcacagtgagaggaagtattactactatgaaaggcacagatcaaggagcctgtctagtaacagatcaaggactgcatctaccgggactgaccgggtgagaaatgaaaagcctggagggaaacgaaaatacaaaacacggcatttggagggtactaacgaagtggctcagccatctcgtgaatttgcttctaaagcaaaggacagtcattaccaaaaatcttcatcaaaattggatggaaactacaaaaatgagagtgataccttttcagacagccgatcatcagacagagagacaaaacacaaaaggagaaaaaggaagacccggagcctaagtgtagagatagtttatgaaggaaaagctactgatacaactaaacaccataaaaagaaaaagaagaaacataagaagaagcataagaaacaccatggagataatgcttcacgttccccagttgtaattaccattgacagtgacagtgataaggattctgaagtaaagggggatacagaatgtgacaatagtggtcctcaagaccctctacaaaatgagtttttggctccttccttggaaccatttgaaactaaagatgtagttacaatagaagctgaatttggtgtgctggacaaggaatgtgatattgccacacttagtaacaacttgaataatgccaacaaaactgtagataatattccacctctggcagcttcagttgaacaaactctcgatgtaagagaagagagcacctttgtttctgatttggagaaccagcccagtaacattgtgtctcttcaaactgagccatcaaggcaattgccatcgccgcggacatcattaatgtcagtatgtcttggtaaagactgtgatatgtcttaaaactgcc

SEQ ID NO: 22984 - DNA, 2199 bp, Homo Sapiens
ctggtctgatcggacttctcgtcctgggacacagtttactggagtctggccggctctccgtgctcctcttggtacctcattttggggagaaccttaaacccactcgagcagataatctccgccttgaccggtgccaccaaagaagccttggaaccatgtggacttttctgggcattgccactttcacctatttttataagaagttcggggacttcatcactttggccaacagggaggtcctgttgtgcgtgctggtgttcctctcgctgggcctggtgctctcctaccgctgtcgccaccgaaacgggggtctcctcgggcgccagcagagcggctcccagttcgccctcttctcggatattctctcaggcctgcctttcattggcttcttctgggccaaatccccccctgaatcagaaaataaggagcagctcgaggccaggaggcgcagaaaaggaaccaatatttcagaaacaagcttaataggaacagctgcctgtacatcaacatcttctcagaatgacccagaagttatcatcgtgggagctggcgtgcttggctctgctttggcagctgtgctttccagagatggaagaaaggtgacagtcattgagagagacttaaaagagcctgacagaatagttggagaattcctgcagccgggtggttatcatgttctcaaagaccttggtcttggagatacagtggaaggtcttgatgcccaggttgtaaatggttacatgattcatgatcaggaaagcaaatcagaggttcagattccttaccctctgtcagaaaacaatcaagtgcagagtggaagagctttccatcacggaagattcatcatgagtctccggaaagcagctatggcagagcccaatgcaaagtttattgaaggtgttgtgttacagttattagaggaagatgatgttgtgatgggagttcagtacaaggataaagagactggagatatcaaggaactccatgctccactgactgttgttgcagatgggcttttctccaagttcaggaaaagcctggtctccaataaagtttctgtatcatctcattttgttggctttcttatgaagaatgcaccacagtttaaagcaaatcatgctgaacttattttagctaacccgagtccagttctcatctaccagatttcatccagtgaaactcgagtacttgttgacattagaggagaaatgccaaggaatttaagagaatacatggttgaaaaaatttacccacaaatacctgatcacctgaaagaaccattcttagaagccactgacaattctcatctgaggtccatgccagcaagcttccttcctccttcatcagtgaagaaacgaggtgttcttcttttgggagacgcatataatatgaggcatccacttactggtggaggaatgactgttgcttttaaagatataaaactatggagaaaactgctaaagggtatccctgacctttatgatgatgcagctattttcgaggccaaaaaatcattttactgggcaagaaaaacatctcattcctttgtcgtgaatatccttgctcaggctctttatgaattattttctgccacagatgattccctgcatcaactaagaaaagcctgttttctttatttcaaacttggtggcgaatgtgttgcgggtcctgttgggctgctttctgtattgtctcctaaccctctagttttaattggacacttctttgctgttgcaatctatgccgtgtatttttgctttaagtcagaaccttggattacaaaacctcgagcccttctcagtagtggtgctgtattgtacaaagcgtgttctgtaatatttcctctaatttactcagaaatgaagtatatggttcattaagcttaaaggggaaccatttgtgaatgaatatttggaacttaccaagtcctaagagacttttggaagaggatatatatagcatagtaccataccacttataaagtggaaactcttggaccaagattaggattaatttgtttttgaagttttttgtatataaatatgtaaatacatgctttaatttgcaatttaaaatgaaggggttaaataagttagacatttaaaagaaatgattgttaccataaattagtgctaatgctgaggagaactacagtttttcttttgaatttagtatttgagatgagttgttgggacatgc

SEQ ID NO: 22985 - DNA, 3514 bp, Homo Sapiens
gaattcgaggatccgggtaccatggggctggagtggggaccgaggccctgctcactcccctggtgggccggcttgcccgcctgctggaggccacacccacagactcttgtggctatttccgggagaccattcggcgggacatccggcaggcgcgggagcggttcagtgggccacagctgcggcaggagctggctcgcctgcagcggagactggacagcgtggagctgctgagccccgacatcatcatgaacttgctgctctcctaccgcgatgtgcaggactactcggccatcattgagctggtggagacgctgcaggccttgcccacctgtgatgtggccgagcagcataatgtctgcttccactacacttttgccctcaaccggaggaacaggcctggggaccgggcgaaggccctgtctgtgctgctgccgctggtacagcttgagggctctgtggcgcccgatctgtactgcatgtgtggccgtatctacaaggacatgttcttcagctcgggtttccaggatgctgggcaccgggagcaggcctatcactggtatcgcaaggcttttgacgtagagcccagccttcactcaggcatcaatgcagctgtgctcctcattgctgccgggcagcactttgaggattccaaagagctccggctaataggcatgaagctgggctgcctgctggcccgcaaaggctgcgtggagaagatgcagtattactgggatgtgggtttctacctgggagcccagatcctcgccaatgaccccacccaggtggtgctggctgcagagcagctgtataagctcaatgcccccatatggtacctggtgtccgtgatggagaccttcctgctctaccagcacttcaggcccacgccagagccccctggagggccaccacgccgtgcccacttctggctccacttcttgctacagtcctgccaaccattcaagacagcctgtgcccagggcgaccagtgcttggtgctggtcctggagatgaacaaggtgctgctgcctgcaaagctcgaggttcggggtactgacccagtaagcacagtgaccctgagcctgctggagcctgagacccaggacattccctccagctggaccttcccagtcgcctccatatgcggagtcagcgcctcaaagcgcgacgagcgctgctgcttcctctatgcactccccccggctcaggacgtccagctgtgcttccccagcgtagggcactgccagtggttctgcggcctgatccaggcctgggtgacgaacccggattccacggcgcccgcggaggaggcggagggcgcgggggagatgttggagtttgattatgagtacacggagacgggcgagcggctggtgctgggcaagggcacgtatggggtggtgtacgcgggccgcgatcgccacacgagggtgcgcatcgccatcaaggagatcccggagcgggacagcaggttctctcagcccctgcatgaagagatcgctcttcacagacgcctgcgccacaagaacatagtgcgctatctgggctcagctagccagggcggctaccttaagatcttcatggaggaagtgcctggaggcagcctgtcctccttgctgcggtcggtgtggggacccctgaaggacaacgagagcaccatcagtttctacacccgccagatcctgcagggacttggctacttgcacgacaaccacatcgtgcacagggacataaaaggggacaatgtgctgatcaacaccttcagtgggctgctcaagatttctgacttcggcacctccaagcggctggcaggcatcacaccttgcactgagaccttcacaggaactctgcagtatatggccccagaaatcattgaccagggcccacgcgggtatgggaaagcagctgacatctggtcactgggctgcactgtcattgagatggccacaggtcgcccccccttccacgagctcgggagcccacaggctgccatgtttcaggtgggtatgtacaaggtccatccgccaatgcccagctctctgtcggccgaggcccaagcctttctcctccgaacttttgagccagacccccgcctccgagccagcgcccagacactgctgggggaccccttcctgcagcctgggaaaaggagccgcagccccagctccccacgacatgctccacggccctcagatgccccttctgccagtcccactccttcagccaactcaaccacccagtctcagacattcccgtgccctcaggcaccctctcagcacccacccagccccccgaagcgctgcctcagttatgggggcaccagccagctccgggtgcccgaggagcctgcggccgaggagcctgcgtctccggaggagagttcggggctgagcctgctgcaccaggagagcaagcgtcgggccatgctggccgcagtattggagcaggagctgccagcgctggcggagaatctgcaccaggagcagaagcaagagcagggggcccgtctgggcagaaaccatgtggaagagctgctgcgctgcctcggggcacacatccacactcccaaccgccggcagctcgcccaggagctgcgggcgctgcaaggacggctgagggcccagggccttgggcctgcgcttctgcacagaccgctgtttgccttcccggatgcggtgaagcagatcctccgcaagcgccagatccgtccacactggatgttcgttctggactcactgctcagccgtgctgtgcgggcagccctgggtgtgctaggaccggaggtggagaaggaggcggtctcaccgaggtcagaggagctgagtaatgaaggggactcccagcagagcccaggccagcagagcccgcttccggtggagcccgagcagggccccgctcctctgatggtgcagctgagcctcttgagggcagagactgatcggctgcgcgaaatcctggcggggaaggaacgggagtaccaggccctggtgcagcgggctctacagcggctgaatgaggaagcccggacctatgtcctggccccagagcctccaactgctctttcaacggaccagggcctggtgcagtggctacaggaactgaatgtggattcaggcaccatccaaatgctgttgaaccatagcttcaccctccacactctgctcacctatgccactcgagatgacctcatctacacccgcatcaggggagggatggtatgccgcatctggagggccatcttggcacagcgagcaggatccacaccagtcacctctggaccctgagagctgaatgagggcatcataggccagacaggcccaaggatggatgaatggagaggacaaaggcagcttctgacacaccagccccaggacctggggcgactggaggaagccaggcgagtggggcccaggactggttccagtgagagaaaccaaccacaggcacccaagcactaccagacaaagcgtattaaacagaacacttttgaaaaaaaaaaaaaaaaaaaaaaaaaaaa

SEQ ID NO: 22986 - DNA, 1960 bp, Homo Sapiens
tcggcacgagcagcggccggcgggcggcggggatacttctacatagacataatcaagttttgactatttggaaaccaagcatcattaaaattctctcaaactgctaattgcgaagaatcgataacatttcaagaagtgataacatttctctgaacaagaaaagaagtgattgaccacgttttaaaagtactctggcactggtgctgtgttttcttcccctccctaaatttgaagaactatggagaaatggtacttgatgacagtagtggttttaataggactaacagtacgatggacagtgtctcttaattcttattcaggtgctggtaaaccgcctatgtttggtgattatgaagctcagagacactggcaagaaataacttttaatttaccggtcaaacaatggtattttaacagcagtgataacaatttacagtattggggattggattacccacctcttacagcttatcatagtctcctatgtgcatatgtggcaaagtttataaatccagactggattgctctccatacatcacgtggatatgagagtcaggcacataagctcttcatgcgtacaacagttttaattgctgatctgctgatttacatacctgcagtggttttgtactgttgttgcttaaaagaaatctcaactaagaaaaagattgctaatgcattatgcatcttgctgtatccaggccttattcttatagactatggacattttcaatataattctgtgagtcttggctttgctttgtggggtgttcttggaatatcttgtgactgcgacctcctagggtcactggcattttgcttagctataaattataaacagatggaactttaccacgccttgccatttttttgctttttacttggcaagtgttttaaaaaaggcctcaaaggaaaggggtttgtgttgctagttaagctagcttgtattgttgtggcttccttcgttctctgctggctgccattctttacagaaagggaacaaaccctgcaggttctaagaagactcttcccggttgatcgtggattatttgaggataaagtagccaatatttggtgcagcttcaatgtctttctgaagattaaggatattttgccacgtcacatccaattaataatgagcttttgttttacgtttttgagcctgcttcctgcatgcataaaattaatacttcagccctcttccaaaggattcaaatttacactggttagctgtgcgctatcattctttttattttctttccaagtacatgaaaaatccattctcttggtgtcactaccagtctgcttagttttaagtgaaattccttttatgtctacttggtttttacttgtgtcaacatttagtatgctacctcttctattgaaggatgaactcctaatgccctctgttgtgacaacaatggcattttttatagcttgtgtaacttccttttcaatatttgaaaagacttctgaagaagaactgcagttgaaatccttttccatttctgtgaggaaatatcttccatgttttacatttctttccagaattatacaatatttgtttcttatctcagtcatcactatggtgcttctgacgttgatgactgtcacactggatcctcctcagaaactaccggacttgttttctgtattggtgtgttttgtatcttgcttgaacttcctgttcttcttggtatactttaacattattattatgtgggattccaaaagtggaagaaatcagaagaaaatcagctagctgtattcctaaacaaattgtttcctaaacaaatgtgaaaatgtgaacagtgctgaaaggttttgtgaactttttgctatgtataaatgaaattaccattttgagaaccatggaaccacaggaaaggaaatggtgaaaagtcattgttgtctacacaaaataaatgtatatggagaccaaaaaaaaaaaaaaaaaaaa

SEQ ID NO: 22987 - DNA, 328 bp, Homo Sapiens
tccatcctcactgtctgcatctgtaggagacagagtcaccatcacttgtcgggcgagtcagggcattagcaattatttagcctggtttcagcagaaaccagggaaagcccctaagtccctgatctatgctgcatccactttgcaaagtggggtcccatcaaagttcagcggcagtggatctgggacggatttcactctcaccatcagcagcctgcagcctgaagattttgcaacttattactgccaacagtataatagttacccgatcaccttcggccaagggacacgactggagattaaacgaactgtgctgcacctcttatgcatc

SEQ ID NO: 22988 - DNA, 3346 bp, Homo Sapiens
ggcacgagctggctcgcgcgtgccttttcccctcaggttgtggggagagcggaatcctgctccgccgtcgcagcagcagcggcagccccggcagcctcgggcgacagcggcggcgcgcgagcccccgggcggaccgtaccaccgctcgccagcacgcagggggagccgcccgtctcgccgcgcacgcctcggcgaccccgcggggctgaggcgtcgccgcgcccggcagcgtgagcgcagagccggcctcgaccccgagctcggagccccgcgggccgcgcccgccgccggccccacccatccgggtcgaggaggccgaggccatggctgagacggaggagcggagcctggacaacttctttgccaagagggacaagaagaagaagaaggagcggagcaaccgggcggcgagtgccgcgggcgcagcgggcagcgccggcggaagcagtggagccgcgggtgcggcgggcggcggggcgggcgcggggacccggccgggtgacggcgggaccgccagcgcgggggctgcgggcccaggggccgccaccaaggctgtgacgaaggacgaagatgaatggaaagaattggagcaaaaagaggttgattacagcggcctcagggttcaggcaatgcaaataagcagtgaaaaggaagaagacgataatgaaaagagacaagatccaggtgataactgggaagaaggtggaggtggtggtggaggtatggaaaaatcttcaggtccctggaataaaacagctccagtacaagcacctcctgctccagtaattgttacagaaaccccagaaccagcgatgactagtggtgtgtataggcctcctggggccaggttaaccacaacaaggaaaacaccacaaggaccaccagaaatctacagtgatacacagttcccatccctgcagtcaactgccaagcatgtagaaagccggaaggataaagaaatggagaagagctttgaagtagtaagacacaaaaatagaggtagggatgaggtttcaaaaaaccaggcccttaaacttcagctagacaaccaatatgctgtgcttgaaaatcagaaaagcagccactcacaatacaattaaggaatgggctttgctaacccttctgaggtaactagactgcagctaaccaccaccaacagccattcatcatctgatctctgctggatctacagacaccgatgcagaccactcgatttcatgaccggccctattgcactatggaagttaaagtgtcacgactgctctatgcatattggatttaggggaattttcattgttacataaatgtgtgaactagtttcaacagtgttctttcatatttactctgcaaatacaaaaaaccaaaacctgcagccagtggtcatttcaaaatctttttatgttcagatactgagccttcataagggttgactacctcagatttgctgcactcattgtggacttcatgtggatcacaacttctggataagaagattacaactattaagtgtcgatgtgaaccttgcaaccagctctactggattcttatcagaaatcctgcataaaaagtcagccatctgggttctgatctgctgtaaaagatgaagatttaagtgaccttaattaacctgtcctgtgccctacccttaaggaatactctctgtagtaggctgttgttatattagacttcctggaacacaccgctgaaaagaactgatgtgttcagatcatctgtgtagggctgtgatttgtaatttaaactaattgtattctgaggtaaccacaaaataaattcaaccaaactggggtccaccaagtgggggaaggggaagggagagaataatcttgggggtttttttttttggtaatttttttatttggatagtgcttttttgttttgtttttgttctgcattaaggccttttttgctttgacttgaaataagttctttgacagagcatattgcttggttaattaagtaacctaaagtatgcattaggattgtgaaatgtctcgtgagtatgccaatcctgagggtggaaccaaatagcctttgatgaaaagggcagtggattctggaggctctacttcaggtgctgctataatgcctcatctaatcaggactaaattgtgtaggaaactgcagtgggaagaatatgctttctgctcaggctaagagggtcactgatctgtccttagaaattcagagtaacatgagcaaaacctcagctaaaacccatttaagtggcatggattgtgcatgatctttgataagaattcctcatgtacttgtgcctagtttttcaaggtattggctgttctatagatgcagtgattgtcccagctagctctgttaccagccttttggtgtgtctttatgttcatttggagagtcagggcgaaagacaggtgatgtagcacttctgtttttaataattattgcttaaaatacctattaatagttttgggtcatttaaagggacttgaggaagctacccaggattacagaagagtgtccacctaacaagatggtctggcagtttcctagttttgtatctggttcaatagaaatatgtgaaagtggtaatgtcatcatttgatgcagagtccgggtttctctataataaatccctttgccaaatgcatgagttgcagacttgctactggcaagagtgaagcaagtgggtgagtaaaactattttgacgtgggagcgttttcagataggagtttagtcttgacgaaagtgtccgtgcaggaattggactccgaggagggttacagtatctcctgacgggacctgccactcgcatctgggcaatgttgacatttgaggtggcaggcaggatgcctgccttctaatatatttgggtgagtaactgagccagccaagggaaggttgaatgattaaatcagaaatgggattcttggtaaactgaagacttttatttgggaatgaaaaaccttaaaaaaatctcttcatcgttgaactgtgcattttccctgcattttttcccaacaaaattttgttgggggttatgttactgaagaatgaacagatgagtaagtggaggtgttatgtaaaggcatattgtactcgaaatctgaagacctgcagcagatttaaattacaactcttgttataactttttaaaagattgtgaaaatatcaaaatataaatgaatcaagttttaatatactgtatgatgggtggatgaggctgtccattgtaccatttgtttgaattctcaggcatggtttggcagtgcaagaattctgtaacattaacaaattcaataaaaagtaaatatatggaaaaaaaaaaaaaaaaaaaaaaaaaaaaaaaaa

SEQ ID NO: 22989 - DNA, 4068 bp, Homo Sapiens
ttagaggtcctttctgctttataacattaggttcttcttgtgaggccttaagcatttgctaaacaggttcaagtaagtttagtaaagtttcattactgccattgattcaattatcaaactgcttttgtacatataaagaattcttcagatgcatggtttctattaacaagatccaatgccttccttttatttccccttcagttcaacatctaatatataaagattgctctgactactacgcaataggcaaaagaagcagtgagacctacagagttacacctgatcccaaaaatagtagctttgaagtttactgtgacatggagaccatggggggaggctggacagtgctgcaggcacgtctcgatgggagcaccaacttcaccagaacatggcaagactacaaagcaggctttggaaacctcagaagggaattttggctggggaacgataaaattcatcttctgaccaagagtaaggaaatgattctgagaatagatcttgaagactttaatggtgtcgaactatatgccttgtatgatcagttttatgtggctaatgagtttctcaaatatcgtttacacgttggtaactataatggcacagctggagatgcattacgtttcaacaaacattacaaccacgatctgaagtttttcaccactccagataaagacaatgatcgatatccttctgggaactgtgggctgtactacagttcaggctggtggtttgatgcatgtctttctgcaaacttaaatggcaaatattatcaccaaaaatacagaggtgtccgtaatgggattttctggggtacctggcctggtgtaagtgaggcacaccctggtggctacaagtcctccttcaaagaggctaagatgatgatcagacccaagcactttaagccataaatcactctgttcattcctccaggtattcgttatctaatagggcaattaattccttcagcactttagaatatgccttgtttcatatttttcatagctaaaaaatgatgtctgacggctaggttcttatgctacacagcatttgaaataaagctgaaaaacaatgcattttaaaggagtcctttgttgttatgctgttatccaatgaacacttgcaagcaattagcaatattgagaattatacattagatttacaattcttttaatttctattgaaactttttctattgcttgtattacttgctgtatttaaaaaataattgttggctgggtgtggtagctcacgcctgtaatcccagcactttggaatgtcaaggcaggcagatcacttgaggtcaggagtttgagaccagcctggccaaacatgtgaaacgctgtctctattaaaaatacaaaaattagccgggcatggtggtacatgcctgtaatcctagctacttgggaggctgaggcaggagaatcgcttgaacctgagaggaagaggttgcagtgagccaagactgagccactgcactccagcatgggtgacagagaaaactctgtctcaaacaaaaaaataataaaatttattcagtaggctggattctacacaaagtaatctgtatttgggccatgatttaagcacatctgaaggtatatcactcttttcaggctataattatttgggtaatcttcattctgagacaaacttaatctatatcatttactttgcaacagaacaaccctacagcattttggttcccagactaagggaactaatatctatataattaaacttgttcatttatcattcatgaaatataaaatacttgtcatttaaaccgtttaaaaatgtggtagcataatgtcaccccaaaaagcattcagaaagcaatgtaactgtgaagaccagggtttaaaggtaattcatttatagtttataactccttagatgtttgatgttgaaaactgctttaacatgaaaattatcttcctctgctctgtgtgaacaatagcttttaatttaagattgctcactactgtactagactactggtaggtttttttggggggggtgggtagggatatgtgggtaatgaagcatttacttacaggctatcatactctgaggccaattttatctccaaagcaataatatcattaagtgattcacttcatagaaggctaagtttctctaggacagatagaaaacatgaattttgaaatatatagaacagtagttaaaatactatatatttcaaccctggctggtagattgcttattttactatcagaaactaaaagatagatttttacccaaacagaagtatctgtaatttttataattcatcaattctggaatgctatatataatatttaaaagactttttaaatgtgtttaatttcatcatcgtaaaaagggatcatctcagagagaacagcagtattctgcgtatttttaaaaatgctctagagtaacatttgaagtaattcactgtagtgtatgccagtcctagaaataatttttttaatttctggtgtctgtttctaatacactaaccaagttttcaaaatatatttacaaagatgcatctttacccattattttaaaatgattaaggaggatagttgcttcaggtaacaagctaatttttcaaatattaggcccttacagaactatttagtcaaaaagtaagatattcctttaaaatatataacccaaagctttcagttaaacatgatatatcacaaatactattaaaatgttaaagagaaatgcaaatagcattaaatgatgaccaaaatgtaaaatattgtagatttcaaaagctgtgtctctattaggtgggataccaaatgtaaatgatgtaactgacgttgttttttactttttactttttaaaaaagactaaaaacgttttgatattatacaatgtatttgtttcagataaggtcattgtcatttagtatatataattaatatatgtacaagtttaagtaaattcctgtgagtaaaaatggacttatcacaaaacatagttctaaagaaaggtatatgctcatatacacggtgtccattaatttaatgggaactaggtataacttcaggagaatttggcaaataattcattaatccatgtaaatattcaaaagcttgttctatccacattatttcaagggatcactttatttttcattatactttcacagcacttttctagtaaattctgtaacacagaaattccattttggaatcatttcatgttaccaataattctagacttttataacatttaacatgttgatggaaatagattacatctgctagaaccttttgccttaactattcaccaatatatgctaatattcataaatatggattgactgtttacaaacattagaatcttgtcttggttccattttgatggctaatatttgttatcttaattaagactatttctgaggtcatgattacttgaaaatattgactaaaactgggtccttagaaattccaggtggagctgatttacctatgactgaggggaaaaaaaaatcaaattttactgataatagtaatgctccaaatgaattaatgacacatctgttcaataaataaagagcttaaatatacaaaacataagaaatctgggcaacaaaacttgtggtctttacttttgaatagctacccaagaaaaggttttaaaggtaaaagttatgagtaatgtcatcacaataagctcttgtttaaaattcttttcttttatgtataattaggtttatgtttcatgtctttttaaaaccttataaaagatttaattatcacatctattcttcaatgtggaaatattaaatattgttggttgtaaaataatatttatgtacttacttgtgtctgaaaagttgtaaaatgcttacctcagctatacaatatctgtgactctgaagactttaatgagtactatttcattaacaagaagtcagaggcaaatagaggaacaccattatcttacttccctctagaatactgttgaaacatttgaaatacaaaagtttcagtttcattttgtggcattcaacttcctctcctctttttccgttattagtgttgctgctctggttagcc

SEQ ID NO: 22990 - DNA, 4365 bp, Homo Sapiens
atggccccagtgcagctggagaaccaccagctggtcccgcccggaggcggcggcgggggcagcggcggacccccgtcagccccagcccctcctcccccgggagccgccgtggcggcggccgctgcagctgcggctagcccgggctaccggctgagcaccctcattgaatttctgctgcaccgggcctactcggagcttatggtgttgacggacctactgccaaggaaatctgatgtggaaaggaaaatagaaatagtgcagtttgctagccggacacgccaactcttcgttcgattattagctttagtgaaatgggctaataatgctggcaaagtggaaaaatgtgcgatgatttcaagctttttagatcagcaagccatcctgtttgtggacactgctgatcgcctggcctcgttagctagagatgctctggtccatgcacgcctgcctagttttgccatcccatatgccattgatgtactaactactggatcttacccacggctgccaacctgcattagggataaaattattcctccagacccaattaccaaaattgaaaaacaagccacactccatcagctgaatcagattcttagacatcggcttgtaaccacagatcttcctcctcagttagcaaatcttacagttgcaaatggccgggtgaagtttcgtgttgaaggagaatttgaagccaccttgactgtgatgggagatgaccctgatgttccatggcgtcttctcaagctagaaattctagttgaggataaggaaacaggagatgggcgagctttggttcatagcatgcaaatcagcttcatccatcaactggtgcagtctaggctctttgctgatgagaaacctcttcaggatatgtacaactgcctacattctttctgtttatcacttcagttagaagtgttacattcccaaactctaatgttaatccgagaacggtggggagaccttgtgcaggtggaaaggtatcatgctggaaagtgcctctccctttcagtttggaatcaacaggttcttgggagaaaaactggaacagcatctgttcacaaagttacaattaaaattgatgagaatgatgtctccaagcctttacagatttttcacgatcctcctttgccagcttctgattccaaattagtagaaagagccatgaagatcgaccacttatcaatagaaaaactcctgattgacagtgtccatgcaagagctcatcagaagctccaagaactgaaggccattcttagaggcttcaatgccaatgaaaactcttccatagagactgcactcccagctcttgttgttcccatcttggagccctgtggtaattcagagtgtctgcacatttttgtagatttacattctggaatgtttcaattgatgctttatggacttgaccaggccactctggatgacatggagaagtctgtgaatgatgatatgaaacgaatcataccctggattcagcaacttaagttttggcttggacaacagcgttgcaagcagtctataaaacatctgcctacgataagcagtgaaacattgcagctttccaattactcaactcatcctattggaaacctttctaagaataaactgttcattaaacttacccgccttccacaatactacattgttgtggagatgttggaggttcccaataaacccacacaactgtcgtacaagtactactttatgtctgtgaatgctgcagatcgtgaagacagccctgcaatggcattgctgctgcagcagttcaaggaaaacattcaggacttggtttttcgtacaaaaaccgggaaacagaccagaaccaatgccaagcgcaagttgtctgatgatccatgtccagtagaatccaagaaaacaaaacgagcaggagaaatgtgtgccttcaataaagttttagcccacttcgtcgctatgtgtgatacaaatatgccatttgtaggacttcggttggagttgtccaatctggagattccacatcaaggagtgcaagtggaaggtgatggcttcagccatgcaattcgcttattaaaaattcctccctgtaagggtataactgaggaaacccaaaaggctctggaccgctctcttcttgattgcactttccgattacaaggtagaaataaccgcacttgggtagcagagttagtgtttgcaaattgtccacttaatggcacttctactagggagcaaggaccatcccggcacgtttacctgacatatgaaaatctgttgtctgagcctgttggtggtagaaaggtggttgaaatgtttcttaatgactggaatagcattgcacgattatatgagtgtgtgttggaatttgcacgttctctaccagacatacctgctcatctaaatattttctcagaagttcgtgtttataattaccgaaaacttatcttgtgttatggaaccaccaagggaagctcaattagtatccaatggaattcgatccatcaaaaattccacatttctttgggaactgttggcccaaactcaggttgcagtaactgtcacaataccattctccatcagcttcaagaaatgttcaacaaaacaccaaatgtggttcagttattacaggtactgtttgatactcaggctccattaaatgccatcaacaaactccccactgtgccgatgttgggcttgacccagagaaccaatactgcctaccagtgcttctccattctgccacagtcgtccacccacatcagactggccttcaggaacatgtattgcattgatatatactgccggagtcgaggtgttgtggcaatacgggatggtgcctatagtctttttgataacagcaaactagttgaaggtttctatcctgcaccaggactaaagacgttcctgaatatgtttgttgacagcaatcaggatgctcgaagaaggtctgtaaatgaggacgataatcccccttctcctataggaggagatatgatggattctttaatatcgcagctccagccaccaccccagcaacagccatttccaaagcagccaggaacatcaggtgcttatcctcttacttcaccccctacatcttatcatagcacagtcaatcagtctccctcaatgatgcacacacagtctccaggaaatctgcatgctgccagctcccccagtggggctttgagagccccatcaccagcgtcatttgttccaactcctcccccatcctcgcatggaatctcaataggaccaggggccagttttgctagtccacatggaactcttgaccctagttccccatacactatggtgtcaccaagtggacgagcagggaactggccaggatctcctcaagtgtctggcccctcaccagcagcacgcatgcctggaatgtcaccagccaacccctcactacattctccggttccagatgcttctcattcccctcgagctggaacaagttctcaaacaatgccaacaaacatgcctccacctcgtaaactacctcagcgctcttgggcggcatccatacctaccatcctcactcacagtgccttgaacattttactgctgccctctccaactccaggccttgtgcccggcctggcaggtagttacctttgttctccacttgagagattccttggatcagtcatcatgagacgacatcttcaaagaattattcaacaagaaacgctgcagctgataaattctaatgaacccggagtgatcatgtttaagactgatgcactgaaatgcagagtagctcttagtcccaaaaccaaccaaacgcttcagctaaaattgacacctgaaaatgcaggacagtggaaacctgatgaacttcaagttttggagaaattctttgaaacaagagttgcaggaccaccatttaaagctaatacgttaatagccttcaccaagctattaggagctcctacacacatcctcagggattgtgtgcacattatgaagctggagctgttccctgaccaagcaacacagctaaaatggaatgttcagttttgcctgacgatccctcccagcgcgccgccgattgcacctcctgggacgcctgctgtggtgctgaaatccaaaatgctattttttcttcaactaactcagaaaacatcggtccctccccaagaacctgttagtattatagttccaatcatttatgacatggcttcaggtacaacccagcaggcagacattcccagacagcagaactcttctgttgctgctcccatgatggtcagcaacattctgaagaggtttgcagagatgaatccaccacgacaaggtgaatgcacaatatttgcagctgttcgtgatttaatggctaatcttacactgccccctgttgggcgtccatag

SEQ ID NO: 22991 - DNA, 4307 bp, Homo Sapiens
gcgacgctcacgaacgatcagagctgcgggcgacgcaacgaagcccggaggccgcaggctgcgcgctccctcgcagcagccgggcgggcaaaagcccccagtcctcggcccccgcgcaagcgacgccgggaaatgcccacatccgggaaacctgcagcggagtgcggcggcggcgacactgagtggaaggcaaaatggcggcggcggcggcggtggcctggtgttaaggggagagccaggtccttacgacccctgggacgggccgcgctggcccgcggcagcccccccgttcgtctccccgctctgccccaccagggatacttggggttgctgggacggactctggccgcctcagcgtccgccctcaggcccgtggccgctgtccaggagctctgctctcccctccagagttaattatttatattgtaaagaattttaacagtcctggggacttccttgaaggatcattttcacttttgctcagaagaaagctctggatctatcaaataaagaagtccttcgtgtgggctacatatatagatgttttcatgaagaggagtgaaaagccagaaggatatagacaaatgaggcctaagacctttcctgccagtaactatactgtcagtagccggcaaatgttacaagaaattcgggaatcccttaggaatttatctaaaccatctgatgctgctaaggctgagcataacatgagtaaaatgtcaaccgaagatcctcgacaagtcagaaatccacccaaatttgggacgcatcataaagccttgcaggaaattcgaaactctctgcttccatttgcaaatgaaacaaattcttctcggagtacttcagaagttaatccacaaatgcttcaagacttgcaagctgctggatttgatgaggatatggttatacaagctcttcagaaaactaacaacagaagtatagaagcagcaattgaattcattagtaaaatgagttaccaagatcctcgacgagagcagatggctgcagcagctgccagacctattaatgccagcatgaaaccagggaatgtgcagcaatcagttaaccgcaaacagagctggaaaggttctaaagaatccttagttcctcagaggcatggcccgccactaggagaaagtgtggcctatcattctgagagtcccaactcacagacagatgtaggaagacctttgtctggatctggtatatcagcatttgttcaagctcaccctagcaacggacagagagtgaaccccccaccaccacctcaagtaaggagtgttactcctccaccacctccaagaggccagactccccctccaagaggtacaactccacctcccccttcatgggaaccaaactctcaaacaaagcgctattctggaaacatggaatacgtaatctcccgaatctctcctgtcccacctggggcatggcaagagggctatcctccaccacctctcaacacttcccccatgaatcctcctaatcaaggacagagaggcattagttctgttcctgttggcagacaaccaatcatcatgcagagttctagcaaatttaactttccatcagggagacctggaatgcagaatggtactggacaaactgatttcatgatacaccaaaatgttgtccctgctggcactgtgaatcggcagccaccacctccatatcctctgacagcagctaatggacaaagcccttctgctttacaaacagggggatctgctgctccttcgtcatatacaaatggaagtattcctcagtctatgatggtgccaaacagaaatagtcataacatggaactatataacattagtgtacctggactgcaaacaaattggcctcagtcatcttctgctccagcccagtcatccccgagcagtgggcatgaaatccctacatggcaacctaacataccagtgaggtcaaattcttttaataacccattaggaaatagagcaagtcactctgctaattctcagccttctgctacaacagtcactgcaattacaccagctcctattcaacagcctgtgaaaagtatgcgtgtattaaaaccagagctacagactgctttagcacctacacacccttcttggataccacagccaattcaaactgttcaacccagtccttttcctgagggaaccgcttcaaatgtgactgtgatgccacctgttgctgaagctccaaactatcaaggaccaccaccaccctacccaaaacatctgctgcaccaaaacccatctgttcctccatacgagtcaatcagtaagcctagcaaagaggatcagccaagcttgcccaaggaagatgagagtgaaaagagttatgaaaatgttgatagtggggataaagaaaagaaacagattacaacttcacctattactgttaggaaaaacaagaaagatgaagagcgaagggaatctcgtattcaaagttattctcctcaagcatttaaattctttatggagcaacatgtagaaaatgtactcaaatctcatcagcagcgtctacatcgtaaaaaacaattagagaatgaaatgatgcgggttggattatctcaagatgcccaggatcaaatgagaaagatgctttgccaaaaagaatctaattacatccgtcttaaaagggctaaaatggacaagtctatgtttgtgaagataaagacactaggaataggagcatttggtgaagtctgtctagcaagaaaagtagatactaaggctttgtatgcaacaaaaactcttcgaaagaaagatgttcttcttcgaaatcaagtcgctcatgttaaggctgagagagatatcctggctgaagctgacaatgaatgggtagttcgtctatattattcattccaagataaggacaatttatactttgtaatggactacattcctgggggtgatatgatgagcctattaattagaatgggcatctttccagaaagtctggcacgattctacatagcagaacttacctgtgcagttgaaagtgttcataaaatgggttttattcatagagatattaaacctgataatattttgattgatcgtgatggtcatattaaattgactgactttggcctctgcactggcttcagatggacacacgattctaagtactatcagagtggtgaccatccacggcaagatagcatggatttcagtaatgaatggggggatccctcaagctgtcgatgtggagacagactgaagccattagagcggagagctgcacgccagcaccagcgatgtctagcacattctttggttgggactcccaattatattgcacctgaagtgttgctacgaacaggatacacacagttgtgtgattggtggagtgttggtgttattctttttgaaatgttggtgggacaacctcctttcttggcacaaacaccattagaaacacaaatgaaggttatcaactggcaaacatctcttcacattccaccacaagctaaactcagtcctgaagcttctgatcttattattaaactttgccgaggacccgaagatcgcttaggcaagaatggtgctgatgaaataaaagctcatccattttttaaaacaattgacttctccagtgacctgagacagcagtctgcttcatacattcctaaaatcacacacccaacagatacatcaaattttgatcctgttgatcctgataaattatggagtgatgataacgaggaagaaaatgtaaatgacactctcaatggatggtataaaaatggaaagcatcctgaacatgcattctatgaatttaccttccgaaggttttttgatgacaatggctacccatataattatccgaagcctattgaatatgaatacattaattcacaaggctcagagcagcagtcggatgaagatgatcaaaacacaggctcagagattaaaaatcgcgatctagtatatgtttaacacactagtaaataaatgtaatgaggatttgtaaaagggcctgaaatgcgaggtgttttgaggttctgagagtaaaattatgcaaatatgacagagctatatatgtgtgctctgtgtacaatattttattttcctaaattatgggaaatccttttaaaatgttaatttattccagccgtttaaatcagtatttagaaaaaaattgttataaggaaagtaaattatgaactgaatattatagtcagttcttggtacttaaagtacttaaaataagtagtgctttgtttaaaaggagaaacctggtatctatttgtatatatgctaaataattttaaaatacaagagtttttgaaatttttttctaga

SEQ ID NO: 22992 - DNA, 5176 bp, Homo Sapiens
gaattcggcacgagacggtttcctccagaggtctccgcccctctgcccctatattcccagagctcgagtctgatccgggccttgccgggcaccctggaaaggcgggggtgatagtacagatggagacgcaactgcagagcattttcgaagaggtggtgaaaacggaagttatagaagaggcttttcctggcatgtttatggatactcctgaagatgagaaaacaaaactaattagctgtttgggggccttcagacagttttggggtggtctttctcaggagtctcatgaacagtgtatccagtggattgttaagtttattcatggtcagcatagtcctaaaagaatttcttttctttatgactgcttagcaatggcagttgagactggtctccttccacccaggctggtttgtgaatccctgataaactctgacactcttgagtgggaaagaacacagctttgggccttaacatttaaactggttcggaaaataattgggggagtggataacaagggtgttcgagatctcttaaaagtgattttggagaagattttgacaattcctaatacagtgagctctgctgttgtacagcagcttctggcagcaagagaggttatagcatatatcttggaaagaaatgcctgcttattaccagcctattttgcagtcactgagatcaggaaactgtatcctgaaggcaaacttccacactggttacttggaaacctagtatcagactttgtggataccttcaggcccacagcaaggataaactccatttgtggtcgctgtagtcttctgccagttgtaaataattcgggtgccatttgtaattcatggaaactggatcctgctactcttcgttttcctttgaaaggccttttgccatatgataaggatctgtttgaaccacagactgctttgttgagatatgtattggagcagccttattccagggatatggtctgcaatatgctaggtttaaataagcagcacaagcagcgctgccctgtgctggaggaccagttggtggatctggttgtttatgccatggagcgatctgagaccgaggagaagtttgacgatgggggaacaagccaactcctgtggcagcatctctcaagtcagctcattttctttgtgcttttccagtttgcaagttttccacatatggtgctttctcttcatcagaagttagcagggcgaggactgattaaaggcagagatcatcttatgtgggttctcctgcaattcatttctggaagtattcagaaaaatgcactagctgattttctccctgtgatgaagctcttcgacttgctatacccagaaaaagaatatatcccagttcctgatattaacaaaccccagtcaacccatgcctttgcaatgacctgtatttggattcatctcaatagaaaagctcaaaatgacaactccaagctacagattccaatacctcattccctaagacttcaccatgagttcctgcagcagagtctaagaaataaaagtttacagatgaatgactataagattgctctattgtgtaatgcatactctacaaattcagaatgttttacattacccatgggagctctggtagaaactatttatggaaatggaattatgaggatacctctccctggaacaaactgtatggcttcaggatctattacccccttacctatgaacctcctggattcactgacagttcatgccaaaatgagccttattcacagcattgcaaccagggtgataaaacttgctcatgcaaagtccagtgtggccttggctccagccctagtggaaacttacagtcgtttattggtctatatggaaatagagtctttgggcatcaaaggatttatcagtcagcttttgccaactgttttcaaatcacatgcatgggggatcttacacacactccttgagatgtttagctaccggatgcatcatattcagcctcattacagagttcagctcctgagtcatcttcatactttggctgcagttgcacaaacaaaccagaaccagctccatctttgtgtcgagagcactgctctcaggcttataacagcattaggtagctcagaggtacaaccgcagtttacacgcttccttagtgatcccaaaacagtgctctcagcagaatctgaagaactgaaccgagccttgatattgaccttggctagagcaactcatgtaacagatttttttacaggctctgattcaattcagggaacttggtgtaaagacatacttcagaccatcatgagtttcactcctcataattgggcttcacacaccctgagctgttttccaggcccactacaggcattcttcaaacaaaataatgtgcctcaggaaagccgttttaatctgaaaaaaaatgtggaggaggagtataggaagtggaagtcaatgagcaacgaaaacgacattattacccacttctctatgcagggctcccctcctctctttctttgtcttctctggaaaatgctcttggaaacagatcatattaatcagattggctatagagtattagagagaattggagccagggccttggtagcccatgtgaggacatttgcagatttcctggtatatgagttttctacatcagcagggggtcagcaactcaataaatgcattgaaattcttaatgacatggtatggaagtataacattgttacactggacagattaattctctgcctggccatgcgtagtcacgaaggaaatgaagcccaggtttgttatttcataattcagttgctgttactcaaaccaaacgattttagaaatcgagtaagtgactttgtgaaggaaaattccccagagcactggttacagaatgactggcacaccaagcacatgaattatcacaagaaatatccagagaagttgtattttgagggcctcgcggaacaggtggatcctccctgtacagatccagtctcctatctgcccatctattttgggaatgtgtgtcttcgattccttccagtatttgatatagtaatccacagatttttagagttgcttccggtatccaaatcactggagactctactggatcatctaggaggcttatataaatttcatgatcgtccagtgacttatctgtataacactctgcactattatgaaatgcacctgagagaccgcgcatttctcaaacgaaaactcgtccatgcgatcattggctctctgaaggataatcgaccgcagggctggtgtctaagtgacacttacctgaaatgcgctatgaatgcacgagaggaaaatccttgggttccagatgacacctactattgcagattgattggcagactagtcgatacgatggctggcaaatctcctggtccctttccaaactgtgactggagattcaatgagtttcccaacccagctgcccatgctctccatgttacttgtgtggagctcatggccttggcagtttcaggcaaagaagttgggaatgcccttctaaatgttgtcctaaaaagtcagcctttagtgccaagagagaacattacagcatggatgaatgcaattggtttgatcatcactgccctaccagagccatattggattgttcttcatgatcgaattgtgagtgtcatcagcagccccagcttgacgtctgaaacagagtgggttggctatccattccgcctctttgatttcactgcctgtcatcagtcgtactctgagatgagttgtagctatacgttagctcttgcacatgctgtgtggcaccattctagcatcggacaactttctctcattccaaagtttcttactgaagtacttcttcctatagtgaagaccgaattccagttgctttatgtataccatcttgttggaccatttttacaaagatttcagcaagagagaactcgttgtatgatagagattggtgtggcgttttatgacatgctgctgaatgttgaccagtgtagcacccatttaaattacatggatcccatctgtgacttcctctatcacatgaagtatatgtttactggtgacagcgtgaaagagcaagtagagaagattatctgtaacttaaaaccagctttaaaacttcgtcttcgattcatcacacacattagcaagatggagccagctgcagtgcctccacaagccatgaacagtgggtctccagcacctcagtctaatcaggtgcccgtgtctttaccagtaactcagtgaaagccagactgtactgtggagaaagtagaaatatatccgtctttgagagtggactcaaaccttttaaatctgaatgcgatcacactgtagtgatatagtagaagcagtgatgatattcagattgttttattttgattcaaatgatgaatctgttgacaccttataactcccatctccctatctatatttttgtctctaagagatcaagtaagatacatgttgttcatattcataacaacttattagagctatgtaggaacatagaggtatctgtgatcaaatgacttgtcattggcactttcagtctttcctattctagccgttgtttttgtttgtattttttattattaatgacatatttagtcttcagatatattattttaaaggcaccacacatgtaaaacagttattacaaatattttatacataaatctcttggtagattttcagaataatagagatttatatcaagaaaaggaatctagattttgttgcattgtaggagcaaacaaggcttcatattctttttaaaatgacttgaaattttattataaatttccatagtttctatcaaggtcaactggcagttttattacctttgctatggacttgaacttactgtataaaattagttggaagccatgtaagaaaataacatctgaaaattcttgaacttaaaatcatgcttaaatggttgattctccaatttctttttttaaaaataagttaattgcttttgcaggttgacactctcacctgacagatgatgtaattcttcaatttttataatcttaaaatttttaaattttatatttgtaaatacagtacacattttatttcttggattttgagagacattgttaattttgggggaattggcattgcgaaagacttgaaaactaatgagtaaagtctgctgaatgaataaaaaaaaaaaaaaaaaactcgag

SEQ ID NO: 22993 - DNA, 1968 bp, Homo Sapiens
cgcagggccacagcagctcagccgccggtgccccctcggaaaccatgacccccggcgcgggcccatggagccatggcctatagggtcctgggccgcgcggggccacctcagccgcggagggcgcgcaggctgctcttcgccttcacgctctcgctctcctgcacttacctgtgttacagcttcctgtgctgctgcgacgacctgggtcggagccgcctcctcggcgcgcctcgctgcctccgcggccccagcgcgggcggccagaaacttctccagaagtcccgcccctgtgatccctccgggccgacgcccagcgagcccagcgctcccagcgcgcccgccgccgccgtgcccgcccctcgcctctccggttccaaccactccggctcacccaagctgggtaccaagcggttgccccaagccctcattgtgggcgtgaagaaggggggcacccgggccgtgctggagtttatccgagtacacccggacgtgcgggccttgggcacggaaccccacttctttgacaggaactacggccgcgggctggattggtacaggagcctgatgcccaggaccctcgagagccagatcacgctggagaagacgcccagctactttgtcactcaagaggctcctcgacgcatcttcaacatgtcccgagacaccaagctgatcgtggttgtgcggaaccctgtgacccgtgccatctctgattacacgcagacactctccaagaagcccgacatcccgacctttgagggcctctccttccgcaaccgcaccctgggcctggtggacgtgtcatggaacgccatccgcatcggcatgtacgtgctgcacctggagagctggctgcagtacttcccgctagctcagattcacttcgtcagtggcgagcgactcatcactgacccggccggcgagatggggcgagtccaggacttcctgggcattaagagattcatcacggacaagcacttctatttcaacaagaccaaaggattcccttgcttgaaaaaaacagaatcgagcctcctgcctcgatgcttgggcaaatcaaaagggagaactcatgtacagattgatcctgaagtgatagaccagctccgagaattttatagaccgtataatatcaaattttatgaaaccgttgggcaggacttcaggtgggaataagcccacgaaaggaaagggctctcaagggctcttctgctcatctcttccgtgagatttgctcccagaccctctgatctccctccaacaaaccctggctccagccccctttcccaacttgagttgcatcatcttggaaccaggaagcccagctaaagccaagagaccagagagtccctgccactagttttcatcagtctgttcaagcaaagttgatctgctcctggcacgtccagtaaattccagaatcattctcctttctgcccataaagggccttggagaattgctttaagaagagtgaatgttccaatgatgatagatattataagcgatgatggttctgttgctatgaacacagcagtcggtccctgtcattgtccacccaggagtggccttgttaattccaagtggcatgtatcttccctctgagcttcatttcttcaagatgctctgggtggtgggatgggagaccatcctcagccctcctcagaccttatcaattcattgagagattgcaaagctgaaagcacctccggccactcctgggagacagaccctttggtgatgaaataaaccagtgacttcagagcctatggtctcaactgtgcttgaaaaacactgtctctgaaaacaactttgtgattctccctgctccctgtggacaaaagcacataattctgctgttacgggtactttgctcatacgagctttcatgttcagcatgcaatggaatcatgcttgtccatgtgaaataaatatggctctctcgtgtccttaaaaaaaaaaaaaaaaaa

SEQ ID NO: 22994 - DNA, 2546 bp, Homo Sapiens
cagcggcggcccaggaggcagccggtgagcgcctgcgagcagagtggcgggggccgctgacaggtcccgcgcagcccagcccagcccagccacgcggctcacaggtggggtccaagagcagtttggagcaacccggcgctacggagaggggtggacggctctgcacgggcctcctgtctcccgctcgggcagagggactcggggggacctcgctccttggccgagagaacctgaactcgggcggagagaacgcgcccaggcgggcaaggggaccagagaaagccggggctggaagtcactgtcgctcgccactgtctggagcgcacggagcgcagaggcccggcagccgcgcgtgccctcccggggaccgagccagtgatgcaggatcgctgagcggagatccgcgccgagaagtctctcggggccggggctgagacgcacgccttcgacaccgctgccaagaccccgattccggcgactcttgcggggaaccgaggggccaaggctgccccaagctcaggacttgggcgagtctaagacgatggtttcttaagcacggacccgcgttccccttcccgccccctcgactggaggcagggatcctgcgcggggcccccgggattccgtttccccgcggagccccggccgctgcctcccgggacagttcgcacggccacaggggcgcacggcgatgtggcctccgtccagcgcgctggcccgccggggggatgctctggcacctgtcggggtccaggcctagcatggccggcgcgttgcccgacgtcgcctccggctaggatggcccctccgggcccggccagtgccctctccacctcggccgagccgctgtcccgcagcatcttccggaagttcttgctgatgctctgctccctgctcacgtccctttacgtcttctactgcctggccgagcgctgccagaccctgtccggccccgtcgtggggctgtccggcggcggcgaggaggcgggggcccctggtggcggcgtcctggccggaggcccgagggagctggcggtgtggccggcggcggcacagagaaagcgcctcctgcaactgccgcagtggcggaggcgccggccgcccgcgccccgcgacgacggcgaggaggcggcctgggaagaagagtcccctggcctgtcagggggtccgggcggctccggggccggaagcaccgtggccgaggccccgccggggaccctggcgctgctcctggacgaaggcagcaagcagctgccgcaggccatcatcatcggagtgaagaagggcggcacgcgggcgctgctggagttcctgcgcgtgcaccccgacgtgcgcgccgtgggcgccgagccccacttcttcgaccgcagctacgacaagggcctcgcctggtaccgggacctgatgcccagaaccctggacgggcagatcaccatggagaagacgcccagttacttcgtcacgcgggaggcccccgcgcgcatctcggccatgtccaaggacaccaagctcatcgtggtggtgcgggacccggtgaccagggccatctcggactacacgcagacgctgtccaagcggcccgacatccccaccttcgagagcttgacgttcaaaaacaggacagcgggcctcatcgacacgtcgtggagcgccatccagatcggcatctacgccaagcacctggagcactggctgcgccacttccccatccgccagatgctcttcgtgagcggcgagcggctcatcagcgacccggccggggagctgggccgcgtgcaagacttcctgggcctcaagaggatcatcacggacaagcacttctacttcaacaagaccaagggcttcccctgcctgaagaaggcggagggcagcagccggccccattgcctgggcaagaccaagggcaggacccatcctgagatcgaccgcgaggtggtgcgcaggctgcgcgagttctaccggcctttcaacctcaagttctaccagatgaccgggcacgactttggctgggatggataaccatataatttaaaaagaaaaaaaaaatcaaaatataatatatttttttaccaatcggtagagaagagacagtttaatatttgtgctgaaaatatgtttcagtatttttttcaatgaatgttaagagattgttctcactcccgccccatcttaatgtataaccaacaccaaacacgtggatcaacagaaaaggaaaatttcactcgtctaaacactttcaattttcagtttttattttatgttctatatacccagtcataaagtataagcatcagttgtcattaaaagttttcagaaaatcttgaggttaaacatctctctctctttttttaaaatacaaggccctgataaaattgatatctatccttatatttttctccctttttcccgtgccactttttcttaaattatttcccagttagtattatcatatgtttgtacccgtcacagttttcatagtgctttcaaatacacctttttgatcattaaaataaaaaaataaatcttggaaaaaaaaaaaaaaaaaa

SEQ ID NO: 22995 - DNA, 3819 bp, Homo Sapiens
atggtggccgcagcggcggcaactgaggcaaggctgaggaggaggacggcggcgacggcagcgctcgcgggcaggagcggcgggccgcactgggactgggacgtgaccagggctgggaggccggggctgggggccgggctgcgcctcccgcggctgctgtctccaccgctgcggccacggctgctgctgctgctgttgttgctcccgccgccgctgttgctgctgctgctgccctgtgaggccgaggccgcggcggcggcggcggcggtgtcgggctcagccgcagccgaggccaaggaatgtgaccggccctgtgtcaacggcggtcgctgcaaccctggcaccggccagtgcgtctgccccgccggctgggtgggcgagcaatgccagcactgcgggggccgcttcagactaactggatcttctgggtttgtgacagatggacctggaaattataaatacaaaacgaagtgcacgtggctcattgaaggacagccaaatagaataatgagacttcgtttcaatcattttgctacagagtgtagttgggaccatttatatgtttatgatggggactcaatttatgcaccgctagttgctgcatttagtggcctcattgttcctgagagagatggcaatgagactgtccctgaggttgttgccacatcaggttatgccttgctgcatttttttagtgatgctgcttataatttgactggatttaatattacttacagttttgatatgtgtccaaataactgctcaggccgaggagagtgtaagatcagtaatagcagcgaaactgttgaatgtgaatgttctgaaaactggaaaggtgaagcatgtgacattcctcactgtacagacaactgtggttttcctcatcgaggcatctgcaattcaagtgatgtcagaggatgctcctgcttctcagactggcagggtcctggatgttcagttcctgtaccagctaaccagtcattttggactcgagaggaatattctaacttaaagctccccagagcatctcataaagctgtggtcaatggaaacattatgtgggttgttggaggatatatgttcaaccactcagattataacatggttctagcgtatgaccttgcttctagggagtggcttccactaaaccgttctgtgaacaatgtggttgttagatatggtcattctttggcattatacaaggataaaatttacatgtatggaggaaaaattgatccaactgggaatgtgaccaatgagttgagagtttttcacattcataatgagtcatgggtgttgttgacccctaaggcaaaggagcagtatgcagtggttgggcactctgcacacattgttacactgaagaatggccgagtggtcatgctggtcatctttggtcactgccctctctatggatatataagcaatgtgcaggaatatgatttggataagaacacatggagtatattacacacccagggtgcccttgtgcaagggggttacggccatagcagtgtttacgaccataggaccagggccctatacgttcatggtggctacaaggctttcagtgccaataagtaccggcttgcagatgatctctaccgatatgatgtggatacccagatgtggaccattcttaaggacagccgatttttccgttacttgcacacagctgtgatagtgagtggaaccatgctggtgtttgggggaaacacacacaatgacacatctatgagccatggcgccaaatgcttctcttcagatttcatggcctatgacattgcctgtgaccgctggtcagtgcttcccagacctgatctccaccatgatgtcaacagatttggccattcagcagtcttacacaacagcaccatgtatgtgttcggtggtttcaatagtctcctcctcagcgacatcctggtattcacctcggaacagtgtgatgcgcatcggagtgaagccgcttgtttagcagcaggacctggtattcggtgtgtgtggaacacagggtcgtctcagtgtatctcgtgggcgctggcaactgatgaacaagaagaaaagttaaaatcagaatgtttttccaaaagaactcttgaccatgacagatgtgaccagcacacagattgttacagctgtacagccaacaccaatgactgccactggtgcaatgaccattgtgtccccaggaaccacagctgctcagaaggccagatctccatttttaggtatgagaattgccccaaggataaccccatgtactactgtaacaagaagaccagctgcaggagctgtgccctggaccagaactgccagtgggagccccggaatcaggagtgcattgccctgcccgaaaatatctgtggcattggctggcatttggttggaaactcatgtttgaaaattactactgccaaggagaattatgacaatgctaaattgttctgtaggaaccacaatgcccttttggcttctcttacaacccagaagaaggtagaatttgtccttaagcagctgcgaataatgcagtcatctcagagcatgtccaagctcaccttaaccccatgggtcggccttcggaagatcaatgtgtcctactggtgctgggaagatatgtccccatttacaaatagtttactacagtggatgccgtctgagcccagtgatgctggattctgtggaattttatcagaacccagtactcggggactgaaggctgcaacctgcatcaacccactcaatggtagtgtctgtgaaaggcctgcaaaccacagtgctaagcagtgccggacaccatgtgccttgaggacagcatgtggagattgcaccagcggcagctctgagtgcatgtggtgcagcaacatgaagcagtgtgtggactccaatgcctatgtggcctccttcccttttggccagtgtatggaatggtatacgatgagcacctgcccccctgaaaattgttcaggctactgtacctgtagtcattgcttggagcaaccaggctgtggctggtgtactgatcccagcaatactggcaaagggaaatgcatagagggttcctataaaggaccagtgaagatgccttcgcaagcccctacaggaaatttctatccacagcccctgctcaattccagcatgtgtctagaggacagcagatacaactggtctttcattcactgtccagcttgccaatgcaacggccacagtaaatgcatcaatcagagcatctgtgagaagtgtgagaacctgaccacaggcaagcactgcgagacctgcatatctggcttctacggtgatcccaccaatggagggaaatgtcagccatgcaagtgcaatgggcacgcgtctctgtgcaacaccaacacgggcaagtgcttctgcaccaccaagggcgtcaagggggacgagtgccagctatgtgaggtagaaaatcgataccaaggaaaccctctcagaggaacatgttattatactcttcttattgactatcagttcacctttagtctatcccaggaagatgatcgctattacacagctatcaattttgtggctactcctgacgaacaaaacagggatttggacatgttcatcaatgcctccaagaatttcaacctcaacatcacctgggctgccagtttctcagctggaacccaggctggagaagagatgcctgttgtttcaaaaaccaacattaaggagtacaaagatagtttctctaatgagaagtttgattttcgcaaccacccaaatatcactttctttgtttatgtcagtaatttcacctggcccatcaaaattcaggtgcaaactgaacaatga

SEQ ID NO: 22996 - DNA, 4339 bp, Homo Sapiens
tgagcttttcctcataacatcagaatggcaagcaggcgaaaatcaacaacaccttgcatggtccttgccagtgaacaagatccagaccttgagttgatatcagatttggatgaaggtcctcctgtgcttacacctgtagaaaacaccagagcagagagtatctcaagtgatgaagaggttcatgaatctgtggattcagacaatcagcaaaataaaaaagttgaaggtggatatgaatgtaaatattgtacttttcaaactccagatctaaatatgtttacttttcatgtggattcggaacatcccaatgtagtgctaaattcatcctatgtttgtgtcgaatgcaattttcttaccaaaaggtatgatgcactttctgagcataatctgaaatatcacccaggagaagagaattttaagttgactatggtgaaacgtaataaccagacaatctttgaacaaacaataaatgatctgacttttgatggtagttttgttaaagaggagaatgcagagcaagcagaatctacagaagtttcttcttcgggaatatctatcagtaaaactcctatcatgaaaatgatgaaaaataaagtggaaaataaacggattgcagttcatcataactcagttgaggacgttcctgaagagaaagagaatgaaatcaaaccagaccgtgaagaaattgtagaaaatccaagttcttcagcttctgaatctaatacaagtacttccattgtaaacagaatacatccaagtactgccagcacggtagtgacaccagcagcagttcttcctggattggcacaggtgataactgctgtatctgctcagcagaattctaatttgattcccaaagtcttaatccctgttaatagcattcccacctacaatgctgcattggataacaatccccttttacttaacacctacaacaagttcccttacccaacaatgtcagaaattacagttctttctgctcaagcaaaatatacagaggaacagatcaagatatggttttcagcccaacgtttaaaacatggtgttagttggactcccgaggaagtagaggaggcaagaaggaaacaattcaatggaacagtgcatactgtacctcagaccataactgttattcctacacacatttccacagggagtaatggtttaccatctattttacagacatgccaaatagttggtcagcctggtctggtccttactcaagtggctggaacaaacaccttgccagttacagcacctatagccttgacagtggcaggcgttccaagtcaaaataatatacagaaaagtcaggtacctgctgctcagcctactgcagaaacaaagccagcaacagcagcagttccaacttctcaaagtgtcaaacatgaaactgcattggtaaaccctgattcatttggcattcgggcaaaaaagacaaaagagcaactggcagaattaaaagttagctaccttaaaaatcagtttccccatgattcagaaattatcagacttatgaaaataacaggcctgacgaaaggagagattaaaaaatggtttagtgacacaaggtacaaccagagaaattcaaagagtaatcagtgcttacatctcaacaatgattcctctaccaccattattatagactccagtgatgaaaccacggaatccccaactgttggtactgcacagcctaagcaatcctggaatccttttcctgactttactccccaaaagtttaaagagaaaactgcagagcagcttcgtgtccttcaggcaagttttctcaacagctctgtacttacagatgaagaattaaataggttaagggcacaaaccaaacttaccagaagagaaatcgatgcttggtttacagagaagaagaaatcaaaagctttaaaggaagagaaaatggaaatagatgaaagtaatgcaggtagttccaaagaagaagctggagaaacttctcctgcagatgaatctggtgcacctaagtcagggagtacaggcaagatatgtaaaaaaacacctgagcagctgcacatgcttaagagtgcatttgtccggacacagtggccatcaccagaagagtatgacaagttggccaaagaaagcgggcttgctagaacagacatagttagttggtttggggacacccgttatgcttggaagaatggaaacttgaaatggtactactactatcagagcgccaattcaagtagtatgaatggtctgtcttcccttaggaaaagagggagagggagacccaaaggacggggaagaggaagaccgcgtgggcggcctagaggaagcaaaagaattaacaactgggacaggggaccatcactcataaaatttaaaactggaactgcaatacttaaggattattacctgaagcacaagtttcttaatgagcaagaccttgatgaacttgttaacaaatcacatatgggctatgagcaggtcagagagtggtttgcagaaagacagagaagatcagaattaggtatagaattatttgaggaaaatgaggaggaagatgaagttattgatgaccaggaagaggatgaagaagaaacagatgatagtgacacttgggaacctccacgacatgtgaaacggaagctgtctaaatcagatgactgaaatctgcctaaaacgttgaaggagaatcaattcttcaactcaagatgtctgatttactgtgaatttgcccaatctttgatgacattgaaaacgttttggggcatacacactcaaaaagcaggatccaatacccaaaagaaatggaacttaatgttgtgccaaagttaaactactgcagttggtggaagttctgcaatgtaaatagaacactaattaaaaaacaacttgtaaaaatgcaatttaaattttaatacagtacatttttcttctaatatgatggagacattctgaatcttagactttctgagggggtttaatgaccactagagcttgtcctcatattcagtccagtttaatactgtatgtctagtaagatgggctatatattgcctctattctttgagatgtgattaagcttagaactttgaccaaaaattttacagtaaaaattgttagaaatgggtaaaaaaaaaaaaaaaaaaaaaccctgatttattactatgtcttatttatcagaccctgcactaagattaaaagttgtgcatgggcttatacaatttcaaatgtaaaaacagcctatttatatatgttgaaacaataagattttatggtttcactggcccttaataattggatccttcattaaacacatccatgaataccactgtttctactgttacttgttccattagaagctgatttgctttttattaaactgcaggaaattaattctgaagaaggaaaagaaactgacatggtaatttggatagggtgaagctttgaaataaatactgcaccaaaaatgtgaaaaagaatcacgtagtaaatgtatacttagtgttttcttacaatcgtggaaatcagaaatgtttatacaggtgtcagatcagaatttttaagagttatctttcagtgaaattttataacagtttcagtgaatagagaaaaaattctgaactgatcataatgagttaaaagttagcttttcacttatgaatcatgggagtgttaactgttaactcttgccgtatcaggagactgaaagttcatactaatttacaaactttgtaaagactggtgctgttcattcatattgggaagaccctttcttttgtgaccataggaccatttttcaaaatgcgctttcttcgtagaagaaatgttcagtttaattagctttggattttaacatgtttttctgaatgaccagatgtaggcttagccagtttattttctctaatttaatggataataaatattaagctcttggttaaatgtttttcagccattgaaaatgttatgaaaaagccttgaatatgcatgctgctttcatttttataaactttttattttttaactatagctttattagtaattccaaaatgctgcaatgtagctgatttcctcactcagacagctggctttgtgggtggcttttttcatactactgttaacttttttaaaaaagaagcaatgtaaagaccgtaatgcactaagctttttttttttcttttacacgtttaaaaacttcttaaagcactctgtaatataatgattaaattgctcccttttataaacaaaaaaaaaaaaaaaaaaaaaaaaaaaaaaaaaaaaaaaaaaaaaaaaaaaaaaaaaaaaaaaaaaaaaaaaaaaaaaaaaaaaaaaaaaaaaaaaaaaaaaaaaaaaaaaaaaa

SEQ ID NO: 22997 - DNA, 2060 bp, Homo Sapiens
gagagagttggttggtgttgggccggaggaaagcgggaagactcatcggagcgtgtggatttgagccgccgcattttttaaccctagatctcgaaatgcatcgtgattcctgtccattggactgtaaggtttatgtaggcaatcttggaaacaatggcaacaagacggaattggaacgggcttttggctactatggaccactccgaagtgtgtgggttgctagaaacccacccggctttgcttttgttgaatttgaagatccccgagatgcagctgatgcagtccgagagctagatggaagaacactatgtggctgccgtgtaagagtggaactgtcgaatggtgaaaaaagaagtagaaatcgtggcccacctccctcttggggtcgtcgccctcgagatgattatcgtaggaggagtcctccacctcgtcgcagatctccaagaaggagaagcttctctcgcagccggagcaggtccctttctagagataggagaagagagagatcgctgtctcgggagagaaatcacaagccgtcccgatccttctctaggtctcgtagtcgatctaggtcaaatgaaaggaaatagaagacagtttgcaagagaagtggtgtacaggaaattacttcatttgacaggagtatgtacagaaaattcaagttttgtttgagacttcataagcttggtgcatttttaagatgttttagctgttcaaatctgtttgtctcttgaaacagtgacacaaaggtgtaattctctatggtttgaaatggatcatacgaggcatgtaataccaagaattgttactttacaatgttcccttaagcaaaattgaatttgctttgaacttttagttatgcacagactgataataaacctctaaacctgcccagcggaagtgtgtttttttttaaatttaaatacagaaacaactggcaaaaatgaactaagatttacttttttttccatagctgggatataggctgcagctatagttgaacaagcagtctttaaaaactgctgtgaaacacaggccatcagggaaaacgaaatgctgcactattaaattagaggtttttgaaaaatccaactctcatcctgggcagaggttgcctagttggtatagaatgttaagtttcaagaaagtttacctttgctttaggtcataagttccttatttgattgctgtatatggatacatggctgttcgtgacattctttatgtgcaaatttgtgatttcaaaaatgtcctgccagtttaagggtacattgtagagccgaactttgagttactgtgcaagatttttttttcatgctgtcatttgtaatatgttttgtgagaatccttgggattaaagttttggttacaaattgttctttaacttgaaagcctgtttttccttgcaaactcaaatctgtgagcttggtaccaagtccaggtataacattcctattggaagccatacttatattttcttgtaaagtgcttttgaattaataaaatattagcataattgtgtatagtcagttgaacccactgttaccattgttcttatcccatgggaagcagttggttacacgattcttattttataagaaacagctgagaggcactatggattagtcttctgaagtgaaggaaatatagatgtcacctaagtgatagttaacccattttttttttttttaggcatagaagccagttcagggtccataatatttagtgaccaacattttaaagtatagcagcaacctggttcttaaacacaaagtaagttgcccattaacaaatggcttttatctttagcatgaaaactttccacaggtctaaaaattgcttccattttataatttgaggtgttgcatgggaattctaagctgatccatcatgatgtaaaagttcacaatatggttcaaatgtaacagtgcagaattgaatatggaggcatgcataaccttcctcttagaaaatggcaggtgttgtaatttcaaatttttgtgcaattagattaaatcataatgcaacagtcaaaaaaaaaaaaaaaaaaaaaaaaaaaa

SEQ ID NO: 22998 - DNA, 5747 bp, Homo Sapiens
cgccgccgcccggggaccggcatgaggaccgccgcggggggacgtctgcggcccgcgtcggcgctggggacaaagaagccatgcagtgacacccgctaagacttgttggtagccatgtcggagccccacagggtccagttcacctctctcccaggttccctgaatcctgcgtttttgaagaagtcccggaaggaggaggctggggcaggagaacagcatcaggactgtgagccggctgcagcagctgttcggattacactcaccctctttgaaccagatcacaaacgctgcccagagttcttctacccagagctggtgaagaatatccgagggaaggtaaaaggccttcagcctggagataagaagaaagatctgtcagatcctttcaatgacgaagaaaaggaaaggcataaagtagaggcccttgcccgaaaatttgaagaaaaatacggtggaaagaaacgtagaaaagaccgaatacaggacttgatcgatatggggtatggttatgatgaatccgactccttcatcgataactctgaggcgtatgatgagcttgttcctgcttctttgactacgaagtatggaggattttacattaactcgggaaccctgcagtttagacaagcatcagagtctgaagatgacttcattaaagaaaagaagaaaaaatctccaaagaagcggaagttgaaggaaggtggtgagaagataaagaagaagaaaaaagatgacacttatgacaaggagaagaaatcgaaaaagtccaagttttccaaagccggcttcacagccctcaatgccagtaaggagaagaagaagaagaaatattctggggctttaagcgttaaagagatgctaaagaaatttcagaaagagaaagaggctcagaaaaaaagggaggaggagcataagcctgttgcggtcccatcagcggaagttcagggcctgcgggaactggagggtgcctctgaccccttgctctcactctttggctctacttctgacaacgacttgctccaggcggccactgccatggactcgctgacggatttggacttggagcatctgctcagtgagtctccagaaggaagtcccttccgagatatggatgatggaagtgattcccttggggtgggattggaccaggaattcaggcagccctcttctctccccgaaggcctgccagcacccctggagaagcgcgttaaggagctggctcaggctgccagagctgctgagggggagagcagacagaagttcttcacccaggatattaatggaatcctattagacatagaggcgcagactcgggagctgagcagtcaggtccgctctggggtgtatgcctatcttgcgtcattcctgccctgcagcaaggatgccctgctcaagcgtgctcggaaacttcacctctatgaacaggggggccgtctgaaggagcctctccagaagctcaaggaagccattggcagggcgatgccagagcagatggccaagtaccaggacgaatgccaggcacacacgcaggcaaaggttgccaagatgctggaagaggagaaagacaaggagcagagggaccggatttgttcggatgaggaagaagatgaagaaaaagggggcaggaggataatgggacctcggaagaagttccaatggaatgatgagatcagggagctactgtgccaggtggtgaagatcaaactggagagccaggacctggagaggaacaacaaagcccaggcttgggaggactgtgtgaagggctttctggatgcggaagtcaagcccctctggcccaaaggctggatgcaggccagaactctgtttaaggagagcagacgaggccatgggcacctgacttcaatcctggccaagaagaaagttatggccccttctaaaatcaaggtgaaggagtcgtctacgaagcctgataaaaaggtttctgtcccatcaggacagattggtggccccattgctttgccctcagatcaccaaacaggaggcctgagtattggggcctcgagcagggagctcccatcccaggcatcgggcggccttgctaaccctcctcctgtcaacctggaggactcattggatgaagacttgatccgcaatccagcctcctcggtggaagccgtgtccaaggaattggctgcattgaatagcagagcagctgggaactctgaattcacactgcctgcaccctcaaaagcacctgcagaaaaagttggaggcgttttatgtacagaagaaaaaaggaacttggcgaagcctagtccttctgctccaccaccagctagctctctgcagtcacccctcaattttctggcagaacaggctctggcactggggcagtcctctcaggagaaaaaaccagagagttctggctacaaagagctgtcctgccaggctcccctcaataagggcctgccagaagtacatcagtccaaagctaagcaccacagcttgccacggacgtctcacgggccccaagtggcagttcctgtgcctggcccccaggtcaaagtctttcatgccggcactcagcagcagaaaaacttcacgcccccatctccatttgccaataagctccaaggcccaaaggcttctcccacacagtgtcatcgttccctcctgcagttagtgaagacagcggccaaaggccagggcttccatccctctgcaccagccacctcaggaggcctgtcagcctccagcagcagctctcacaagaccccagcctcgtcctcttctgccctgagccatccagcaaagccacattcagtcagctctgcaggctcatcttacaagaataatccctttgccagctcaatctccaaacatggggtttcttctggcagctcttcctcgggaggaacaccagtccagagttctgtttctgggagcctggtccctggcatacagcctccctccgtgggacagcccaccagccgacccgtcccaagttcagcagggaaaaaaatgcctgtttcccagaagttgactctggtagcccctccaggcggtccaaacggagattccagtggtgggacccagggagtggcaaagttgctgacctcgccgtccctaaagccctctgcagttagtagtgtgacatcgtctacctccttgtcaaaaggagcgagtgggactgtgctgctggccggctcctctttgatggcttcaccctacaaatccagcagcccaaagctgtctggggccatgagctcgaactccttgggaattataacccctgtccctattcctgtccatgtgctctccttcagcgctgactcctctgccaaagcaggggtctccaaggatgccatcgtcacaggccctgcccccgggtccttccaccatggccttggccacagtcttctggctggcttgcactccagcccgccccatgcagcgcctctcccacacgctgcggtgcccacccatatcccgcagagtctgccaggtgcttctcagcttcatgggaaagggcctgctgtaccacggaaattgtgaccgcttcagaggcaaggcttgccacttgggtctgggtggaatcagaacgtgcaggtctcccaggatgtacactcactgcgccctttctgctgcttggtgttcttctggaggagcgtgagttctcagcggagcgcttctcggcacttctgatgtgcctcccatggagggagccgggcccttgctgctcaggaggtgcagactgccccgtgctctggcttgcagctctgtcgctagacggttgttagaggggcagctctaggctggggcttgcgctgggccgtggtgggaggcacagtgtttacaggctctggtggcagagcagttggcacacctgtgggtgaatctgcctgatcccctggcatttggtcagagtacctcagagcaccccactgctcaggggctccttctggctgcagtaagctccctggatggtcacagtgccgccccatccccaggctgtgtgctcaaagcggacaaaactcaggccagagccacagctgggagacctgcactgtccctgcgaaatactaagaacacctagggtgtgctcactgtgggggccagtttctcctcggaacatgacaatgaagctcttttagagaaaagacctttgtagattcaacaattatgataggatttttacagacacctattttgggctcagttttcatcattaccattaaatgccattggatagaaggggactgttcttcacacatcatattataggaagacataattccagtgcctttatggtggagcagaattcgacaacacatgtccattctgccctctgaatggatctgagacgaagaccttttaaaagatatgtctgtattgaagagaaagccagttttgagttttctacacttgcacatcattatctgtgccgtcctgactagaatgtgtctgggcccccaaattccatgtccctttatatccatggctcccattttgttttttcccgagttcgtggaggtggactgcatagcccagagcccttcatctctctgagggtcaaggataccagggtcccaagtcacagatagacattccagtttgtattcttaggaatcattcttaggcagtgcggtataatcaggcctctgtgaagtgtctgccgggtagaaataggccttgaagtcctggggctctccaggcagtggggttatgtgtcgactgaagggtgatgtgcagaagatcttggagagtggatcagagagactaggacagttactgcagagctcctaagtcaccactcaaccagtggctgtttcacaaggatttgagggcacttgcctgtcttgtgaggtctgtgccacaaggtgagtctgaactgactgctccagctaagtgatcaggcacgttgagagtatatggtgtcctcagcacatacacctgtgggaaaacggaccgctcttggctcctgactcccagggtacagcgcccagtaactcatccttcattcagaggtttgctggccttcccggtttcccaaggagcaagacctctgtctgccctttggcccggcctctgctctgactcctttttttacataagaaccaatctgtgtttcacattgggctaagtggattccttatccctttgttatatatattttttgcaacttggatttccagtttgtttacagagtagtcttaggtagtagcaaaagagccaaagaagagatttgtattgctgagctcaaagccaagcagaggccggcagtggaggctgagcagggactctccaggcttctctgcccataaacacccgggtcccaggccctccttcctttccctttggtgctccctcctccccatgtaccattgcgcgtgcagctggagcagaataccctcatttttaggaatctagtgatgcctcttgcctcagggaaacgtttctttgatggggagtttgagatttcttttccttgtttatgctttatttgtggtaatgaaagagcgaatgactgaacagccatggcaaggcagacctacaggcgaggccgcagcagagggtggggcagagcagcctcggggtctgggggctgcaggggtttccctggcgcagcgaaagtctctgagcacttaccgggcgtgaccgtttcttaggtgtgagaggggctgtggcttttgtgcagcgactatgttggtgttaggggtggtgtggagattgttaatcttgtataaagcaattcaataaattgtttcaaggtttccaaaaca

SEQ ID NO: 22999 - DNA, 2436 bp, Homo Sapiens
tccgactcatcccggccccgggatggcgtccccacgggaattgacacagaaccccctgaagaagatctggatgccatacagcaatgggcggcccgctctgcacgcttgccagcgcggtgtgtgcatgaccaactgcccaactctcattgtcatggtgggcctgcccgccaggggcaagacctacatctccaagaagctgactcgatacctgaactggattggtgtgcccactcgggagttcaatgttggccagtatcgccgggacgtggtcaagacctacaaatcttttgaattttttctccccgacaatgaagagggcctgaaaatcaggaagcagtgtgccctggcagccctccgtgacgtccggcggttccttagtgaggaggggggacatgtggcggtttttgatgccacaaacaccacccgagaacggagagcgaccatctttaattttggagaacagaatggctacaagaccttttttgtcgagtccatctgtgtggatcctgaggtcatagctgccaacatcgtgcaagtgaaactgggcagccctgactatgtcaaccgcgacagtgatgaggctacggaggacttcatgaggcgcattgagtgctatgagaactcctacgagtcgctagatgaggacctggatagggacctgtcctatatcaagatcatggatgtgggccagagctacgtggtgaaccgtgtggctgaccacatccagagccgcatcgtatattacctcatgaacatccacgtgaccccccgctccatctacctctgccggcacggggagagcgagctcaacctcaagggccggattggcggggacccaggactgtcccctcggggcagggagtttgccaagagtctagcccagttcatcagtgaccaaaatatcaaggatctgaaggtctggacaagccagatgaagaggacaatccagacggctgaggcactgggtgtgccctatgaacagtggaaggtcctcaacgagatcgatgcgggcgtctgtgaggaaatgacctacgaggaaattcaggataattatccactggagttcgccctgcgggaccaggacaagtaccggtaccggtaccctaaaggggagtcctacgaggacctggtccagagactggagcctgtcatcatggagctggagaggcaagagaatgtgctggtcatctgccaccaggctgtgatgcgctgcctgctggcctacttcctcgacaaggcagcagaacagctgccctacctcaagtgtccgctgcacacagtcctgaagctgactcctgtggcatatggttgtaaagtggagtccatattcctgaacgtggctgctgtgaacacgcaccgggacaggcctcagaacgtggacatctcaagacctccagaggaagcccttgtcacggtgcctgctcaccagtgaccatgttcatccactgtgaccactaggcaggcactgctctctgcagagggggtcattccaggccctccagtgtgtgtgatagtcaccatgccatgcagggatattcttgaagccacacatggctggcggaacccagagcccccaccccagcccacctggctctttgttgacagtcggcgacaaggttgtgcgtggctcctgacctgctgctaagagtcacttgaccagactgcatctgcatgggctgcgcggaggttgcccagccccagtttcttccggcgcagctcttaggtgttcactctcgccagctcagttggctttgtgaagtgtgaaaccctacaatgtgaaaggaaagtgcttgctgtgatgttcctactgtggcccagctgcccagcatggacctggtgactctccacagggcctctaccatcctctctgtggccacttcctgagccagaggccaggtcttcatggggccctgagcttctgctgcctctggtgagagggagagcccttcccatccttacccaccaggaactagagccccaaccacagcagatgcttcctgggcagccactggccaggccgttgtatccatgtcacccttagttgtgggcattcatgaaagcaatgcgcttgcttcagcacattggatgcacagaaacgtgagggcagggggcagttgtggtcgcccctccccagttgtgcatgtacccggctacttaggtatgcttaggggagctggtggccaggggtgccccttcaggcctgctctcacagtgaaaccacttcaagacagggcaggaagttaccttccctggtgcacacaccgaagtgctcgagggagagctgccgccccctctccccttccctggctgtggacactggcagccaatggggaggcggcctctcccctgttgctgcccgtgtccacacaggaatgtacactggtggcagaaacatgcatttgccataaataattcagaaacaaaaaaaaaaaaaaa

SEQ ID NO: 23000 - DNA, 2040 bp, Homo Sapiens
gaaggacggagccgagccgcggctgcctccctcgctcactccctcgcgcactcgcccgccccctccctccctcccctcccttccccgggcccgggtctggccccggcccattcgctgttgggtcttctgctagggaggatgtcgggttcgtcgctgcccagcgccctggccctctcgctgttgctggtctctggctccctcctcccagggccaggcgccgctcagaacgagccaaggattgtcaccagtgaagaggtcattattcgagacagccctgttctccctgtcaccctgcagtgtaacctcacctccagctctcacacccttacatacagctactggacaaagaatggggtggaactgagtgccactcgtaagaatgccagcaacatggagtacaggatcaataagccgagagctgaggattcaggcgaataccactgcgtatatcactttgtcagcgctcctaaagcaaacgccaccattgaagtgaaagccgctcctgacatcactggccataaacggagtgagaacaagaatgaagggcaggatgccactatgtattgcaagtcagttggctacccccacccagactggatatggcgcaagaaggagaacgggatgcccatggacattgtcaatacctctggccgcttcttcatcatcaacaaggaaaattacactgagttgaacattgtgaacctgcagatcacggaagaccctggcgagtatgaatgtaatgccaccaacgccattggctccgcctctgttgtcactgtcctcagggtgcggagccacctggccccactctggcctttcttgggaattctggctgaaattatcatccttgtggtgatcattgttgtgtatgagaagaggaagaggccagatgaggttcctgacgatgatgaaccagctggaccaatgaaaaccaactctaccaacaatcacaaagataaaaacttgcgccagagaaacacaaattaagtactgcttacaatatctttaggttcctgaaactggtggcaacatgacctgctaaaattttctgcttggacctctttggttctctcccctttcaagtgagcaacaccacaatgactgtctaaagcatgccttatttagcctctcctgtaagggtgatctagccaggtacattttaaacaatgcttcagtgtagaaggtgtaaactattttgggcttgatgtgctgtgaatgttgcttttttttttcctttgttaaaatatttaaatagaagtgaaaaggtcctctgaggatcagatcatgcatgcgccattttttacttaatgcagctgttaaattggcaaagctctaaaatgcactgctgccatctagtgatacacttttgtaaagtacagcaaaacctacaggtatatacagcatataaatatatatatatatatatttatatttttgggggtgggagaaatccaaaataaagtaaatgcttgtttcatttttaagctgctgatattcattccttattgtatgttgtcagatgaggaaattgtgcagttctggtacataaagatgagtaatataaactgaaatctataattttaagggcttaacctgtgactttaataagctggaacagtccactgaatgggtataatgaattgcagtatatacgtatgattgctttttaagtgattatcttttcttctgttaagtcatgtaaattcataaatccttttgcactgatgtgttgaaccttattcttgtacattcattcaatcaaggcaaacttttataatttttcttttgtttccaatgaccttgaaatgttatagcatggtaatattctatgcaactatagttatactttttggtttgacactgtattttttcacattgatttactggttgatgatagattttataacctaacggttctcatgcggtgcgtaattgtagatgcatgtacttgtgtgttttgtgtaactattgaagtgcaatgatgtataaaaaagtggattcacctgtttttaaaaataaaacattgataaaaaaaaaaaa

SEQ ID NO: 23001 - DNA, 2423 bp, Homo Sapiens
ccggcccggtcgacccgccgccgccgagcatggacgaccccgactgcgactccacctgggaggaggacgaggaggatgcggaggacgcggaggacgaggactgcgaggaggccgaggccgccggcgcgagggacgcggacgcaggggacgaggacgaggagtcggaggagccgcgggggccgtgcccagctcgttccagtccagaatgacagggtccagaaactggcgagccacgagggacatgtgtaggtatcggcacaactatccggatctggtggaacgagactgcaatggggacacgccaaacctgagtttctacagaaatgagatccgcttcctgcccaacggctgtttcattgaggacattcttcagaactggacagacaactatgacctccttgaggacaatcactcctacatccagtggctgtttcctctgcgagaaccaggagtgaactggcatgccaagcccctcacgctcagggaggtcgaggtgtttaaaagctcccaggagatccaggagcggcttgtccgggcctacgcagctcatgctgggcttctacgggatccggctggaggaccgaggcacgggcacggtgggccgagcacagaactaccagaagcgcttccagaacctgaactgcgcagccacaacaacctccgcatcacacgcatcctcaagtcgctgggtgagctgggcctcgagcacttccaggcgccgctggtccgcttcttcctggaggagagcctggtgcggcgggagctgccgggggtgcggcagagtgccctggactacttcatgttcgccgtcggctgccgacaccagcgccgccagctggtgcacttcgcctgggagcacttccggccccgctgcaagttcgtctgggggccccaagacaagctgcggaggttcaagcccagctctctgccgcatccgctcgagggctccaggaaggtggaggaggaaggaagccccggggaccccgaccacgaggccagcacccagggtcggacctgtgggccagagcatagcaagggtgggggcagggtggacgaggggccccagccacggagcgtggagccccaggatgcgggacccctggagaggagccagggggatgaggcagggggccacggggaagataggccggagcccttaagccccaaagagagcaagaagaggaagctggagctgagccggcgggagcagccgcccacagagccaggccctcagagtgcctcagaggtggagaagatcgctctgaatttggaggggtgtgccctcagccagggcagcctcaggacggggacccaggaagtgggcggtcaggaccctggggaggcagtgcagccctgccgccaacccctgggagccagggtggccgacaaggtgaggaagcggaggaaggtggatgagggtgctggggacagtgctgcggtggccagtggtggtgcccagaccttggcccttgccgggtcccctgccccatcggggcaccccaaggctggacacagtgagaacggggttgaggaggacacagaaggtcgaacggggcccaaagaaggtacccctgggagcccatcggagaccccaggccccagcccagcaggacctgcaggggacgagccggccgagagcccatcggagaccccaggcccccgcccagcaggacctgcaggggacgagccagccgagagcccatcggagaccccaggcccccgcccggcaggacctgcaggggacgagccagccaagaccccatcggagaccccaggccccagcccggcaggacctacaagggatgagccagccgagagcccatcggagaccccaggcccccgcccggcaggacctgcaggggacgagccagccgagagcccatcggagaccccaggcccccgcccggcaggacctgcaggggacgagccagccgagagcccatcggagaccccaggccccagcccggcaggacctacaagggatgagccagccaaggcgggggaggcagcagagttgcaggacgcagaggtggagtcttctgccaagtctgggaagccttaaggaaaggagtgcccgtcggcgtcttggtcctcctgtccctgctgcaggggctggggcctccggagctgctgcgggctcccctcaggctctgcttcgtgacccgtgacccatgacccacagtgctggcctcctgtggggccactatagcagccaccagaagccgcgaggccctcagggaagcccaaggcctgcagaagcctcctggcctggctgtgtcttccccacccagctctcccctgcgcccctgtctttgtaaattgacccttctggagtggggggcggcgggcagggctgcttttcttagtctgatgccaagcaaggccttttctgaataaattcatttgactttgaaaaaaaaaaa

SEQ ID NO: 23002 - DNA, 7586 bp, Homo Sapiens
cactgctctgactgcgtcctccccaggctgaagtgtcctcaggtttcatgtggatttgcccagtaatggatggctccaccgaggccaggttggggaagttcagcctcgaggacactaggggacgaaaaacttcaaaaagaagactctttttattaatattttggcgttctttttggagaggaacttttgggatgtagcctttacctgtttcctgaatttgacatccaaaaagccttttggaaaacaccattctaaatttatcctgttctgaatcatcatcgcttctgatagatgcagttgcttgctgacatcgtgatctttgattttgtacaacgctatttgggctaacttttgggattttactttgtgcttagaatttgaaagtagtattcattggaaagagactccaagaaaatactcgaagacatcaaaagctggattcgagggtataacgtgttttgttttgttttttaaattagaaaaataaggaattgcagtgtgattttctttccccctttaacttagaggaacgaggattatacagaaatttgaaatttcaacaagaaaaacttaagcttccttggattcccacgtcaaaggaaagtttcaagctttcagaaggagttctcactcgaagataaagaacagctcgctaaccacgaaagaggaatcgatgctcagcttttagttgcacttcctaaagttgcagaattaagacaaatctttgaaccaaagaagaaagaattcttagaaatgaaaagaaaagaaagaattgccaggcgcctggaaggaattgaaaatgacactcagcccatcctcttgcagagctgcacaggattggtgactcaccgcctgctggaggaagacacccctcgatacatgagagccagcgaccctgccagcccccacatcggccgatcaaatgaagaggaggaaacttccgattcttctctagaaaagcaaactcgatccaaatactgcacagaaacctccggtgtccacggtgactcaccctatggttcgggtaccatggacacccacagtctggagtccaaagccgaaagaattgcaaggtacaaagcagaaagaaggcgacagctggcagagaagtatgggctgactctggatcccgaggccgactccgagtatttatcccgctataccaagtccaggaaggagcctgatgctgtcgagaagcggggaggaaaaagtgacaaacaggaagagtcaagcagagatgcgagttctctgtaccccgggaccgagacgatggggctcaggacctgtgccggtgaatccaaggactatgccctccatgcgggtgacggctcttccgacccggaggtgctgctgaacatagaaaaccaaagacgaggtcaagagctgagtgccacccggcaggcccatgacctgtccccagcagccgagagttcctcgaccttctctttctctgggcgagactcctccttcactgaagtgccacggtcccccaagcacgcccacagctcctccctgcagcaggcagcctcccggagcccctcctttggtgacccacagctatcccctgaggcccgacccagtacagggaaacccaaacatgagtggtttctccagaaagattccgaaggggacacaccttcacttatcaactggccttccagagttaaagttagagaaaaattggtgaaagaggaaagtgctcgaaacagccctgaactcgcctcagagtccgtaactcagaggagacaccagccagcgccagtccattacgtgtcatttcagtctgagcactcagcctttgatagggtccccagcaaggcagcaggctctacacgacagccaatccgtggctatgtccaacccgcagataccggtcacaccgccaagctggtgacgccagaaaccccagaaaatgcatctgagtgtagctgggtagcatcagccacccagaatgtccccaaacctcccagcttgacggttctagaaggtgacggaagggatagcccagttctccatatctgcgagtcaaaagcagaagaagaagaaggggaaggagaaggagaagaaaaagaagaagatgtgtgcttcactgaagctctcgagcaaagcaagaaaaccctactggctttggagggtgatgggctagtgagaagcccagaagatccctctagaaatgaggactttggtaagcctgctgtgagcacagtcaccttagagcatcagaaggaactggaaaacgtggcacaaccccctcaagctccgcaccagcccactgagaggacaggcaggagcgagatggttctctacattcaaagtgagcctgtgtcccaagacgccaaaccaactggtcacaacagggaagcctcgaaaaagcgcaaggtccgtacccgctctctgtcagatttcacaggcccccctcagctccaggccttgaagtataaggacccagcttccaggagagagctggagctgcccagctccaagaccgaagggccttatggggagatcagcatgctggacacaaaggtctctgtcgcccagctccgaagtgcgttcctggcatctgccaacgcctgcaggagacctgaactcaaatcacgggtagagaggtcggctgaaggacctggcttgcccaccggtgtggaacgggagagagggtcccggaaaccaagacgctatttttctcctggtgaaagtagaaaaacttccgagagatttagaacccaacctataacttcagcagaacgaaaggaatcggataggtgcacttcacattcagaaacgccaactgtcgatgatgaagaaaaggtggatgaacgagccaagctgagcgtcgccgccaagaggttgcttttcagggagatggaaaaatcttttgatgaacaaaatgttccaaagcgacgctcaagaaacacagctgtggagcagaggctacgccgtctgcaggacaggtccctcacccagcccatcaccactgaagaggtggtcatcgcagccactgaacctatccccgcttcgtgttctgggggcacccaccctgtaatggcgagacttcctagccccactgtagctaggagcgctgtgcagcctgccagattgcaggcctctgctcaccaaaaggccttagccaaggaccagacaaatgagggcaaagagcttgctgagcaaggagaacctgattcctccactctaagcttggccgaaaagttggccttgtttaacaaattgtcccagccagtctcaaaagcgatttctacccggaacagaatagacacgagacagaggagaatgaacgctcgctatcaaactcagccagtcacactgggagaggtggagcaggtgcagagtggaaagctcattcctttctcacctgccgtgaacacatcagtgtctaccgtagcatccacggttgctccaatgtatgccggagatcttcgcacaaagccacctcttgaccacaatgcaagtgccactgactataagttttcttcttcaatagaaaattcggactctccagttagaagcattctgaaatcgcaagcttggcagcctttggtagagggtagcgagaacaagggaatgttgagagaatatggagagacagaaagcaagagagctttgacaggtcgagacagtgggatggagaagtatgggtcctttgaggaagcagaagcatcctaccccatcctgaaccgagccagggaaggagacagccataaggaatctaaatatgctgttcccagaagaggaagcctggaacgggcgaaccctcccatcacccacctcggggatgaaccgaaggaattttccatggctaaaatgaatgcacaaggaaacttggacttgagggacaggctgccctttgaagagaaggtggaggtggagaatgttatgaaaaggaagttttcactaagagcggcagagttcggggagcccacttccgagcagacggggacagctgctgggaaaactattgctcaaaccacagcccccgtgtcctggaagccccaggattcttcggaacagccacaggagaagctctgcaagaatccatgtgcgatgtttgctgctggagagatcaaaacgccgacaggggagggccttcttgactcacccagcaaaaccatgtctattaaagaaagattggcactgttgaagaaaagcggggaggaagattggagaaacagactcagcaggaggcaggagggcggcaaggcgccggccagcagcctgcacacccaggaagcagggcggtccctcatcaagaagcgggtcacagaaagtcgagagagccaaatgacgattgaggagaggaagcagctcatcactgtgagagaggaggcctggaagacgagaggcagaggagcggccaacgactcgacccagttcactgtggctggcaggatggtgaagaaaggtttggcgtcacctactgccataaccccagtagcctcagccatttgcggtaaaacaagaggcaccacacccgtttccaaacccctggaagatatcgaagccagaccagatatgcagttagaatcggacctgaagttggacaggctggaaacctttctaagaaggctgaataacaaagttggcgggatgcacgaaacggtgctcactgtcaccggcaaatctgtgaaggaggtgatgaagccagatgatgatgaaacctttgccaaattttaccgcagcgtggattataatatgccaagaagtcctgtggagatggatgaggacttcgatgtcattttcgatccttatgcacccaaattgacgtcttccgtggccgagcacaagcgggcagttaggcccaagcgccgggttcaggcctccaaaaaccccctgaaaatgctggcggcaagagaagatctccttcaggaatacactgagcagagattaaacgttgccttcatggagtcaaagcggatgaaagtagaaaagatgtcttccaactccaacttctcagaagtcaccctggcgggtttagccagtaaagaaaacttcagcaacgtcagcctgcggagcgtcaacctgacggaacagaactctaacaacagcgccgtgccctacaagaggctgatgctgttgcagattaaaggaagaagacatgtgcagaccaggctggtggaacctcgagcttcggcgctcaacagtggggactgcttcctcctgctctctccccactgctgcttcctgtgggtaggagagtttgcaaacgtcatagaaaaggcgaaggcctcagaacttgcaactttaattcagacaaagagggaacttggttgtagagctacttatatccaaaccattgaagaaggaattaatacacacactcatgcagccaaagacttctggaagcttctgggtggccaaaccagttaccaatctgctggagacccaaaagaagatgaactctatgaagcagccataatagaaactaactgcatttaccgtctcatggatgacaaacttgttcctgatgacgactactgggggaaaattccgaagtgctcccttctgcaacccaaagaggtactggtgtttgattttggtagtgaagtttacgtatggcatgggaaagaagtcacattagcacaacgaaaaatagcatttcagctggcaaagcacttatggaatggaacctttgactatgagaactgtgacatcaatcccctggatcctggagaatgcaatccgcttatccccagaaaaggacaggggcggcccgactgggcgatatttgggagacttactgaacacaatgagacgattttgttcaaagagaagtttctggattggacggaactgaagagatcgaatgagaagaaccccggggaacttgcccagcacaaggaagaccccaggactgatgtcaaggcatacgatgtgacacggatggtgtccatgccccagacgacagcaggcaccatcctggacggagtgaacgtcggccgtggctatggcctggtggaaggacacgacaggaggcagtttgagatcaccagcgtttccgtggatgtctggcacatcctggaattcgactatagcaggctccccaaacaaagcatcgggcagttccatgagggggatgcctatgtggtcaagtggaagttcatggtgagcacggcagtgggaagtcgccagaagggagagcactcggtgagggcagccggcaaagagaagtgcgtctacttcttctggcaaggccggcactccaccgtgagtgagaagggcacgtcggcgctgatgacggtggagctggacgaggaaaggggggcccaggtccaggttctccagggaaaggagcccccctgtttcctgcagtgtttccagggggggatggtggtgcactcggggaggcgggaagaggaagaagaaaatgtgcaaagtgagtggcggctgtactgcgtgcgtggagaggtgcccgtggaagggaatttgctggaagtggcctgtcactgtagcagcctgaggtccagaacttccatggtggtgcttaacgtcaacaaggccctcatctacctgtggcacggatgcaaagcccaggcccacacgaaggaggtcggaaggaccgctgcgaacaagatcaaggaacaatgtcccctggaagcaggactgcatagtagcagcaaagtcacaatacacgagtgtgatgaaggctccgagccactcggattctgggatgccttaggaaggagagacaggaaagcctacgattgcatgcttcaagatcctggaagttttaacttcgcgccccgcctgttcatcctcagcagctcctctggggattttgcagccacagagtttgtgtaccctgcccgagccccctctgtggtcagttccatgcccttcctgcaggaagatctgtacagcgcgccccagccagcacttttccttgttgacaatcaccacgaggtgtacctctggcaaggctggtggcccatcgagaacaagatcactggttccgcccgcatccgctgggcctccgaccggaagagtgcgatggagactgtgctccagtactgcaaaggaaaaaatctcaagaaaccagcccccaagtcttaccttatccacgctggtctggagcccctgacattcaccaatatgtttcccagctgggagcacagagaggacatcgctgagatcacagagatggacacggaagtttccaatcagatcaccctcgtggaagacgtcttagccaagctctgtaaaaccatttacccgctggccgacctcctggccaggccactcccggagggggtcgatcctctgaagcttgagatctatctcaccgacgaagacttcgagtttgcactagacatgacgagggatgaatacaacgccctgcccgcctggaagcaggtgaacctgaagaaagcaaaaggcctgttctgagtggggagacgccagaggagcctcacggtcacgtccaacaacaccactgcaccagggaaatggatatatatttttggactggtgtttttcacaaagtatttttcaatcagagttttcagaacctgacattgttaaagatactgcttgtcccggagttgtgtattttgtaaatgttcaagggaactgtt

SEQ ID NO: 23003 - DNA, 4986 bp, Homo Sapiens
aggaggctgccgctctggcttgccgccccccgccgccgctgcacaccggacccagccgccgtgccgcgggccatggacctgcccaggggcctggtggtggcctgggcgctcagcctgtggccagggttcacggacaccttcaacatggacaccaggaagccccgggtcatccctggctccaggaccgccttctttggctacacagtgcagcagcacgacatcagtggcaataagtggctggtcgtgggcgccccactggaaaccaatggctaccagaagacgggagacgtgtacaagtgtccagtgatccacgggaactgcaccaaactcaacctgggaagggtcaccctgtccaacgtgtccgagcggaaagacaacatgcgcctcggccttagtctcgccaccaaccccaaggacaacagcttcctggcctgcagccccctctggtctcatgagtgtgggagctcctactacaccacagggatgtgttcaagagtcaactccaacttcaggttctccaagaccgtggccccagctctccaaaggtgccagacctacatggacatcgtcattgtcctggatggctccaacagcatctacccctgggtggaggttcagcacttcctcatcaacatcctgaaaaagttttacattggcccagggcagatccaggttggagttgtgcagtatggcgaagatgtggtgcatgagtttcacctcaatgactacaggtctgtaaaagatgtggtggaagctgccagccacattgagcagagaggaggaacagagacccggacggcatttggcattgaatttgcacgctcagaggctttccagaagggtggaaggaaaggagccaagaaggtgatgattgtcatcacagatggggagtcccacgacagcccagacctggagaaggtgatccagcaaagcgaaagagacaacgtaacaagatatgcggtggccgtcctgggctactacaaccgcagggggatcaatccagaaacttttctaaatgaaatcaaatacatcgccagtgaccctgatgacaagcacttcttcaatgtcactgatgaggctgccttgaaggacattgtcgatgccctgggggacagaatcttcagcctggaaggcaccaacaagaacgagacctcctttgggctggagatgtcacagacgggcttttcctcgcacgtggtggaggatggggttctgctgggagccgtcggtgcctatgactggaatggagctgtgctaaaggagacgagtgccgggaaggtcattcctctccgcgagtcctacctgaaagagttccccgaggagctcaagaaccatggtgcatacctggggtacacagtcacatcggtcgtgtcctccaggcaggggcgagtgtacgtggccggagccccccggttcaaccacacgggcaaggtcatcctgttcaccatgcacaacaaccggagcctcaccatccaccaggctatgcggggccagcagataggctcttactttgggagtgaaatcacctcggtggacatcgacggcgacggcgtgactgatgtcctgctggtgggcgcacccatgtacttcaacgagggccgtgagcgaggcaaggtgtacgtctatgagctgagacagaaccggtttgtttataacggaacgctaaaggattcacacagttaccagaatgcccgatttgggtcctccattgcctcagttcgagacctcaaccaggattcctacaatgacgtggtggtgggagcccccctggaggacaaccacgcaggagccatctacatcttccacggcttccgaggcagcatcctgaagacacctaagcagagaatcacagcctcagagctggctaccggcctccagtattttggctgcagcatccacgggcaattggacctcaatgaggatgggctcatcgacctggcagtgggagcccttggcaacgctgtgattctgtggtcccgcccagtggttcagatcaatgccagcctccactttgagccatccaagatcaacatcttccacagagactgcaagcgcagtggcagggatgccacctgcctggccgccttcctctgcttcacgcccatcttcctggcaccccatttccaaacaacaactgttggcatcagatacaacgccaccatggatgagaggcggtatacaccgagggcccacctggacgagggcggggaccgattcaccaacagagccgtactgctctcctccggccaggagctctgtgagcggatcaacttccatgtcctggacactgctgactacgtgaagccagtgaccttctcagtcgagtattccctggaggaccctgaccatggccccatgctggacgacggctggcccaccactctcagagtctcggtgcccttctggaacggctgcaatgaggatgagcactgtgtccctgaccttgtgttggatgcccggagtgacctgcccacggccatggagtactgccagagggtgctgaggaagcctgcgcaggactgctccgcatacacgctgtccttcgacaccacagtcttcatcatagagagcacacgccagcgagtggcggtggaggccacactggagaacaggggcgagaacgcctacagcacggtcctaaatatctcgcagtcagcaaacctgcagtttgccagcttgatccagaaggaggactcagacggtagcattgagtgtgtgaacgaggagaggaggctccagaagcaagtctgcaacgtcagctatcccttcttccgggccaaggccaaggtggctttccgtcttgattttgagttcagcaaatccatcttcctacaccacctggagatcgagctcgctgcaggcagtgacagtaatgagcgggacagcaccaaggaagacaacgtggcccccttacgcttccacctcaaatacgaggctgacgtcctcttcaccaggagcagcagcctgagccactacgaggtcaagctcaacagctcgctggagagatacgatggtatcgggcctcccttcagctgcatcttcaggatccagaacttgggcttgttccccatccacgggattatgatgaagatcaccattcccatcgccaccaggagcggcaaccgcctactgaagctgagggacttcctcacggacgaggtagcgaacacgtcctgtaacatctggggcaatagcactgagtaccggcccaccccagtggaggaagacttgcgtcgtgctccacagctgaatcacagcaactctgatgtcgtctccatcaactgcaatatacggctggtccccaaccaggaaatcaatttccatctactggggaacctgtggttgaggtccctaaaagcactcaagtacaaatccatgaaaatcatggtcaacgcagccttgcagaggcagttccacagccccttcatcttccgtgaggaggatcccagccgccagatcgtgtttgagatctccaagcaagaggactggcaggtccccatctggatcattgtaggcagcaccctggggggcctcctactgctggccctgctggtcctggcactgtggaagctcggcttctttagaagtgccaggcgcaggagggagcctggtctggaccccacccccaaagtgctggagtgaggctccagaggagactttgagttgatgggggccaggacaccagtccaggtagtgttgagacccaggcctgtggccccaccgagctggagcggagaggaagccagctggctttgcacttgacctcatctcccgagcaatggcgcctgctccctccagaatggaactcaagctggttttaagtggaactgccctactgggagactgggacacctttaacacagacccctagggatttaaagggacacccctacacacacccaggcccacgccaaggcctccctcaggctctgtggagggcatttgctgccccagctactaaggtgctaggaattcgtaatcatccccatcctccagagaaacccagggaggaagactgtaaatacgaacccaatctgcacactccaggcctctagttccagaaggatccaagacaaaacagatctgaattctgcccttttctctcacccatcccacccctccattggctcccaagtcacacccactcccttccccatagataggcccctggggctcccgaagaatgaacccaagagcaagggcttgatggtgacagctgcaagccagggatgaagaaagactctgagatgtggagactgatggccaggcaagtgggaccaggatactggacgctgtcctgagatgagaggtagccgggctctgcacccacgtgcattcacattgaccgcaactcacacattcccccaccagctgcagccccttgctctcagctgccaaccctcccgggtcacttttgttcccaggtacctcatgggaagcatgtggatgacacaatccctggggctgtgcattcccacgtcttcttgctgcagcctgcccctagacatggacgcaccggcctggctgcagctgggcagcaggggtaggggtagggagcctcccctccctgtatcaccccctccctacacacacacacacacacacacacacacactgcctcccatccttccctcatgcccgccagtgcacagggaagggcttggccagcgctgttgaggggtcccctctggaatgcactgaataaagcacgtgcaaggactcccggagcctgtgcagccttggtggcaaatatctcatctgccggcccccaggacaagtggtatgaccagtgataatgccccaaggacaaggggcgtgcctggcgcccagtggagtaatttatgccttagtcttgttttgaggtagaaatgcaagggggacacatgaaaggcatcagtccccctgtgcatagtacgacctttactgtcgtatttttgaaaaattaaaaatacagtgtttaaaaacaaaaaaaaaaaaaaaaaaaaa

SEQ ID NO: 23004 - DNA, 216387 bp, Homo Sapiens
gaattctttttactttcttcaggaactctgtttggatgttgagcttccaggtttgacctatgtgtttttgatttcctattttccatctcttactattttgcacgggttcttgggatttgtccttaactttaccttccagacttacattgaaatatttatttttaatgccatgtttcaagtttccattagttttctcttgttctctgaagatttctcacctacaccctcctccttctgtcttttttttaactggatggaactttattttatttttcttttttgagacagtctcattctgttgctcagactggagcatagtggcatgattacagctcactgcagcctcgatttcctgggctctagccatccatccgtctcatcctcctgagtagctgggaccactggtgtgtgccaccacgcccgcctaatttttttgtttttgtagagacagtgtctccctatgttgcccaggctggtcttgaactcctgggctcaagcaatccttccacatcagcctcccaaagtgttgggattatagacgtgagctacacctcgctgcttttatttttaaagtataatagtgtcctaccgttcagataacctgccctccttcacattttggaatatttctctttatttttacagaaagctgtttttgtttatagttagagtcttgctgtgtatctgcattttcttttcccaagttatttttgcataccgtatcaagcgttttcccatgttaatgggatggctgggcgcagtggctcgtgcctgtaatcccagcactttgggaggctgaggcgggcagatcacgaggtcaggagttcaagaccagcctggctaatatggtgaaaccccgtctctactaaaaataaataaaaaaaaaaaaaacaaaaaacaattatccaggcgtggtggtgcctgcatgtagtcccagctacttaggaggctgaggcagaagaatcgcttgaatctgggaggcagaggttgcagtgacccaagatcacgccactgcactccagcctgggtgacagagcgagactccgtctcaaaagaaaaaaaaatcctttataaatacatacatattgtttcaaaacatttctttatagattcataatatttacttaaatttattatagtttgttttaaccattctaattttaggcatttaggtttacgtgtttattttgttaggataagtagtgatgcgaaacttttaataaaaggtaaacaatgttctgcaaatgaagaatcagtaagaatttatatttttctttaaatgatttgttgttcatttctttcatgtgataagtttgtgggaattgcaaaaattttcgcaaatgtagttgctggttttttattttatgttttttatccctagtagaaatataattttgcttttagttacattaaaaattattttgttaaatggtagcaatctgtttgttttgttttctttttaagaaatgtggtttggttttgagctggaagagagtacaaggtgcttccggaaagcttcaaggtatgtcatttttttccttatttgctgaaatcactttaactaacctgtgtgcttaaatcactttgcatgacttaactctcattgtctttatcagtaagacttattttattagcactctttgtcctcttttttattgaaatagggttaaaaggcagtttgggaaaatattggctgagaattgagatcagaaggaggaaaaaggtgtaagaggaaaggaaaaaattaaaattgctcaatttaactggtttcttgttctttcaaaagtctcttttgtctcaagaaatgactgcatgatcaaaatggaacaattagtaagggagaagaagagacaatcatggcctgttaactttttttttttttttttgagacctagtctcactctgtcacccaggctggagtgcagtggcgtgatcttggctcactgcaacctctgcctcctgggttggagcagttctcctgcttcagcctcctgagtagctgggattacaggtgtgcgccaccatgcccggctaatttttgtatttttagtagagacggggtttcaccatgttggccaggctggtctcaaactcctgacctcagatgatccacccgccttgacctcctaaaatgctggcattacaggcaggagccaccacacctgacctcaaatgttaattttttaaatagttgatttgattcaggatctatatgaagtccacacattgcaactagttggcaatttgttttaagtctcctaattttttttattagcaccatcctctaaccaactgagctaactggccagactcttaatattttaagttattctatttctaattttccttgcagtttatttgttgaagaaactgggtcatttgtgcaatagtattttttaagttgagttttgctgaatgcagctccagtactataatttgccattaatctatcctctgtgttttctgtaaagtggtcagtagttgtacttgatgtgtgctgtgtggtggtttgttttgttttgtttgtgttttttatttttttggaggagtttcgctcttcttgcccaggctggagtgcagtggtgcgatcttggctcactgcaacttccacctcccaggttcaagcaattctcctgccccagcctcccgagaagctgggattacaggcacgtgccaccatgcccggctaattttttatttttagtagagacggggtttctccatgttggtcaggctgctcctgagctgctaaccttatgatccgcccacctcagcctcccaaagtactgagattataggcacgagccactgctcctggccgctatttttttttttaatgtttttattctagcaccttatagcaagaatactataaaggtagtattcttccatcagggaacacatgtgagattgtcttttttgtatgtgtaatagcatcagtgttgccagtgcctagattgattaattcattaggaagtaattcatcagtagtcttttttcttttttttgagacagagtcttgttatgttgccaggctggagtgcagtggcataatcttggctcactgcaatctccaactccctgattcaaacgattctccagcctcagcctcccgagtagctaggattacaagcatgtaccaccccacccagctaatttttgtacttttagtagagacagggtttcaccgtgttggccaggagggtctcgatctcctgatctcgtgatctgcccgccttggcctcccaaagtgctgggattacagacgtgagccaccgcgcccggcctcatcagtagtctgttttgaagaattctgtcattcttttattgaggaacaaatctttttcatatattagtagaatgcttctctatggagaaagttgcccctgcatctactgtttggtaacttagaggcatttttgttgttcttgagatggagtttttcgctcttgttgcccagactggagtgcgatggcaccatctcagctcgctgcaacctccgcctcctgggttcaagtggttctcttgcctcagcctcctgagtagccaggattacaggcgcccaccaccatgcctggctaattttttggtttttttaatagaggcgggattttgccctggttgccaggcaagtcttgaacacgtgacttcaggtgatccgcccacctcagtctcccaaagtgctgggattacaggcttgagccaccatgcctggcatagaggcatatttaatacagaataggcaggatagatgcactggcttgctttcttaaaacaatgagttgctatcctcagcattctctagcagtgactgattttcttttttcttttgaattattgtgaacttaggaattgaagcatatttagtgttattgtatttaatatggattcattgtagttattatcaccattaaagcttaacttaaattgtctctgcactttacatctccagtggttttgacatgaccctgaacacctttgacagctgctttgttatctggtatgacaatttgttctaaggtcatctagtataataggttttcggccccagacttagaatcagccatttctccaggggaaattgttttgaagatcacgatctggacactaggtgcactcatattaacagtggtttgggatgggtgtggtggctcgagcttgtaatcccagcactttgggaggctgaggcaggcgggtcaagagatcaagaccatcctggccaacatggtgaaaccctgtctctactaaaaatacagaaattagctgagtgtggtggtgcgctcctttagtctgagctactcaggaggctgaggcaggagaatcgcttcaacccgggaggcagagtttgcagtgagccgagattgcaccactacactccagcctggtgacagcgcgagactccgtctaaaaaaaaaacaaaacaaaacagtggtttggtgtttgcttttaggtttttccagtgtatactaattcagattcaggactaaaaggtttttatttagcctgttttgtcatatatttgtatctcctttttccccacactgaggtccccgagtttcaaggccattggggatgataaactattaattactgagttgctttatcttgcattgcacatataacagtttcacactaacaacattgacactatcatcagcaatatgatcatttaaaattacttttctttttttttgagacagggtctctgtctgttgcccaggctggagtgcagtggggcaatctcagcttactgcaacttctgcctcccgggttcaagcaattctccttccttagcctccctagtagctgggactacaggcatgtgccaccacacccagctagtttttgtatttttagtagagagagggtttcaccatgttggccaggctggtctggaactcctgatctcaggtgatctgcccgcctctgcctcccagagtgctgggattacaggcatgagccactgcgcccggcctaaaggtacttttttgaggggcatatctgtttgtctttatggtgtatcacactgaaaatgttatagtcaaatttactattttaatatcagtagtttttttctgtttcctgtcattatatacatatttagatttatttgattttattttcaatttgttggttgctcttcttagatttaattttgttttaatatttctgttaaagtcatcttaatagtgagattgactagttataaaaggaaatagatgtaagtaaaatagactggtaactaggatacaaattctgtaatttaacatctcagaattgaaaagtgcattgtttgtgttcctgcagtctgttctttcttgtggctgtttggaagtctagatagggtgaatttatgaaataattgactcctttctttttttttttttttttgagacggagtctcgctctttcgcccaggccggactgcagtggcgctatctcggctcactgcaacctccgcctcctgggttcacgccatactcctgcctcagcctcccaagtagctgggactacaggcgcccgccaccgcgcccggctaattttttgtatttttagtagagacggggtttcactgtgttggccagaatggtctcgatctcctgacctcgtgatccacccgcctcggcctcccaaagtgctgggattacaggcatgagccaccgcgcccggccaattgactccttttaatcatgaatttcattgactctgctaaatattttattagagcttctaatgagtagcagtttgtctgatttgaatttttcttcctctctgtttttccctttttttcccctttggttgtttgaggatactaaaagtgaaatggttatcaaagggaattggtggacaggggtggaattatgaattgagtggtctttgtattaaaacatttggactctagtgattctacttttccataattttttttcttttgtaagtgaattggtatttcactaattgttttcatccattgctagccttcggattctgtgagtacaaggagccagaatctaccctccgtgcactcagattattacatgacctgcaaattggagagaaaaagctactcgttaaagttgatgcaaagacaaaggcacagctggatgaatggaaagcaaagaagaaagcttctaatggggtatgttttctgtcgtgttatcttttctaggccagactgtgctatttcagtgtagtgcttctcattataaatgaatctaatatggggcttcaaaagatcatcatgtatgtgcttgtggcttaatgtaggagggtattttatagtttgtagttattttaagtcttatctgcccatagtgggtggatgactgttggtttgcttgttccaggttgggatgaaagtagtaagggaggctggacaaggttaacttgccagagaaagcactggtacagactattccaaacagagctaattcattaaggcagctttgtaagtaagtacaaaatatatttcaacctacacaatttttattagtttccctctcttttagaagtacaccgactctaaaatgaatgaaagtctgattacttgccttaggttgggggctttatccaagctctactaagtgaagctaaaataaaggacattgttgtatattgtattttaatgtatacattattacctcctcagcaaagtgaaacatagctaaaacttgagtatatatttccttcatttctcttcttagttcctttttggcatctcatgctgaacaaatccaaaatagatttattaatgccttcccccaacacaaacaaaaccagaagagtctttcgctgtcgtcaaatttttattatctttcaaaatagaaatcgctttttgctgggcacggtggctcacgcctgtaatcccagaactttgggaggcagaggcgggcagatcacctgaggtcaggagttcgagaccagcctggccaacgtggcgaaaccctgtctctactaaaaatacaaaaaattagcctagcgttgtggtgggtgcctgtaatcccagcaactcagaggctgaggcaggagaatcgcttgaactgcagaggcggaggttgcagtgagctgggatctagccattgtactccagcctgggcaactagagtgaaactctgtctccctgctgccaaaaaagaaaaaagaaatacctttcatgttccctccaagttctttgttaaaaaaaaataaaaaccaaacccaaaaaactcacaaaatgaagcaaagtataaataatcaattaaataccacctgtaatcccatcatcataagcaacactgtaggcggtttggatgtatgttcttccagacatttttctgtgtatgaatgtggttcatttgttttttgttttttttgagacagagtctctctgtcgttcaggctagagtgcagtggtgcgatcttggctcactgcaacctctgcctcccgtgttcaggtgattctcctgcctcagcctcctgagtagctgggattacaggcatccaccaccacgttcagcaaatttttgtatttttagtagagatggggtttcatcatgttggccaggctggtctcgaactcctgacttcaggtaatctgttctccttggcctcccaaagtgctgggattacaggtgtgagccaccacacctggccaaatgtagggttttgtttgtttgtttgtttgaaatggagtttccctctcttgcccaggctggagtgcagtggtgcgaccttagctcactgcaacctccacctcccaggttcaagtgattctccctcctcagcctcccaagtagctgggattacaggtgtccgccaccaggctcggctactttttgtattttcactatgtaagtgaggctggtcttgaactcctcaccttaggtgatctgtctgcctcagcctcccaaagtgctgggattacgtgtgagccactccacccggtcagcattgcctgtatttctaaaacataagtataattttatgaaactcttgcttatattatgtgagacccatccttaatggttttggatttcttacagaaaaaagtaccccccctctttttttttgatgcagtctcgctttgttgcccagactggagtgcagtggcgaaatcttggctcactgcaacctccacctcccaggttcaagcgattctcctgctttggcctaccgagtagctgagattttaggcacccgccaccacccccagctaatttttatgtttttagtagaggtgggatttctccatgtcttccaggctggtcttgagctcctgacctcaggtgatccacccacctcggcctctcaaagtgctgggattacaggcgtgagccaccgtgcccggccataaagtccatatttttaggatgacattcaaggctcactccagtccacgtttctagcttccgtcttccctcccctgcacatactactgcatgtacctccacagtcttcccttttgctttgctggcatctcatgtctttgttgcctatccaagctccctgttgaaattctatccatacttataattaacatgtcccttgattcatacagactttatcagcctgcccttagtttctgtcagacagaattaagtcctctgttcccatataaagcagatctttatagctgttttagtagatattgtttatatatctctctctttcacagccccttgtaacccatctcattcccatattctctttcaacccccatctctgattacagatagaaagggtgataagtttgtgggctgtgtctctttaatcttgtacctccacagcatctaggacagtgtcttgcctaaagcaaggatggaattaacatttgttaatagacgcttatctgtcagtcttactatcctcaccctgcttcataaggaaattatattttatttatattttatttcaaatcagtaatactgcctgtcacatcactaaaacctcaaaaaacagaaatgtttgaaataagaattttcaggtttgccttgtgataactgtatactaactagttgaaagtatggattcagtatcttcaaagtgttctgatttgctaggactcactgttttcttgtgtttaatcttcagtttgtgaggtcatttaatttgtagcatttgcaaatgttatactgaaaaactctgagaatgaaataagtcactatactacgtatttttataaataaggaagtgcacaattatgtgacttcacatttcttgcttgcttgctttttttggggtggggacagagtgttgctctgtcacccaggctcgagtgtggggtggtgtgatctctgctcactgcaacctcctattcccaggctccagtgatccttctgcctcagctgggactacaggtatgcaccaccatactggctaagttttatattttttgttgagatgaagtttcactgtgttgtccaggctggtcttgaactcctgggcttaagtgatccacctacttcagccttccaaagtgctgggattacaggcaggagccactgtgtccagcttacattttttgtataatcaacattagccagagtaaccacactttagatctgttggtcttcaggaaaagcaatatgtgtctggatgtggtggctcacacctgtaatcccaacactttgggaggccgaggtcggaggatcacctgaggtcaggagtttgaaaccagcctggccaacatggtggaactccatctctactaaaaaaaaaatacaaaaattagccggatgtggtggtgcacacctgtaatcccagctacttgggaggctgagacaggaaaatcacttaaaacccaggaggcggaggttacagttagctgagattgcgccactgcagtccagcctgggtgacagagtgagactctgtctcaaaaaaaaagcgaagttacatgcaataaaatcacacagaaaaattatttttaataaaaaattaaaacaattgacagatatcagttatatgatttattgttccaactgttatatgtgtatttctgagtgccctttggcttcttgcccggtggtacttgaagtcataggataaacatggcatattttccttaagtgtcaatattactcaacaaatataggttaaaaaagcattctatctgatgtaaaaaaaaattttcaaataacttaagcaaatattactatatagtggagtagattagagatttgccatgattttttttttaagggtggtggggggtgtagggagagatgaaagtcggagagtgagagattggagggagggagcagggggaggggagaagatggtgggggtgagatgggtggctactgccgccatgatttttcagtataaaaatatgacatggtgattgttttttattcttggtcgttgattagttggagaaatttagaaagctgttaagtagaggataggagaatgagacattgaaaaccctttgtgttgctttattaggcattttcctctgaggcagaagagaaaacaattagttccttatttctcattgactaaaaaggaaacatgagtttgtctaggggagcaacatatttttcatgatccagaatttttttttaaattttcttgcctttttttttttttaattaagttttagggtacatgttcaccacgtgcaggtttgttacgtatatatacatgtgccatgttggtgtgctgcacccattaactcgtcatttaacattaggtatatctcctaatcctatccctcccacctgccccccaaaattttcttttttttatgagatggggtctcgcgttgttgcccaggctggtgtcgaactcctgggctcaagcagttctcctgcttcggcctcccaaagtgctgggtttacaggcatgagccactgtgcccagccagattcagaattttaagaagaattttgcgcatgtgtaaggtgtcttgtcaaacaacttgactgaacattttaatttagattttgcagaatttgcaggtgtaactttttttctttccatttcttattgacctctagtagtaaagtattccatgtgaggtggccatgctaatttagttcatgtcctattgctttctggctgtccagcaaaaatagtataggagacaatatatctgcttgtatgtcacaagtcatagttattaaccatatattcaagaatgaacactgacaagtgctggaaaaacagttattctctggaaagaacctatttaatagaggacagctgcttcaggggaacatctttggaaattagcctggctgagtacattttctcaaaagaaagaactctgcatttccttaaattttttaaaaggttcgtactttggattctagacctcagtgccaaagaatgagcccagcagagctgtttaacttcacagctactagctttactattgaaattttaatttctctgaaaagaaccaactaggtgggccatgtaaacattacagataatctgtcagcttcctatatggctgaatccttcaccttttgtttcccagtattactgattatgctttctggtttctccctctctgcccaccgaagtctcactcttgtcgcccaggctggagtgcaatggtgtaatctcggctcactgcaacctccgcctcctgggttcaagcgattctcctgcctcaacctcttgagtagctgggagtacaggcacccgccaccacgcctggctaattttttgtatttttagtaaagatgggtttcgccatgttggctaggctggtctcaaactctggacctcaggtggtccacccgcctcggcctcccaaagtgttggggttataggtgtgagccaccgcacccggccatctggtttctgaagtataagaaaaaaacaggaaatcagaaaatcgtgtatagttgatattccagagatagagctttagatgaaacttgccagtctgtggagtggtctttctaacctgatcatctaccatgatcaggttttgttttttttttttttttttcttgagacagagtctcactctgtcgcccaggctggagtgcagtggcgcgatctcagctcactgcaagctccgcctcccgggttcacgccattctcctgcctcagcctcccgagtagctgggactacaggtgcccgccaccacgcctggctaattttttttgtatttttggtagagacggggtttcactgtgttagccaggatggtctcgatctcctgaccttgtgatctgcctgcctcggcctcccaaagtgctgggattataggtgtgagccactgcatccggcctaggttttttgttgttgttgttattgttttttttttaaatattagcaatcagttaagatttttgggttaataaacttttcttctaaaaatgtgaattagttaattccaaatgctttatctctaatagtaaaatagccatattgatatttaaattttggtttacagtggaaacaataatcaatttagggtctataaggattttttttgtcttttgagacggagtcttgctctgtcgcccaggctggagtgcagtggcgtgatattggctcactgcaatctctgcctcccgggttcaagccattctcctgcctcggcctcccaagtagctgggaccatgcccggctaattttttgtgtttttagtagagacggggtttcaccatgttagccaggatggtctccatctcctgacttagtgagccgctgcacgcggctggggaatttttgtatttttttagtagagacggggtttcaccatgttggtcaggctggtctcgaactcctgaccttgtgatccgcccgcctcagcctcccaaaatgctgggattacaggagcgaggtgtgtgtgtgtgtgtgtgtgtgtgtgtctgtgtgtgtgtgtgtgtttttgatgggggtggagacagagtctcgctctgtctcccaggctggaatggagcagcatgatctctgctcactgcagtctccacctcctgggttcaagcaattctcttgcctcagcctcctgaatagctgagattacaggcacatgtcaccatgcccagctaattttttgtatttttggtagatggggtttcaccatgctggccaggcaggtctcgaactcctgacctcgtcatctgcccaccttggcctcccaaagcgctgggttgcaggcgtgagccaccgagccctgccaagtggttagttttgtaataacatgtaatgccttatatttaagttatctgtgtcataacccatctgttactctgtagtgatacagcttgaggagaagagagcgtttttcaatttggattttattccgtctaagtgcagcatctttctcacagtatgctcttaagaatttgttgatgggtgtggtggctcacgcctgtaatcccagcactttgggaggctgaggcgggcggatcatgaggtcaggagatcgagaccatcctggctaacacggtgaaacccccatctctactaaaaatacaaaaaaattagtcgggtgtggtggcgggagcctgtggtcccagctactcaggaggctaaggcaggagaatggtgtgaaactgggaggccagagcttgcagtgagctgagatcacgccactgcattccagcctgggcaacagagcaagactccgcctcaaaaaaaaaaaaagaatttgttgagcaaattaatttaagaaataaaatgtttgttgaatacgtatccattggagacagctttcagaatgcttgtggtcaacttataaagttactgctaagttacattgttaaggaggcacaaggcatgaaactcaccttgaatagagttgcaggaattatgaccaagagccaggcatgtatgcacatgagcatggttcttgtatgtatctgaaaatgtgcacggtatatgtttaccaagtaagtcgttaaaaactttggggcatgcacaactattgtagcacaactattgtagcacattagaagccaacaattttccccacatagagggaataatctagacttcttagaaaataataattattattattgagatggagtttcgctcttttgcccaggctggagtgcagtggcgtaatctctgctcactgcaaccactgccttccggttttaagcgattctcctgcctcagcctcccgaggagctggaattataggcatgcaccaccgcactcggctaatttttgtatttttagtagagtggggtttcaccatgttggccaggctggtcttgaactcctgacctcatgatccgcccccgcctcggcctcccatagtgctgggattacaggagtgagccactgcgcctggccagaaaattattgataaagacctacaaatacttactttgattccttgttagggttgtaagtgtatggtttctataagtggtatgtattcctgcattataagcactcgtagaaagcaaataggaaataagccatcattacagcccctaaactcccgattcttgcagtttggtatatttagcaatctgatgtttttgtttgtttgtttaatctacatacaattttgctttttctgagtggtagctatcacaattaacttaaaattgtattttgcctttactacgtaactgaattttcaactgtttaaaagagtcgttactatttgtgtacctattgagcaaaacagtctgaaaacttgtgaatggtttgcagatgtgtcgtatagtgtgctagtcctgaaatttagggaccagaattttttagctattaagaaaaagaaaatgaaaatgaagtagtatctcaggaatagttaaataaaaaaatgaagcttttctgatgttaagaacaaaaccaattctgtgtttaataggactacagagatgtttttgagaaaacatgtatgtttattaactcttgttgtagagtgattttgattttcttgcttgatttttctttcccctgaatttgctgttttgtttaagaatgcaaggccagaaactgtcactaatgacgatgaagaagccttggatgaagaaacaaagaggagagatcagatgattaaaggggctattgaagttttaattcgtgaatactccagtgagctaaatgccccctcacaggaatctgattctcaccccaggaagaagaagaaggaaaagaaggaggacgtatgtgttctgacaacaacatatcatttctaccgtttgttttttatgatatcactcttatactttgattacatgtcagttttcttttttctttttttttctttttttttttttttttttttttttgagatggaggctccctttgtctcccaggctggaatgcagtggtgcaatctcagttcactgtaacctccgcctccggggttcgagcgattctactgcctcagcctcctgagtagctgggactacaggcatccgccaccatgcccggctaattttttggtttttagtagagacggggtttcaccgtgttagccaggatggtctcaatctcgtgacctcgtggtcgacccgcctcggcctcccacagtgctgggattacaggcgtgagccaccgtgcccggccacattttaaacttttttacagagacaaggtctcactatgttttctaggctggtctccaactcctgggttcaggttatcctcctgcctccgcttcctaaagtgccaggattacagtcatgagccactgcgcccggcccctattttactttgtttgcctatggttgttctgtctctgttctaagcaagaaaccagatctgattcactgaagatttccacccactcttaatttttagctgcctttccttaagaaactatgtcacattcccctccctgaacaataatggtattgaataatcaaactggaggattctgaaagagcagtacaacttgaaacattcctcctcagtgaattgattgctacctctttgtggccctaagctaattgtccaggttgaaagaaaaggtttagttttctcatacttatttcctttggataaacttagataaattataggaagtgttcttttaaaaatactggaagaagccagaagtggtggctgacacatgtagtcccagcaacttgggaggctgaggggagaattacttgagcccatgaacttgagtctagcctgggccacagagcgagacccttctataaagtaagaaaaaaaatcccacaaatattggaagtgttttatttatgtttttgagacagtatcttgctctgtcacacagactggaggatggtggcgcaattacggctcactgcagccttgaatacccatcctaaagtgatcctcatgtgttagcctcctgagaagctgagactataggcatgtgctaccatacccagctaatttttgtattttttgtagagacagggtttcaccatgttgcccaagctggtgttgaactcctgagctcaaatgatctgcctgcctcagccttccaaagtgctgggactacaagtgtgaatcactcatagctggctcaacgtgttttatatgcatgcattatgtaataaaaaagtactacgtggtatatatattatgattagttatgaatggatggttacattttatattattttaaatttcagtgcctttttaggccatattcagttttctttgtggccagatacatacatttttattatttggtatgtgtttcctcgtttggtcatagaacttttcttttttgttcccgcccctacccccacccaagacggagtctcactcacttgcccaggctggagtgcagcagctgcgatctcagctcactgcaagctctgcctcccgggttcaagcgattctcctgcctcagcctcctgagtagctgggactacacgtgcctgctgccacgcccagctacttttttgtatttttaatagagatgggtttcactgtgttagccaggatggtctcgatctgctgacctcgtgatccgcgtgagccaccgtgcccgacccataacttttctaaggaggtgtattctgttaggaatggtaattggtagggtcagtaaggtacagggtaattgaggcctgtagaattcattcttcctctttcttcattagtgggaaaggagaaaaataacatatttgtttgatgtggattgggaggagataataaattcttcctctgtggcaggagttatgggtaaatattgttggtatgattagaaagccctgctactatgagagcaccttctatatttccatttcttgggggtgttggagtatccagagaggagggtagtgtgtgatcagttattgtaaaaagagtgaaatcacttctattcccaagtaatttgaaatcaagaaagcatcacagaagtgtactgtattgttcacgtcataaatgtatagggcattgctttgcagattagtatgagctctgtttttcttttttaaaaaagattcttggtggattttttcacagattttccgcagatttccagtggccccactgatcccttatccactcatcactaaggttagtttaaattgtaggctttgacaatacctgtgtttactgctgattgttgatttgtcattcttgtctatctgatttttcactatttaactttagattgttagatttgttattgtggatattctgtttacttatttactctttgagacctatacagaatatctaacctttaactgtttatattgaagtagggtgttctttattcattccctcctgtgcccgttttcttttaggaggatataaatgctatagaaatggaagaagacaaaagagacctgatatctcgagagatcagcaaattcagagacacacataaggtagtattcttgtcttttcacttgataccaatctagactttttacagaatccaaagcaaagagacaaaaaaaatcaaccttaaattagaatataattttaaatgttttttataggtttaattgatatttagatagaaaaaagaaacagaagaccaataccatattaaagtggtccttgacatgttgtgcttagttttttcagttactgactattctgcagtcatctcactttaatatgaatagaagctaattttatttttagatttcaacataaacatcaaggtcagacttaaattagattcagggggcagcaggataacatacactgtagtgtatttctgggggcagttatttaacttgatcttaggaataccttttctttagagctgagattaaaatttacattttatatttgtatagatttaagttgagtgggggagattttaaacagtaggtcagtggttaccagacttaccaaattttagatgcatggaagaactgtaaattcccataaagctaatctattcattgacccccaccattatgatagagatcatatggtgactaatgcaagatgaaactctcagcttggaaagtaacaaggaataggatgtaagtatgagcttctgttttttattatatttatggatgccccctcagaaaaatatgcaaaggggtaactggcttggaaatgggtatttatgcatagtaaatcccactcacgagttttgcctatttgaagcttctctcaatgacagtgcatctgtgaatgttcgctggtgttgaaaatgatgcttttgaacggtgcaatgcaaacactgcatgaaatgtattttgatggtcgagataataaggtgttgctggttcttactgatagactgagagatctttaactcagtgaaatgttaaatgttcattttctcttttattcttactttttcccattgctttcaaaatctgcagttcacaaataatgccaatgaatcagtgctgctgaacacttactatccagatgcccagcccttgctcacaaacacaatgctttttcaagaattaaatgtgtctaagagcacaaacataattctcccaaaattaattttgagagttgaaaaggtggtctatgggaaatcattttagatgaataattttggttaggtataatactgaaattcaggaccgagtaagcttaaaaatggtatatggttgtgtgtgtggtttaccccctttttgtttttatttatttgttaaaccctgtcatgttattggtaaattatgaggaaatcatgttttaagaaaaattcaaaaatatatttgctttaaagtttgggaatctgttaggcattttactgccttagtattatttcactggagggaatgttttgaattttcagaatgtcttttcaaaataaaaagaaatcaaaatgaaaaaccaaaacagttgttttttattgggtggtttggctaaaagggttgtttgaaactccagtaacaaaaaatgagctcagtgaacctttgcatgttttggtatgagtttattaaataaccacagactgtcagggtatcagcgtggcagggggcgtccatttacagcacggatgagtctgaagagagaataaggtaagatttatgattttttaatctgtcctttcctcttcatgactttcttacataattttagactcacctcatttcccttctccagtctttctttaaaaatatacatgtatatgtttacatgtatacctgtatttgtatacatgtgtgtatatatatatatatatatatctcatatataaacttcaggaaacatttagtatggactagattcactcactttttcatttacttagaaccaaacttttgaaatgagttctgaaacaaatggttatttatataactgaatataaggagcacagtgaaataagcaagaattaaaaattgaggaattctacaggaaaaattagtattggaacagctaaaatattctgtaagtatctatttcagaaataaacaaatttctttataagtgtatgccattgaggtaagttttatatagtctagcctcattttacaatataaatttttatattcattggaactgtttcagaaatgagatttttccccctttaatagctgttagtttctgtcctctttctatcatatcttatttcatccctttgtaatttcaatgtattcagttttgactttgcccgtattctacttcgatatagactggcacagcaactgaatatattgctcatacattagctttcctttcataacctgctataagttctctgatccatgaggaagagaaaaagagtatctgacaggtaagattgctttttaaagttgttttaaatgcattacatgactgagaaaagaaaaatgcacattttattgttgcagtttaaaatttcattttggtgaaactaaacgtgaaacaaaagggataaatgtgttttgttttgttttgttttacctgtttggggtatttttttctgagtttgtgtagaaaccgtgtggtacactggtaatcttgtcagggtacaaacttggtctgactttgttatttggtttatttgtgaaccatgtacttgctcttcctcccagaaacatagcttgtaggcaaggttaatccagtgttggcgatccatgtcctagcacagcatctgtaagttaatgcacaatcgttccttccaaggatggatttatcattgtaaatatattttcattgtcttacaggcataatgggcataagtatgttgcttttaaatattttaaattaaactattacagttacatatattttgcttgaagtgagtgattttcaaactttttgtatttggtgggctgtccatcttgtaatggtgggagtaaatgtttccatagatgataaggcagttcttggctgaattcagcttgtgtttcttttggagggtgggcaaatcagagggcagagattatttagttgcattataggtattcttctataccacttgccctttgaaaccctcaacttgaggtaatgtgcagtctggggttttaattagtattaataatcttgtggatttacagaaatctataatgcacagagttgagttttaaccaatgatcgtattcatagaaaatatttcgaaccaccacattcttcatggtcattttagttagtacatagtcattgagtggccagccacacctgacacaatctcccagcatccaagattggagattcctggtctgtgtagagtatatggttttgcacgaaatctttctagtcttgtgattgcttcagtttaatttgtcacataaaaccacaagtatttaatattaatgtatcagtggtttggtgtttttgttcccagtactgggctttgcgccgggaaaaatctgaatactggagctacagagttaactctaaaagtgcttttattggtttctagaaactggaagaagagaaaggcaaaaaggaaaaagaaagacaggaaattgagaaagaacggagagaaagagagagggagcgtgaaagggaacgagaaaggcgagaacgggaacgagaaagggaaagagaacgtgaacgagaaaaggagaaagaacgggagcgggaacgagaacgggatagggaccgtgaccggacaaaagagagagaccgagatcgggatcgagagagagatcgtgaccgggatagagaaaggagctcagatcgtaataaggatcgcagtcgatcaaggtaaggctttacagaagttactgtttcctgatagctttaagaaaactatcgggtagtcctccagagtaccatttgcattcatggaatgagaacttttgtgtgtgtgtgagacattctcactctgtcactcagcctggactgcagtggctgagcaatctccgcctcctgggttcaagtgattctcattcctcagcctcccaagtagctgggattacaggttcataccaccatgcccagctaattttttgtatttttggtagagatggggttttgccatgttaatcagcctggttttgaactcctggcctcaagtgatccgcctgcctcagcctccctaagtgctgggattataagcgtgagtcactgtgcccagcctgagaatttttttagagacaacatggtctttgtctgtctgtctgtctgtctgtctctctctctctctctctctctctctcacacacacacacacacacacacacacacacacacacactctctctctctctctctctctcactatgggtaaaagtaataattttcaactctggttaatttctgtctgaagccactttttatagaaacacagtggccactcaatgttctgggcagacatgactccctgctgtctccttgggtccgtgggcatttttaaagttgctctttttgttgaagttctgtatactgagacatcagctctagcaccacgtctttttagcccctagcatttttatttgtttttgtagcccactgcactgccatagcttaatctttctgtctataaatttactatctacctctacctctggctcctagtaattttactctttggaaggttttattttttatttaaaattttttaattatattgatttttttttttttctgagacaagtttttgctctgttgcccaagttggagtgcagtggtacagtgttggctcattgcaacctttgcctcccaggcttaagcaattctgcttcagcctcccgagtaactgggactacaggcacacaccactgtcccggactaatttttgtattttttttgtagagtctaggttttgctatgttgcccagctggtctcgaactcctgagctcaggtaatctgcctgcctcagcctcccaaagtgctgggattacaggcgtgagccaccatgcccggccttatattgaattattttgatgagtcatctcactgttgaataatgaggtatagcaaacatgaacaaaggaagaggagaaagcagcaaggaagagagaaaaagctcctttttcttcaggctagtttaaaaatatacattactgtgttgcagtttcttacttgattatggctggagggagttccactttaggtcatttcacctagttgctagaactggaaacccagagctctcaaccttcagtaggcattaaaattatttcattctgtccattcctgatacagtcattgagaggttggtatgtgtaaaatccatctcttatatttatggcataagtgtatccataaagaacatatttcatatatacatattaaatacacacacacacacacacacacacacacagagttatttgattagatccttggtatcatgctgtatgtaatctgcagtttggttttattacttttttttttttttttttggagacgggctggagtgcagtgatacagtcataggtcactgtaagctccaagtcctgggctcatgggatcttcccacatcagcctctggagtaggcaggactacaggcacgtgccaccatgcctcctggcctcaagcaggcctcctacctcggcttcttaaaatgttgggattagattttatcactcttaattaaatatttgagaactttcagtgctgatacttataaaagttctaacttaatccatgcaacatgtcagaattctgttttccacatgtgccagcacttactccttgatctctagtaagctaaactatctcttaacatattcattagtccttcatatttcttttgggaattaagttttccttttttctgttttacaccatcaggggattgactattatttcagtatatgatgggcattaactaaccattcattttaatgatttataactattttatattcagattgtatttgttttctgacataccagtaagcattaggtattagaatgcattttaggatttgggactgcaatttatgtctttctgatgagtgtagaggaggttacatagttttatggaaatcaagtgctagattctggcctgtgagattttatattatttcataatgtatgttgtcctcctttactttggtcttgaaaacagaaagtagactgacagatttgtaaaatattttgtttacattagagaaaaaagcagagatcgtgaaagggaacgagagcgggaaagagagagagagagagaacgagagcgagaacgagaacgggagcgagagagagagcgagagagggaacgggagcgagaaagagaaaaagacaaaaaacgggaccgagaagaagatgaagaagatgcatacgaacgaagaaaacttgaaagaaaactccgagagaaagaagctgcttatcaagaggtaagttgagaaaatgcctttattcttaaatcttggtatcccttaataggttaatcaatatttatagaatgctatgtataaatttttaaagctttgaaaatttaatttttttagcgccttaagaattgggaaatcagagaacgaaagaaaacccgggaatatgagaaagaagctgaaagagaagaagaaagaagaagagaaatggtaagattctaggctaaaataagtgatttttcaggtaaaaagtcagattgtatctttactgctaactacaagtaacttaataattgaaatgcacaagcttctctattcatgtataatttaatttttatgtattttgagtaattttgagccaatttaagtacaccaaaatcttttttcctcttcaaatttttgctgcatctaaagttatctttttgtataccatcaaagtaaatttgtcatatagtaatatttaagtcaagaatttattaacttatttttaagaatctgcatatttttaaaattgttgaactgttgttattagatataatagttgcatttgaaattccgtaagttaagagattcattttatctcatggattgtttactattggtttagagttggggggcattacctttaaattgattgatgaacatgatttaaatttctgcgtttcttaaaaactatttcttatagtatcatctaccttaaaaatggaattaaaaaccatatacatatacacatatacatacatgtatacatatatatgtatatactttttttttttttttgtggagacggagtgttgctctgccacccaggctggggtgtgatctcggctcactgcaaccttctcctcccaggttcaagcgataagcgattctcctgcctcagcctcccgagtagctgggattacaggcgtgtgccacaacacccagctaatattttgtatttttagtagagacggagtttcaccatgttggccaggatggtctcaaactcctgtcctcaaatgatctgcctgccttggcctcccaaagtgctgggattacaggcgtgtgccaccacgcccagccatattttttcgtttaataagataatctccagttttgttggtgtgcttaggtattgtattttgaagattatattcaaagagcatatttattgtagcgtagcgtatatatatagtttgcattttacagatgcgtcctcattcagacttttcttagaggtaaaaaatttaaaatgtctaatgtgacctatacttaatatatggagtatatgaaaactaaaatttaagaggacaagaaaaatcttttttttaaccaaagtattattatatttattatggcatagagtggtattttatacatatctcattttacagtaaaaacattttatgtacaactgtagagagatagctgcacagatagctccaacttaaattagaaaatattttctctatagaaaataataaaaacaccgtttcccaggctagcccaacaagtttatttaaaccaaatagctgaatacatatacatttataaatatggtttgaattctgggatccaggagaaactttagtttcatttattgaaacggccatgtttgtcttaaaattatgtgaagagaaattcctataagtctccctcttactcttggtttatgtctgggtcagaaaaatctgtttacacaaaaaagggaagagtaatctttattacttgtatgttaattttatacattgtccttatttcctcaaaggccaaagaagctaaacgactaaaagaattcttagaagactatgatgatgatagagatgaccccaaatattacaggtaaagaaggcttgttctgtggattcatacttggttttttattagctgtgtttttccatctgcacagttgataatgcatgttcactaagtggaataagaaaaacaaactttcacattctgagtaattattaattctatagctaatacactgttttcgttgggagaaaagagctatcagaaaaggataaacatttctatgcatcttttgtgcagtgggggagcccatgatagtattatatcaaacaatactatttttttctttgtgtgttgtaaataggtctgatttttaaaattttttcttgattcttttagagacagggtcttacctcggctggaatgcaggggcatgatcatagttcactgtaaccttgaactcttgggctcaagcagtcctccctctgcagtctcttgagtaggttggactataggtgtgggctaccacacctgtgtgctaggtccaatttttatagcaagttacaacgaatctctgtaactatctgggtttttctagaaattttggtcttctagcaatttgacctcccgtctctcaccccatctccaaattgatacattattgtgaagtaacagttgtgacaactgccttctctcattctttgttcccatggcattttcaaactactctcattctagtatttgtgacattatgccaaaattgcttgttttgttcttccttccatccaaactgtaagttccctggggatgtagacagtgtcttgatactattttatctctaatttgtctgacatgatacaatcatagtgaagatatttaatatagttaaatttaatacagtatagccaaaataattaaaacattggaattagtagcttaaatctcaagggtgccagggatttggctttgtagaaagtgccatgaaatcagtaaaatattgaaggctagaagcataaagtggcaatgtataacgtcaacattctgagaagtaatgaactgctagataggagagaacctctgctttctgttgattctacactactttctgagataatttttacaagtgaataaattgaggatacagaactctcagtgctactaatgctacttgatatatttttttaggttggtatctaggaaaacgaaaattatttgttgggtattccttgtgaaataggcacaaagtgtgagctctctttctgaaagtgactattttacttgtttagacacttattagaatgactttaagaatgaagggaacatagtgataaatgacaagataatgcttgttatacatttacatgtagagagcacactctggtgtgttccgtagatacagaacattaagacattctttaacctcttagcatgcaggttgtaatgttgaaaagaggtgctgttggagatgtcatgtttacttctcaatgatcggagtattaaatgaagccttttatcattcacttttacagaggaagtgctcttcagaaaaggttgcgtgatagagaaaaggaaatggaagcagatgaacgagataggaagagagagaaggaggagcttgaggaaatcaggcagcgccttctggcagaagggcatccagatccagatgcagagctccagagggtaagatactgtaccatctggtcgggcgcggtggctcacgcctgtaatcccagctctttgggaggccgaggcgggcggatcacgaggtcgggagatcgagatcatcctggctaacacggtgaaaccccgtctctattaaaaatacaaaagattagccgggtgtagtggtgggcgcctgtagtcccagctactcgggaggccgaggcaggagaatggcgtgaacccgggaggcggagcttgcagtgagccgagatcgcgccactgcactccagcctgggcgacagagcccctgactcctgggttcaagcgattctcctgcctcaggtacccgagtagtagtacggattacaggtgtgtgccacctcgcctggctaatttttgtatttttatttttatttatttatttttttgagatggggtctcgctgtgtcgcccaggctggagtgcagtggtgtcatcttggctcactgcagcctccacttcccaggctccagggattctcgtgcctcagcctcctgagtagctggggttacaggcacgtgccaccactcctgactaatgtttgtatttttagtggcgacggggttttaccatgttggccaggctagtattaaactcctgacctcaagtgatccgcccatcttggcatcccaaagtcctgggattacaggagtgaaccaccgtgcccggccttttttttttttccctgagacagagtctggctttgttgcccaggctggagtgcagtagcggaatctctgttcactgcaccctctgcctcctgggcaagtggtcctcaggcctctacctcctgagtatctgggacacttacaggcatgagcagaatgcctgactgaatactttatgcttttttgtagagatggggttttcctgtgttacccaggattgagccactgcccatgtccttttttttttctttttctttttctttttttttgagatggagtcttgctttgttgcccaggctgtagtgcgattctgcaaggctcactgcaacctccacctcccaggttcaagcgattctcctgcctcagcctcctgagtagctgggattacaggcgtgcaccaccacacctggctaatttttgtattttcagtaaagacagcgtttcaccatgttggccaagctggtctcaaagtcctgacctcagatgatctgcccaccgcggcctcccaaagtgctgggattacaggcatgagccaccatacctggccttttctcttttcataaagatattttacaagaggtaatgtaaaacaaaaatcaagttgaatggtgtagagttgtagttaatcagattattgtttgggttttagatggaacaagaggctgagaggcgcaggcagccacaaataaagcaagagccagaatcagaagaggaggaagaagaaaagcaagaaaaagaagaaaaacgagaagaacccatggaagaggaagaggagccagagcaaaagccttgtctgaaacctactctgaggcccatcagctctgctccatctgtttcctctgccagtggcaatgcaacacctaacactcctggggatgagtctccctgtggtattattattcctcatgaaaactcaccagatcaacagcaacctgaggagcataggccaaaaataggactaagtcttaaactgggtacgttagcatttccttccttctttattttcttcccttcacccctgcaaatacctgtattgtgctttaaagaaaaaaatttatatttgtgcttggttaggtagatagaagattactaaaaaatgcctttctagctcacgattgttttcatagttttactagtgctcctatatctgcagctgcctcgagttctgagaagaagtgaaaagtttaattttctagcacttgtgagtagtgagttattttttacagttgggatctttctctaagatttgtggaagtatattttgcattgcttttgagggatggtgggttataaaatgaaacatttggaaattaagtcatcttgctaagagagtgtttttactgtaggtgcttccaatagtcctggtcagcctaattctgtgaagagaaagaaactacctgtagatagtgtctttaacaaatttgaggatgaagacagtgatgacgtaccccgaaaaaggaaactggttcccttggattatggtgaagatgataaaaatgcaaccaaaggcactgtaaacactgaagaaaagcgtaaacacattaagagtctcattgagaaaatccctacagccaaacctgagctcttcgcttatcccctggattggtctattgtggattctgtgagtaggaaattatatttcatcatattattgggaacagttggaatatgccatacaaattcatttgaagaaaaaaaaacctcatttgattctattaatgacaaataagtagggatgatcatcttgacaccaactcaatgccatggtcaagaaattagtaataatggaaattttttttgtgctacttgaagacttactaaaagcagatgattgtatcttgatacatatctgtcttagttcaacttgtgaaataacattatattttagtctcaggaaaaatcatgaagctttaataactgttatagcaagttacaattctttaattcagtaaccgtggtttgttttgcagatactgatggaacgtcgaattagaccatggattaataagaaaatcatagaatatataggtgaagaagaagctacattagttgattttgtttgttctaaggttagtcttctattctcttccatgccagcatttattttatatattaaaatattagacacttcttaaaagagcagaaattttacagagtcaagttccatgatggtttaggttcagttaagtgatttatatctgcttttttaaagttatttttatttttggtgtgttttttttttattcactgcagtggatgcagatttatgtctgctttaatgaacctttccatccaacttcagactcctcacaccacatgtttttatttcagtggtcgaggaggatggaattgctggttactgccaattgtgtgctgtctttctgcccctgagaatgctgtgccatcttcttcttgtcttggttggaataattatgttgagattttttggacgtagccaatatcttttcccaactcctttgtcagtcacccatgctttggataggatcaaaatagttcctttcatatcgtagtaacgatcagtgtttattgactgacaggctgtgttctcggcaggtattgtgttagttttgtttgttttgttttgttttgttttttgttttttgtttttgttttttcttttgagtcggagttttgctttgtcctacaggctggagtgcagtggcgcaatcatggctcactgcagctttgaacgcccagcctagactgatcttcctgccttagtatcctgagaagccggaactataggcatatgccaccacaccctgctaattttttttttctttttttgttttaaattatactttaaattctaggatacatatgcataacgtgcaggtttgttacataggagtacatgtgccatggtggtttgctacacccatcaacctgtcatctacattaggtatttctcctaatgctctccctcccctagctccccacccgccgacaggcccagctgtgtgatgttcccctccctgtgtccatgtgttctcattgttcagctaccacttatgagtgagaacatgtggtgtttggtttacaccaggctaattttttgtatttttagtggagatggggtttcaccatgttggccaggctggtcttgaactcctgacctcaagtgatctgcccaagttggcctcccaaagtgcggggattacaaggcgtgagccatcacaccagccgaagataaagttctataaaatgttaacaagacagtggcccacgccttgtaattcccgcactttgggaggccaatggggcagaacacttgtggtcacgagtttgagaccagcccggccaatatggtaaaaccccgcctctactaaaaagtcaaaaattgggtgcgctgggtggcaggcacctgtaatcccagctactcgggaggctgaggcaggagaatcacttgaacccgggaggcggaggttgaagtgagctgtgattgcgccattgcactccaagcctgtgtgacaagagtgagactctgtctcaaaataaaaaaaaagaaaaaagaaaaacttcttttaacctaacacttagaatctgtctgtcatgaatgttatacccattttatacatgaagaaattgaagtttaaggagagattgtgtcttggctatgttttatactgagtctagcctctgaaacccatgctcttaaccactaaggtatatcttcccattgtctcctgaaaacatagtcttaactttaataaaacagttaacatagtagaaacaccatatttctataaaggtatagctatggtatttttttgccagtagtgctcttttgatattatgaacagtaaatttactctgtcttctctaacttgtaattattgtggcattaaaacttgtgtgagatttgacttaaaattagactacagaccactatggagattaatattccaggttttggtgcctctttcgttgaagaatgatattctgaaaattaaaacatttatagaatggttccttagccgcaagaagttcctgtatgaatttgaggattcataccttaaaatttcttgactgtattgttaattttttatttatttttaatgtgacaattatttttctcttttaggttatggctcatagttcaccccagagcattttagatgatgttgccatggtaagttagaaattcactatttttatttcttttaatttaaaaaaagtttttggttttttttgtcttaaaatatagatggggtctcaccacgttgcccagggtagtcttaaattcctaggcttaagtgatcctcctgcctcagcctcccaaagtgttgagattacaggcatcagccaccacacctggccagaaatgcactattattaatattttaattaacatctatataaactcacttttgaatttgattcacttcctgcctgtctttgttccagaatcttttttaggcctgaattaaaacttgagtaatcccagtacttgggaggctgaggcgggtggatcacaaggtcaagagatcgagaccatcctggccagcatggtgaaaccccgtctctatgaaaaatacaaaaattagctgtgcgtggtggcgtgtgcctatagtcccagctactcggggagtctgaggcaggagaatcacttgaacctgtgaggtggaggttgcagtgagccgagatcatgccattgcactccagcctggtgacagagtgagaccccatctctaaataaataaataaggcttcattcttttccaccagttccattcatgttttccctatgcccagcacaatgtgctagaagcataaaagtagaacaaatgacctgtagtagcagagagataggtatacaggtactgaaaccttgatgtacttgtttgaattagatatgtagaaaggataatggaggtagaggagatagaacatctgatggcattgatagcagttaggttaagcatcacaaggattactacaggaactgatacgtgtgtgtgtgtgtgtgtgtgtgtgtgtgtgtgtgtgtgttttaagtcggatacatgtgcaggtttgttacataggtaaacttgtgtcatgggggtttgttgaacagattatttcatcacccaggtgttaagcctagtactcattagttatttttcctgatcctctccctcctcccaccctctgccctacgataggccccattgtgtgttgttcccctctcttcgttcatgttttttcatcatttagctcccgcttataagtgaaaacatactgtatttggttttctgttcctgtgttagtttgctaaggatagtggcctccagctccatccatgtccctgtaaaggacactatttcgttttttatggccacaagattgtacatatgtgctgctttttggacaggtatccaaacacctgttgtattgacagtaaacatcaaatccccgttgcatttaatttgggattacagtcagtggtagcatgtagttaacactgtgattttgtgagacaaggaaaggagaagaaaattgatggtaaaggttgagcaagagattgaactatgatctccaagttaggaagagaagaaaatagtatctgaatagagctggtggtttgaatgaattaaggactagtggttccagtgaagttgtggaaggcgaattgtaataaaacaactgaaaggagaggttatggtcagagtgtagaaagttcaagtctatatgtgataggtcagcccagacgatggcaaggtgcatagtatgactatgggaaattcctgggtattgggagtcagattggagagaaatactggaaatagttgccagagcactcatttaagtggggggaaagactagatacttgccagatagctgctcttacagtggataaggtggtgagagctcatgaacgtccatggagttgtttttttttttaccaagaaagaaacagtgaagacccacaagtcattcctgtggagattaagacattgagagtgagagactgcctgagaagtgccggggctctaggagatagaggagggtttctgttaagaggaaaaacctaatttagttgttgatgtgtagtataaaatggaatagcggtccaaagggcagagcgggaagacagcaatgggaagatgagtaaggaaggaaaaatcatcaagcatgatatgaaatggtagatgactgggagtacttgcacttggaactgccaccagagatgtcagggagggacatcgtggggtttatagtcaaaaagaaggattgtgaggtctagctgctttgtgtccaggcattttatggtgtctaaagccagataacattccttttctgctgcctagctagcttgatgcagctgtcatttagaacacctgataaaacatttgtgaaaacttcattgcctcagaggaaaggagaaatgtgaatagatttcagtccttggggctgaattctgaactttcctgaagcttccagccccgtttttcttggagtagagggtgtcgtagttaggcctgagtgaagacattttttaaataaaactgtgttctagcgtttggcctcagcagagttcctatcatacatagtaaagatttcatgtcagtgttaattttagattttttgatctgttgtaatatattgatatttgaagtgtatttagaccactgtttatgattttgtggctcgttgattagaatgagaggaaaccagttgagctagtgttgtcaaacagctctgctaaaaagctcatggggccttgtaaatatttcttgaataaatgaggagactgaatttttagcctgagtactgtttcactcttaacaaaagtctgacttctttatattatacctttttcattttatgtaaattaaatgaagtttggttgcattttgtgcctacatctctctgaagtgtgactcagatgtgaattagtgttacaacagagttcttcaactaaagtcaaatctggctcatagaaatctgatcaaaagttctttaattaattattgctatcattgagaaagtgacagaaatttctttcttttaatttctttcttcttttctttttttttttttttttttttttttttgagacagagtcttgctctgtttcccaggctatatggagtgacagtggcgcgatcttggctcactgtaacctccacttcttgggttcaagcaattctcctgcttcagcctcccaagtagttgggattacaggtgcccacccgcacgcctggctaatttttgtatttttagtattgacgggtttcaccatgttggcccggctggtctcaaactcctgacctcaggtgatctgcctacctaggcctcccaaagtgctgggattacaggcgtgagccactgtgcccagtctcttcccaggtatttattaagcacttgttatataccagtcagttgtcagagcacttaactacataccaactcttttaattcccacttagtacctactgctatggtgtgtagctacatcgcctccactttagaggtgagggaactgaggctcaggttaagtaacccaaccaaggacctatcgctagtaagaggcagcagtgcaatttgaacctatgtagcctgactagagaatttgaaccaatgtagtctgactagagattgagtactctaaattcctaccccaaacttcctctatgaagacctggcaacactagaccacatttctggagcacagtcatagctgcccccttcagaagggagcagagtaggccatttcacctcatagcagccataatgtagaggggcagatgtgtgtatgggatgatggcaggaatagtgatggggacacaaggaccctataactcataagtagagaggaagacaatttcctcatccaccactggaagaagacttgttactcagtagtcatgtgtgccccgtgatgattgtatttgcttattgtgtttactgtattctggacactgtactaaatacttatattctcatttaatgttcactttagtgtcacatacacaataaatgctagttaagatggtacggttgggctgtgcacagcagctcaaacctgtaatcccagcactttggaaggccaaggtgcgcagattgcttgagcccaggagtttgagaccagcctgggcaacatagtgagaccctgtctctactaaaaagcacaaaaatgtagccaggagtagtggtgcacacctgtagtcctagctactggtgaggctgatgtgggagtatcacttgagcctgggaggtcaaggctgtagtgcaccatgatcatgccactgtactccaggctgggtgacaagagagatcctgtctccggaaaaaaaaaaaaaaagtttgtgaggttgtgtttttggagataaatgaaattctgtattgttattatgtaattgtatattatttagttcttcttaaattactgtgttctttatgaaaagcgtatggtttccttgggaagtagttttgtcagacatgtataattgcagtatctgtaaaggtaaaataaaagaataaaaggtggatcacaaaaatatggtactctttgtgtttagtaagccatggaattttgaatgatttttttttgttgtcgttgttaatttacatttactatttatttatttatttagagacggagttttgctcttgttgaccaggctggagtgcagtggcatgatcttggctcactgcaacctccgcctcccaggttcaagcgattctcctacctcagcctcccgagtagctgggattacaggtgccggccaccatgcccagctaatttttgtatttttagtagagatggggtttcgtcatgttggccaggctggtcttgaactcttgacctctggtgatccacctgcctcagcctcccaaagtgctgggattataggtgtgagccactgtgcccggtccatttactatttattaataatacatttctcacactggacaaattttctttaagtcattttactgaaagcaaaactacttcctaaggaaaacaaatacgtattataaagaacgtagtaatttaagaagaactaaatatacaactatgtaataacaatacagaatctcatgtatcccctcaaaacaaccttaaaacttttttgttttttttgtttttcttttttgagatggagtcttgctctgttgctcaggctggagtgcagtggcgcgatcttggcaagctccgcctcctgggttcacgccattctcctgcctcagcctccccagcagctgggaatacaggcgcacgctgccatgcccagctagttttttgtatttttagtagagatggggtttcaccatgttagtcaggatggtcttgatctcctgaccttgtgatccgctcgcttcggcctcccaaaatgctgggattacaggcgtgagccaccacacccggccactaaaacaaccttaaaatcttaactagcatttaagtaataagtgcttattgtcagtggatgaaaaacttttttatactggccactgtttttggcagatgttgatgattgcttctcttacatgtgttgctgttttgtttcctctttaggtacttgatgaagaagcagaagtttttatagtcaaaatgtggagattattgatatatgaaacagaagccaagaaaattggtcttgtgaagtaaaactttttatatttagagttccatttcagatttcttctttgccacccttttaaggactttgaatttttctttgtctttgaagacattgtgagatctgtaattttttttttttgtagaaaatgtgaattttttggtcctctaatttgttgttgccctgtgtactcccttggttgtaaagtcatctgaatccttggttctctttatactcaccaggtacaaattactggtatgttttataagccgcagctactgtacacagcctatctgatataatcttgttctgctgatttgtttcttgtaaatattaaaacgactccccaattattttgcagaattgcacttaatattgaaatgtactgtataggaaccaacatgaacaattttaattgaaaacaccagtcataaactattaccacccccactctcttttgatcagaaatggcaagcccttgtgaaggcatggagtttaaaattggaatgcaaaaattagcagacaatccattcctactgtatttctgtatgaatgtgtttgtgaatgtatgtgtaaaagtctttcttttccctaatttgctttggtggggtccttaaaacatttcccaactaaagaatagaattgtaaaggaaaagtggtactgttccaacctgaaatgtctgttataattaggttattagtttcccagagcatggtgttctcgtgtcgtgagcaatgtggtttgctaactggatggggttttcttattaataagatggctgcttcagcttctcttttaaaggaatgtggatcatagtgatttttccttttaattttattgctcagaaatgaggcatatcctaaaaatcctggagagctgtatttaatgcatttttgcactaattggtccttagtttaattctattgtatctgtttatttaacaaaaaattcatcataccaaaaagtgtaagtgaaaaccccctttaaaacaaaacaaaaaaatgaaataaaattaggcaaattgacagacagtgagagttttacaaacatgataggtattctgctcggcaatttgtaagtttacatgttatttaaggataaaggtaaatcattcaaggcagttaccaaccactaactatttgttttcatttttgtcttgtagaaggtttatatcttgttttaccttggctcattagtgtttaaaaatgtactgatgatgtgcttagagaaattcctggggctttcttcgttgtagatcagaatttcaccagggagtaaaattacctgaaaacgtaagaagttttaaacagcttttcacacaaattagatgcaactgttcccatgtctgagtacttatttaaaagaaaggtaaagattggcctgttagaaaaagcataatgtgagctttggattactggattttttttttttttaaacacacctggagaggacatttgaaaacactgttcttaccctcgaaccctgatgtggttccattatgtaaatatttcaaatattaaaaatgtatatatttgatcctggggactcatattctttcagaatcatgtaaataaatggcatcatgttgtaattgtgtggtgcatactagaaaagttaaaaatatgggctgaactttttatggacttgatttttatgactattggtatctaaaggtcaaggaagccatttacattattttggatgaatctactatacatctatggaaatgtctcttttattttaaattctggtttctcaacggaaaatttcagaaaagatgccccttgccattttcgttaatttttcagtcttttcttagacacacccccagcctaagaccttgttcgaggagtttattgtgtctgtcttttcttaacatactgcactgttcttaagcatcatattgtgttgtttttatttagccactattaacatgaaggtttattcaggtagatttgatttcctttgcttcgtttcttctcctgctctgtcaactgtacttatcttaaagggccactctaaaaacaagggagatgtcgtaatctgaaacctttggggagatgtactctgtactgcataacatctccagtgaggtttgtgacaggacctcaactaaatatatgaatttgtgcaagttcatatattaaagtttctgcagcagagtgaaaattgttacagtaaatgtggtagaaactgttaatcgcttaatgccagtttaaatcatgttttgtaaccaagcttcagtaaaaggctttagattgtcagagttggttgatttttagaattgtatatataaagaattagacattaaacaggcatattctagtgtctgaaaatacacataagaaatttctattaagttgcttgaactttgtgggttaattttaccataatctcataaattaattttagtttgaaaaccttatacagtatgaattcattttgccatttcaagttgttatataaagagcatgaaagtctttttttgttgttttttttgggtttttttttttttgagaggaagttgtgcttttgtcgcccaggatggagtgcaatggcgcgagctcagctcacttcaacttccgcctcccgggttctggagatattctgcttcagttttctgagtagctgggattacaggtgcccaccacgacacctggctaattttttgtatttttagtagagacaggatttcaccttgttggccaggctggtctcaaactcctgacctcaggtgatccacccgcctcagcctcccaaagtgctggtattacaggcgtgagccaccttgcctggccaaagcgtgaacatcttaagaaccagtcttgatctggcaaaaaagtagtagaatactacttttctttatttgtccctaaaaataaagtatgtacatctgttcacaaggaagaaaggtaagtttgaagttgtttttcttaaactttaatgtgaccccaaatcatctgaggagtgcttgtagaaatagagacactgaagtagcagcgctggggtggcgccgcaggctttgcatttctggacagctcccagctaatgtcattgccaactgatccaagactacattttgattagcactttaaggtgtctattcagtattattttatcctaacagactacataaatgcagctgaattttcctttaagtagattttaaagagaaaaacattttttgaggcaaatacacgtaactcatgaacgtaatgtaatcttgcaaaattatgtctgagaaagccctaatattctaggctttttttccatccagccctgaaaattttttctgtagataactttatgttgtaacttattctgaatcttattatggcatttccctgtaaactatgtaagtgtaagctaatgattattttgtgaagcgtgctgtttcaggtattaatctgccatgaatactagatatagtagaaaaactgagaaaacatttagcttgagagccaatttgaactagacactatctttttttctcctttttaatggaataaatttaatgcaaataagtgtaagcaggtatacaatgtttagatgaggcttattttcccaactctttttaacaggttttatgatatccccaatttatacccaaaagactgctgagaggttttatgtcaaattgattacaaacttctctgggttgtatttcagtcttctgttaagtatgaaattgagaaatagttttgctcaacaaaagatgatgaggaattgatttgtgaatgtcactggagataaaagggtatgagaaggaatcccaagcaggcaaagaaacagtctagctgtcaagaagaaaacagggagatacataccaaacccaggagctactaatataacaatcatactatagagcgaagtgaacttacactttttgataaactgatagattttttgtaatgtgattatggtaaaatactgaaatatttatgttaatttatttgcatttgaatgcttacatttttaattgacagaatctttgcatttcattacttgagtcatgaaggcgaaattaaagaatggcagtctaaaatacccaggtaaagaagataatttctagaaacaaaaataaaaattcttttcaagccatgttgtttgaattaaatgacactcctgagtctgtctactttttttttttttttttgagacagcatcttgaacccaggaggtggaggttgcagagagccgagattgcgccactgcactccagcgtgagcaacaagagcaaaactccatctcaaaaaaatacatgtatttctgttagctgatcatctaatggtggcaaaaaaaattacacgagttcaggaacatcattagacataaatacaaaatactatgtgaattatcaaatgtgataagctaactgagaggaaatgggaaataggaagattctcagtagaagtagtaatatgtggaaggggctttagaggtcacctagtctgttttgcccattgtaattatgtcagtagtccctgcaggtggtttatctagaggagtatatatggggttctaattcatggtctagcattgcactattaaataaccactaatgacaagtagttttacatgcattcacgtgaaatctttctgtttgtttgtttgagatagggtctgcctctgtcacccacgctggagtgcagtggcaagatcttggctcactgcaacttctgcctcctgggctcaagtgatcctcccacctcagcctcccaagtacttgggaccacaggtgcacaccaacacacccagctaatttttgtagaggaagggtttcaccatgtttccctggtgggctttgaacacctgagctcaaacgatgccttgacctctcaaagtgctgggattacaagtgtcagccactgcacctggccgacattttttatttgtttagagacaaggattccctgtaaagctgcaggggcacaatcgtggctctcactgcagcctcgaattcctgggctcagtgatcctcttgtcccagccacctgagtagctaggactacaggtgcaccccaccatgcctcctattttttgtgtttgtgtggagatgaagtgtgttgtctaggctggtctcaagtgatccttcagcctcagcctcctaaactgctgagattacaggcataagcttttttgataaaggaaaaactagtgagcatttcacattgtagaatccaaaaacatgaaagttaatcttttcctgtcaatttacagttttgtaaatgtacccaggtgaagagactggtctgttactgtagatagaaaagtaccaaaacaaagttttactttgttcagtatactgtcgaggcaactttctaaatgagagggtccaggttcttggttaaagaaggaacttagaattaacaaaatagtgacaaacatttgcggcagcgcgcctcagggcaccagctgcaggggtctgcccacagaccctgaccctgcgacagatgaataaagtacactgacacacagatagtctgttttgccagtccagctgagggtgtcccactgcttacagactccctggagagttctgaaaacagttgcaactaggcctcagtcagctagtgagacttgcatttattcaaaaagattaaggatggcttgagtcaacaccattagagggtaattgatattgtggacttcccaagtaaaaagcacttaaccccccgtggtacatccaagattagtcttaagatcatatgactaaacaaactaggtaaactactctgccttcctttattactactttaatttgtttaaaagtaaagatcaggttgccttcaaccatatctatcaccgaagctatgcaaacttctcggccttccaagaattgtatctgtctctgtaacaatctttaatgtttttcccaccagcctgattgaatcccaacacatattcagaacttaaggctagaacaagatgaggaagatatgacagcccgtgattttaagcaatctaaggaaacccatgcttgcaaagaattcaaatgacgtgagagctactaagataaaatgtggccatgcaccaagccttgacggcaatatttaatctcataacaattcttctttcctcctatataagaagcatggcagcgacactgtgcataaattaaggcaaactgttgttatgtgaaaatgttaatgaggtagattcctttggaatcattagtgtgaagagctggtttttgttttcccattgcctaggccctgactttagtagtgactgatgcagcttttctagtctaacaaccctctcccccaagtaattctttgatgccctgcccttcagcttcatcttttaccacttactattgggttttgccaccatttattttatcattcacttatctgttcctcttcctaagttacaaacgtttctgaagcaaaagaaaatgtatcactgtagagagtctaggacctttagtgttatttggtcgtttacttttcatacactgcagcttttactgttttgaaccttcattgctatagtaggtattgaaaaatactgaacgaccagaagtgatttgatttctcccttatctggtaaataattttttttttttttgagatggagttttgctcttgtcgcccaggctggagtgcaatggtgtgatctcagctcactgcaagcaccgcctcccgggttcaagtgattcttctgcctcagcctcccgagtagctgtgattacaggtgcacgccaccacacccagctaatttttttaaattttttattatatatatatatagttttttgagacagagtctcactttgtcaccaaggctggagtgcagtgacgagatctcagctcactgcaacctccgtttcctgggttcaaacgattcttcttagcctcccgagtagctgggattacaggtgcacacaaccacacccagctaatttttttattttttattttatgtatgtatatatatatatattttttttttgagacagagtcttgctctgtcaccaaggctggagtgcagtgacgagatttcagctcactgtaacctccgtttcctgggttcaaacgattctcctgcttcagcctcctgagtagctgggattacaggcacacgccagcatgcctggctaatttgtgtatttttagtagaggcagggtttcaccatgttagttaggctggtctcgaactcctgactgtgatctgcccgcctcagcctcccaaagtgctgggattacaggtgtgagccaccgcgtccggcctaatttttgcattattagtagaaatggggtttcaccatgttggccaggcaggtctcaaactcctgacctcagatgatccactctcctcggcctcccaaagtgctgggattacaggcgtgagccaccgcacccggcaaataatcctttcttttcttttttctttttcttttttttaatttaaaaaaacaattattaggcaccttctcttcagtttatgacagaatacaccttacccctgtttttgtaagcagacgtactctatgcatcccaatctagaagaccctctcccccatggcactgttttctaactacattctacagtttcttgaatgttgctcaggtatttcctttatctgctttctccctcgggtctggaacatggaggaacaacacaaaaaatttatcttagatcctatctcctttccattatactatcaagattacagaaatagtattttatatatgccctccaaatttcttgagtttcactcaacctattccagtttgtacttcaccattcctctgatggctggtgacagcctgtgtgagaaactgggcatgtaagaggtataaaaagaaaatcttggggaccccaaatcactaagctaaagggaaaagtctaggtgggaactgcttatggccaacctgcctcccattctattcagagttaccccgctgctcactgacatggatgcatatctgattgcctcccttcaaaaggctaatcagaaactcaaaagaatgcaaccttcatctctcacctatctgtgacctggaagccccctcccagcttggagtctttctgcctttgcttcaagttgtcccacttttccagactgaaccaatgtacttcttacatatgttgattgatgtctcatgtctccctaaaatgtataaaactaagctgtgccccgaccaccttgggcacatgtgaggacttcctgaggctgtgtcatgggcacatgtcctcaaccttggcaaaataaactttctaaattaactgagacctgtctaaaattttcaggattcacagaggctattccttagtttgtcttttagcaccatgtacatttcctgtcttcttgggactcttacttggggtctaggatatcactttttacttgttcctgtagtctgtttttcccagtgtcttgctggctttcccctgggtgttcatatttataaaaagatgaaggtaaacagggcaacatagcaggaccttgtgtctacaaaaaaaacaaaaacaaaaacaaaaaaagccgggcaaggtggcatgtgcctgtagtcctagctacttggaaggctgaggcgggaggatcgctggaggcaaggaactcaaagctgctgcagtgagctttgattgtaccaccaccctccagactgggcaacagagtgagatcttgtctctaaaaagagtaacaaaaattttttaaaaatgtaagtttcatgcacgtccgtgtaaggagagtccaccagcaggctttttgtgagcaacaaggctgtttatttcacttgggtgcaagtgggctgagtcgggaaagagtcagcaaagggagataggggtggggcagttttataggatttgggtaggtagtggaaaattatagttaaaggggattgttctcttgcaggcaggggcaggggtcacaaggttcttggtggggagccccagagacttatccaggagaaggaatgtcacaaggtaatgtcatcagtgaaggcaggaacctgccatttttacttcttttgtggttcttctgttgcctgaggccatctggatatatacatgcagccttgggctcagaggcctgacattcctgtcttctcatattaataagaaaatcaaaacaaaatagtggtgaagtgttggggcggcaaaaatttttggggatggtatggagagataatgggcgatgtttctcagggctgcttcgagagagattaggggtggcatgggaacctagagtgggagagattaaactgaaggaagattttggggtaaggggtgatattgtggggttgttagaaggagcatttgtcatatagaatgattggtgatggcctggatgcggttttgtatgaattgagaaactaaacggaagacacaaggtccaaataagaggagaaaaaaggtattaaaggagtaagaattgagaggacctaggacatccagttggagaatgtccaagcgggttcagtgtaattatttgcttggttggcgagtttttgggctctatccttgagttttttttatgttgtcacataccaggccagattgatttaggtaaaaacaacgttcttcatttagaaatatgcagtcttcctttttcagcagtgagtaagttgaggcctattcctgcctttttatattaataataagaaaaacaaaactagtagtgaagtgttcgtgtcatgaggagaacaggaagctgtttggtcccattcgcaaattgaattttgggagtaaggaaaactagtgtgcatgtgcctgtccatttagcaggtaaacacatgtaggtagaggagccacagagcgataagagaccttgtgcaaggcaaaactggaaatgcaaagtgaaaagatgagaaagagtactaaaagtggtgtcttgtacccagactcctagggatccagctacggcggcagctgtcagaggttgtaatggggattgatggtgtaactgcgtagagggggaggttcgattttcatggtgtatgagaaagcaccgagtgtctatgagcaacctttcactgttatttatggggctgggcataagatgtggttcaggacttgtgttgggtgctaagtgagaagctgggttgaaatcaggcccatgggcaatagttactgttggagtttcaataaagagtgaatagagctggaggagttgaggggcagacagtaagtgtgaaaggtgtgagcaggatattaatgcttgaaggttgtgagaactgttgagggtaagtggagcatagcttgtgcttttgagggcttccagaggtattaaagcggcagctgctgccgcatgcaaacatgagggcaccccagaattgtgaggtcaagttgtttggacaaaaaaggctacagggcgcagtcctggttcttgtgtaagaattccgaccacacagttcagtacttcagctgtgtgtaatgaaaagggttgggatgagttagggagagctagtgtggggagcagcttctagggctgtttttaaagaatggaaagaggagtggggaaaggatttaggatctatggggtcagctaggtttccttttgtgagtttatataatggtttagtcaggataggaaaaccaggtatccaaaggcgaaagtatctaaccatgcctaggaaggaaaggagttgttgctttgtagaagggattggggttagggagattagctggacacgattagcagggagagcacgtgtgtttttatgaagaattaagccgagataggtaatggatgaagaagaaatttgggctttggagggggatacacgatattcctttgagaacagatgttggaggagcaggaggatgtcctgttgggaagatttgtaggaggggctctaaagtagaaggtcgtcagaatattgaataaggtgagaagcagatggacagaaagaaagtaaatcatgagaaagggcttgactgaagtaatgggggctgtccttgaagccttgtggcagtgcagcccagataagttgctgaggctaatgggtgtcagggtcagtccaattgaaagcgaagagaggccgggatgaagggtgcaaaggaatagtaaaggaagcatgtttgagatccagaacagaataatgggttgtggagggaggtattgagcataggagagtatatgggcttggcaccattgggtggataggcaagacaatttggttgataaggcgaagatcttggaacagcctgtaagacttgtctggtttttggacaggtaggataggagagttgtaaggagagtttatagactttaagaggccatgttgtaacaggcaggtgataacaggctttaacttttttaaagcctgctgtgggatgggatattggcgttgagcagggtaagggtgattaggttttaatgggatggaaaggggtgcatgattggtcactgaggaggaagcagaggtatcccatacttgtggattaaggtagggagacacaaggggaggatgcgaaggaggctttgaactggggaaaagggtggcaatgaggtgtggctgtagcccaggaatagtcagggaagcagataatttattaaaatgtctcaacctaataagggagctgggcaggtggggataactaaaaaggagtgcataaaagaatgttgtccaagttggcaccagagtgggggagttttaaggggtctagcagcctggctgtcaatacccacaacagttatggaggcaagggaaacaggcccttgaaaaaaaggtaatgtggagtgggtagcctccgtattgatgaagaaggggatggacttaccctccactgtaagagttacctaaagcatctgtgatggtccaggaggcttctgaggcgatcgggcagcgtcagtcttcagccactaagctgagtgggtctgggaaggagtcagccaaggaacattgggtttgagctccaggacctttaggagcagtggcgatgtgagtcggacagtctgacctccagtgggggcccgcacagacagggcatggcttaggaggaatctcgggctgtgggcattccaaggcccagtggccaggcttttggcatttgaagcaaggtccacgaggaggttttgaaggagcccctgggagctgtggcttggatgttatgaagtttttgtatgctggagacgtggttgtgggttgtcttacagcagaggcaagtagctgtaactcagagatgcgttgtcacttggctgcctcttctctattattgtacaccttgaaggcgaggttaattaagtcctgttgtgaggttgagggctggaatccaattttttggagttttttttttaatgttgggagcagataaaatgcatattgagaataagatggccttagggctgggcgcggtggcttacacctgtaatcccagcactttgggaggccaaggcgggcagatcacctgaggtcaggagttcgagaccagcctgaccaacatggagaaaccccgtctctactaaaaatacaaaactagcctggcgtggtggtgcatggctgtaaccccagcttctcgggaggctgaggcaggagaatcgcttgaacccgggaggcggaggttgcagtgagctgagatcgggccattgcaccccaatctgggcaaaaagagtgaaactccatctcaaaaaaaaaaaaaaaaaaaaagaataagatggccttctggcccttctgggtctagggcagtaaagcatctaagagttgttgccaaatgggccatgaactgggctgggtttttatatttgatgaaaaggagcctaagcactaactgatttgggagaggtcagataaagaaaaaggagcattaaccttgactgtgccttcagctccagccacctctttaggaggaaattgttgggcaggtgggggagggctagtcacgaaacaaaactgtaagccagaccaggtatgaggaggggaggtgatagaaggattatagggtgggggagtggaggccgaggaagaattgggacctggctcggcctggtgaggagcagccttggggagaaggggagaggtcagatgggtccgtagaaaaggaggatttaaaggactcagagcttggggtggagactgaaggaacacacaggagagaaagaagaaagatttggaacgagttgcattgggagcagagactagggagggaccaatgtgtgaaagaatgcctggatgtcaggcacctcagaccatttgcccatttttcgacaaaaattatctagatcttgtaggatggagaaatcaaaagtgccgttttctggctatttgggaccattgtcgaatttgtactggggccaagcagggttgtagaagaaaataaggtgttttggtcttaggtcaagtgtaagttgaagaggttttaagttcttgagaacacaggctaagggagaaaggggaatggagggtggaagtttgcccatagtgaaggaggcaagcccagagaaaagagagggtagagacttggagtgggtggtggtacttgccacccaggggaggaggtacttgccaccaaggggaggtggtacttgccaccaaggtgaaggatcaaggcaggcatccccgtggtgatcagacacctctgaaatgtgagtgaataatcaagcaggcgttcctgcagtgattggacaccaagggaaaactgtcttcccgagtctgtgaccaatgccagagttttgggtgcacagataaaatgtgtctcctttgtctctactagagaggaaaaaactggaattggaaggacagggagattaaagggtagtgagaaggctggagaagagagtgaaaaggccgcttacccaattttaaattggtgagatgttccttgggctgattgatgggaggacgcgaggtcataggtggatctcctcatgcagtgagggtgaggacaggggaccagtttcccgaaggagtcctcctgtcctgggtcttcagcaccaaatgacacacacgtccgtgtgaagagagtccaccaacaggctttgtgtgagcaacaaggctgtttatttcacttgggtgcaagtgggttgagtccgaaaagagagtcagcaaagggaaatgggggtggggcagttttataggatttgggtaggtagtggaaaattacagttaaagggggttgtgctcttgtgggcaggggcgggggtcacaaggtgtttggtggggagctccagagacattatccaggagaaggaatgtcacaaggtaatgtcatcagttaaggcaggaactggccattttcacttcttttgtggtccttcagttgcctcaggccatccggatgtatacgtgaaggcttgggctcagaggcctaacagtaggacataaagaaaatgagaagaaaattatctgaaggctggttattcaatgttagggtttgctatttttttaaaatcttactgcctttttgttgcaggacttttttttttttttttgggaaaaacagagtctcactgtgtctcccaggctggagtgcagtggtgcaaactcggctcactgcaaactttccttctcagattcaagcctcagccacctgagtagctgagattacaggcccacaccaccatgccgggctaatttttgtatttttaatagagacggggtttcaccatgttgtccaggctggtcttgtactcccaacctcaagtgatcctcctgccttggcctcccaaagtgctgggattacaggcatgagccaccgtgaccaggcgttcatgaaaaattttcatgacattctgtgaggtgggtggaccataatttattgtaccacatttatttatttatttatttatttatttatttatttatttatttatttttattttttgagacatagtttcgctcttgttgcccaggctggaatgcaatggcgcaatctcggttcactgcaacctctgccttccaggctcaagcaattctgcctcagcctcccaagtagctgggattacaggcatgcgccaccacgcctggctaactttttttgtatttttagtagagacggggtttctccatgttgatcaggctggtctcgaactcctgacctcagatgagccgcccaccttggcctcccaaagtgctggaattacaggcgtgagccaccgcaccctgcctattgtaccatatttagtttcccaattttttgctatataatattccatgaatatctttgcccaaaatttttgtagattgtttctaagaatagttcatcagcattttaagacatcctattaatattagcagactgcaatcagattgaagtagttcacaaatagatgggttttagcctgtatttgttcaatactgaactattgtatgtatcaggcactgttatgtatcaggcactgttctcagcacttgtaaaatgtatatgtgctgctgacaagcatgagcacttgtaaatgaacaaactaaaatccctactcttgttaaagtgggggaggtgaagaattttaaaaacatcttttttcgttcaaccttctcccacaacttatctttcattctgctaatggaaaatattacttttgttcttaaatatgaagcttttgtgtgtaaaaagtattagaatctcatgtttttgaacaaggttggcagtgggttgggaggagggattggagattgatgcgataggaatgtgaagggatagcttggggtggattttattttttaattttaatttttattttttgagatggagtcttgctctgtctcccaggctggagtgcagtggtgtgatctcagctcacgggttcaagcgattctcctgctgcagcctcccgagtagctgggattacaggagcgcgccaccacacccggctaatttttttgtatttttagtagagacggggtttcaccatgttggttaggctggtctagaactcccaacctcatgatccgcctgcttcggcctcccaaagtgccggaattacaggcgtgagcgactgcacccggccgcttgggggtggatttttaaagaaactttagaagaatgtaacttgcccagataccatgtaccgttaatttcattttcggttttttgaatacccatgtttgacatttctccgttcaccttgattaaataaggtagtattcattttttagttttagcttttggatatatgtgtaagtgtggtatgctgtctaatgaattagacattggtactgtctttaccaaaactggacaaagagcaggcagatgcaaaaatcaagtgacccagcaaaccagacacattttctgctctcagctagcttgccacctagaaagactggttgtcaaagttggagtccaagaatcgcggaggatgtttaaaatgcagtttctcaggttctcgccacccaccagaagttttgattcattgagtggtgggagagggcagagatatttgcgattttaacagcattctcttgattgtgatgcagctggttcgcaaataggtaccctaaagaaatgacaggtgttaaatttaggatggccatcgcttgtatgccgggagaagcacacgctgggcccaatttatataggggctttcgtcctcagctcgagcagcctcagaaccccgacaacccacgccagcgctctgggcggattccgtcaggtggggaaggccaggtggagctctgggttctccccgcaatcgtttctccaggccggaggccccgcccccttcctcctggctcctcccctcctccgtgggccggccgccaacgacgccagagccggaaatgacgacaacggtgagggttctcgggcggggcctgggacaggcagctccggggtccgcggtttcacatcggaaacaaaacagcggctggtctggaaggaacctgagctacgagccgcggcggcagcggggcggcggggaagcgtatgtgcgtgatggggagtccgggcaagccaggaaggcaccgcggacatgggcggccgcgggcagggcccggccctttgtggccgcccgggccgcgaagccggtgtcctaaaagatgaggggcggggcgcggccggttggggctggggaaccccgtgtgggaaaccaggaggggcggcccgtttctcgggcttcgggcgcggccgggtggagagagattccggggagccttggtccggaaatgctgtttgctcgaagacgtctcagggcgcaggtgccttgggccgggattagtagccgtctgaactggagtggagtaggagaaagaggaagcgtcttgggctgggtctgcttgagcaactggtgaaactccgcgcctcacgccccgggtgtgtccttgtccaggggcgacgagcattctgggcgaagtccgcacgcctcttgttcgaggcggaagacggggtctgatgctttctccttggtcgggactgtctcgaggcatgcatgtccagtgactcttgtgtttgctgctgcttccctctcagattcttctcaccgttgtggtcagctctgctttaggcatattaatccatagtggaggctgggatgggtgagagaattgaggtgacttttccataattcaggtgagatgtgattagagttcgatctgcggtggtggcagaggcttacaagaaacactaacgggacatgggaaccaattgaggatcagggaataaagtgtgaagttgactaggaggttttcagtttagaacatggcagagacattctcagaaataaggaagttaggaagaaagacctggtttagagaggagggcgaggaagtggtttggaagtgtcactttggaagtgccagcaggtgaaaatgccctgtgaacaggactggagctgaaaacaggaatcaattccatagatttccagttgatgttggagcagtggagaagtctaagctaaggaaggggaagaggaggccaaggcaaacacttaggaacacttgcaacgagggggtggaagaagagcaaggagccagctgaggagaatgagtgtggttggagaaccaccacagcgcagggtcgccagagctgaggaaggggagggaagcttcaggaaggaaaaggttggcagggattttgagtgttaggcctggtgtagcagaaggaacagaagatttagagcagcgctagccaatagaaataaaatgtgaggcccggggcggtggctcacgcctgtaatcccagcactttgggaggccgcggggcggatccttgagctcaggagttcgagaccagacaacacggcgaaaccccggctctacaaaaaattagctgggcgtgggggcgcgcgcctgtagtcccagctgctcccaagcgaggctgaggcaggagaatcacttgaacccgggagaaggaggttgcagtaagccaagattatgccactgcactgcagcctgggcaaaagagtgagactgtctcaaaaaaaaaaaaaacctgttttgtttttcttttggagaaaaggcatacaaatttattagcatgcagactgggagaaccacaaggtgattatccctattttaaattttctaataaacatactattatttatttatttatttatttatttatttatttattttttgagacggagtctggctctgtcgcccaggctggagtgcagtggcgcgatctcagctcactgcaagctccgcctcccgggttcacgccattctcctgcctcatcctccccagcagctgggactacaggcgtccgccaccacgcccggctaatttttttgtatttttagtagacacggggtttcaccgtgttagccagtatggtctcgatctcctgacctcgtgatccgcccgcctcggcctcccagagtgctgcgattacaggcgtgagccaccctgcccggccggctatttatttttttagagatgggagcctcactatgttgcccaggctggtcttgaactcctggagtcaagtgatcctcccgccttggcctcccagagtggtgggatacaggcacaagccactgtgcctagccataaacacatttttaaaggtaaaaaaaggccgagcgcggtggctcacccctgtaatcccagcactttgggaggccgtggcgggcggatcatgaggtcaggagatcgagacatcctggctaacacggtgaaaccccgtctctactaaaaaatacaaaaaaaaaaaaaattagccgggcgtgatggcgggcgcctgtagtcccagctactcgggaggctgaggcaggagaatggcgtgaacccgggaggcggagcttgcagtgagcggagatcgcgccactgcactccagcctgggcgacagagccagactctgtcaagaaaaaaagaaaaaaaatgtaaaaagaggctgggtggccgggcgcagcggctcacgcctgtaaacccagcactttgggaggccgaggcgggtggataaccagatcaggagatggagaccatcctggctcacgcggtgaaaccccgtctctactaaaagtacaaaaaattagccagacatggtgccaggcacttgtagtcccagctactcgggaggctgaggcaggacaatggcgtgaacccaggaggcggagcttgcagtgagccgagatcgcgccactgcactccagcctgggcaacagagtgagacttcgtttttttttaaaaaaaaggctgggcacagtggctcacacctgtaatctgccagcactttgggaggccgaggcaggtagatcacctgaggtcaggagttcgagaccagcctcgccaaaatggtgagaccctgtgtctactaaaaatacaaaaaattagccgggtgtgttggcgtgtacctgttatcccagctactcgggaggtgaggcaggagaatcgcttgaacccagaaggtggaggttgcagtgagccgagatcatgccactgcactccagactgggctacagagcgagactccataagaaaaaaagaaaaaaaaggggggcaaaaagaaacagatgaaaccaatgtgaataatttattttaacacaatatacctaacatatttttatttcaatatctaaccagtataaaaatttacttgttttgccctctagagatagtaagctccttaagtaaacagaagtaatacctgattaattagaattcccaaccctcatcaagtgtgtgcttatatagaagaaacccagtaaatgtttgttgattgaaagatattaatactcttgcttggatgagagtgaggaaaaaggtattagtattggcttttcacaacgccttgtacggtttcttgtttaagttgatcaaagcaaaagaaagactgcaggcaatgctaaatataacaagtgatttacaaattaattagacgtaaataatcatttttcattaaaaattagttgtattctgtccatttcctcagaattttagacaatgattttgaataatcatatctcccttatagagttattgaaattaaataacttattgggaaagattctttataattatacaaaggtatataggaccatagtctcatatccagagttctgaaatccgaaaactaaaaggtttttctttttttgctattctttttttttttttttttttttttttgagacagagtctccctctgtcgcccaggctggagtgcagtggcacaatctcagctcactgcaacgtccgcctcccaggttcaagtgattcttctgcctcagcctcccgagtagctgggactacaggcgtgtgccaccacactgggctaatttttgtatttttagtagaggtggggtgtcaccatattggccaggctggtctcgaactcctgacctcgtgatccacccgcctcagcctcccaaagtgctgggattacaggtgcgagccactgcacctggccaaggttttttataactaatttaacagcaaaatctggcctagttatcgtctttattttctttttttaatgtgatttaaaactattcatttgtttcactatagcttaataatttgtttgcttttctgcttctaagaccctgtaggggcattatataacttctggcatttgcatagtacctttacaaaatccaaaaaaatctgaattctaaacacatttagtcctaaaagttacagataagggattctggacttgcgattctaagtctttgttcgtttttattgcattttctgagccaacataaccattatttaaaaacaagttgctatagtaactctacattacagacctcccccaaactcagcagttcagagcatgtattctcactcagggctctgcttccttgtaggtagatgtgtggatcggtgagggcagttcttatttgtatgccttattctggggcccaggctgaaggggcagtggctatccatgataagcttttctcaaggcaccagcagaagtacaagaagtcaaggccaactgcataagcatagttcaaatgtctggttatgccacatctgctaagattgcattgaccaaagcaagtcacatgatcatgcccaaagacttaggagtgggtagtagactgcaaccaccatgcagccaagcaaactacagagccaagcctataacatcactggagagaggtgtattcctcccttggccaggctgggggagggagtgaatattggctgaataataatctaatctaccacagatggttaacagaggtggagtgggatggaaggagaaaaaaaaaaaatcaccaaatgggatgtatcactacccttgctctttttagcgtctgctgctttcacaaagccttttatagggctggagaaatgatttgctcctagtctcttaaaaaccagaggagtcttttgaggatgtattcctaaagtttttaaattagtttaaaaattttttttattaatttcaattataggctgagcacagtggctcacgcctgtaatcccagctaaggtggtggatcacctgaggtcaggagttcgagaccagcctggccaacatgctaaatgaaacccccatctctactaaaaatacaaaaattagctgggcatggtggtgggcgtctgtaatcctagctactcaggaggctgaggcaggagaattgcttgaacccaggaggtggaagttgcagtgagccatgatcgtggcattgcattccagcctgggcgacaagagtgaaactacatcttggccgggtgccgtggctcacgcctgtaatcccagcactttgggaggcagaggctggcagatcacgaggtcaggagatcgagaccatcctggctaacacagtgaaaccccgtctctactaaaaatacaaaaaattagccaggcgtggtggcgggcacctgtagtcccagctacttgggaggctgaggcaggagaatggcctgaacctgggaggcggagcttgcagtgagctgagattgtgccactgcactccagcctgggcgacagagggagactccgtctcaaaaaaaaaaaaaagaaaagaaactacatctcaataataataataatttcaattataggttggaatttagagttcggttacatttactattggatgtgatcctttaaaaactcaagtagaggcttttccagcccattcataacattagaagttgggccgcctgtccagggagaagctttcaaagtaacactgaggctgattaaatacttttgtaaaataaagaataaatcacaagctcattggcacttgaaacttagcattgcagtgcagatgcagcagaaaatacttgtagcagttttctcagtgaaagagaaactagtcaagtagcttagagacattaaaacaagccacaagccctttgtgctagagatcatggttaaaagtcccctgaagatgtttttccacagtagaaattttgtttatatttatgtctgagagtgaaaaaagaaaatggaatcaataagtaaccatgttctgcaggagtttgaggttttgttgttacattgggatgtagtgagagaagaaaacgtattaattcttttctgttggtactttcttgaattacatttttaataaacttattgtgagattctgaacattgctcctgtgataatttctgaagtgctgatgagtagaaggttttctggttagacttctgttcagcacatctgagcttcgagattatttgtagttctcctggggcttttaaaatctctttgtatataatagataaatgctagtttcccatcagagaaggatttctttttccttttgtctgattgagcaagtgtcttgagattaagaaaatggatgtcagtgaattcaagtgttgtgctctgtcagtttgcagcaggtgaccagagagcaaaaacaccaaagtagattctgtccctactcccacctactcctcaattcgggtcccatgaaagatcctcagatctgggtaactgttgttgtttttgttgttcacagggctaagaatgttcatggctaagaatgttaaaaagtctcctagtgtcttttgccacgctgcctgaacagtggggtcattgaccgccatgcaatcctcaattgttttcagctgatactggaccgaaatcaaatctagctttgcctgcccctttctttgtaccagtagcgcttgtttgttcaccaggcctgactgaagacctagccctgttgcctgcctctgcttcctaccgagccccctgtaaagagcagctctcccagggaggctcaccttgtagcattgtgatctttggaagcatcaagggaggcacaagatttctctgggtgaactggaaaagacttgggctgggcatcagaagacttgggttctgcaactggcattgtttacactctctctgtaactctgtgcaggcaaaatctttcaccttttctgagtttttttttacatgtcagtacagattcctttcctcatgaggtttctttaagactcaaatggaagaatagatgtgaaaagaactttgaagatagtattggaaaatgctaaagtgactgctgtgttattgatgatttttatgggatttgtctgagaaagctccagtgtgaccagtttgtaccagcttgtatggtttcttgtaataaccgaacagatcctgttagcatagggtaaaaatggaaactacttcttttaaaatgaccagtggctgcagtggctcaggcctgtaatcctggctagttgggagactgaagtggtagggttgcttgaggccaggcaagaccagcctgggcgatacagcaagaccctttctctaaataaaaaactagccacccatgtagtcccacctgcttgggaggctgaggtgggaggatcgactgaggccaggagttcaaggctgcagtgagctatgattgccactgtactccagcctgggtgacagagtgagaccttgtctcttaaaaaaaaaaaaaaaaaaaaaaaaaaaagatttgcattatagcttatctttttttttttttttttttttttgagatggagtctcactctgtcacccaggcaggaatgcagtggcgtaatctcagctgactgcaacctctgcctcctgggttcaagcaattgtcctgcctcagcctcccgagtagctgggactacaggtgcacgtcaccatgcctggctaatttttgtattttttggtagagatcgggtttcaccatgttggccaggctggtctggaactcctgaccttgtgatctgcccaccttggcctcccaaagtgctgggattacaggcgtgagccactgcgcccagccagcttatccttttttaaaaaaacataaatactaggatattgagattattgaaaatgcttttggtgcttcagttttgaatttatacttagagcagtttttgaagtttaagatctcatttacttctaagtaatagatttactagtaatcaaaatcgcttcaaaataccgtaatcctcattgctgtaaactcctacggggcaggtttggcgttttataaagaggcaatatagtgtactctgtgaattccaactcctcacttgccagatgtgaccttaagcaagtgaacttctgtgtgccacactgttttcatctgtaaaaggataaagggaatatcataaattagtttgttaagccttagtttaataatgtctctaagttttacatataagtagacagtgtctttcttgtttagtgaataatcattcttattatttaatagtatctctactaaatttattgtgtaagattatactaatcttgtttagtgcgtggtaatcacttctgctcatatttaacctataagcataatatagtttatttatataccatttatttattttattttattttttgagatgcagtcttgctctgtcacccaggctgcggtgcagtggcgcaatcttgcttcactgcaacctccacctcccaggttcaagcgattctcctgcctcagcctccttagtagctgggattacaggcacgagctaccatgcccagctaatttttgtatatttagtatggacagggcttcaccatgttggccaggctggtctcgaactcctggcctcaaatgatctgtgtgcctcagcctcccatagtgctgggattacaggcatgagccactgcgtccggcctacttaccttttatttttgcttgcattaccctttctttgccttgtttcatttggctaagactgtcttgtttacttgctttgcttctgagggattatatgagagttctatgggtttttccataatggagtgtacttttattattttattatttgtttttttgagacagggtctcactctgtcactcaggctggagtgtagtgatgcagtcactgctcactgcagctttgactttcttggctccagtgatccttccacctcagcctcctgagtagctggaaccacaggcacccaccacccacacccagccaattttttttgtatttttagtagaaacagggtttcaccatgttggccaggctagtcacgaactcctggcctcaagtagtaacacccatctcagcctcccacagtgctgggattacaggcatgagccaccgagcccggcctcatgcaatttattgactacttcactgaaagtgaacttgtatggatactcaaaaagtacagtttgtattgaatacatattgtttttgcatcatactaaagctgaacagttctaaactgaactgtcatcagggaccgtctgtattgtgaaatcttaattttgtccatattaaaagacaggaacagggctggttcgtggtggctcacacctgtaatcctagcactttgggaggctgaggtgggtggatcacttgtggtcaggagtttgagaccagcctggccaacatggtgaaacccagtctctactaaaaatacaaaaattagctggacatggtggtgcacacctgtaatcccagttattcggggggctgagacacgaaaattacttaaacccaggagttagaggttccagtgagcgagatcgtgccactacattgcagcctgggtgacagagcaagactgtgtctcaaaataaagacaggaacaaaggtatcgataactcttaagtataggttaaattcccacaaaaatctagttttaaaaaatctttttttttttttttttttttaaaaacagagtctcactctgttgcccaggctgagtacagtgacgagatcttggctcactgcagcctctaattcctggactcaagccatccccccacctcagcctcctgagcatttgggactacagatgcatcccacctgcacccagctaattatttttttgtagagatagtgttttcctatgttgcccaggctggagactgatctgcaactcctggccttaagctctttattttttaagcaaatttgcactgttttcaattaatatgaatttgcatttcgctgatctcatgctagctgacaatgggctgaaggtgaggggaggagaaagatggacatggtacataaaagcatgtatgataaagtggaatgtcaccttggttaaaaatgtgtaatgatttgaatgatacaaatataagtagttaagggttattttgaacttgatacctttgctggaggaaaaattactttatgcatttttgatgaaaaatcattagaagaaaaaaaatggaatatttagaggaaagagtatcctgatgttaaaagtgaaaatgaaataggacattgagaaaatttttttatgtaaatgtgtatatggtaatgtattaattagcgttaggtatgtacacggatttttgccttctatatttctgaaaaccttctgtgaaaaggaagagttgaaatcataaagaattggctgatggaaattaaggtagacaggcaaatgggaatgtggcccccctaggagggtgaactctgagagacacagtcatccctgtaaataaggctgcgccaagatcaaaggagaggtctgaggctgggagtcaggagtcagccattcttttttttttttttttctgcaacctccacctcctgggttcaagcttttctcctgcctcagcctcctgagtagctgggattacagatgcgcgccaccacacccggctaatttttgtatttttagtagagatggggtttcgccatgttggtcaggctggtttcgaactcctgacctcgtgatccgcccgccttggcctcccaaagtgctgggattacaggcatgagccaccgctcctggctgagtctgcgatttcttgccagctctacccagttgtgtcatcttaagcaagtcactgaacttctctggattcccttctccttttgtaaaataagcatgttatctgtccgtcctgccttgggcattgtgataaggataagatgacattatagaattttgcaaaattaaaagcgctagacaaatgattttatgaaaatataaagattaggttgaatttggtcagcatagaaaaaggaatgttgagaacattccttaagattactcagctccctttgctggaaatcagaagtcattaagtatctttgtggttgaaaatgtttggtgtctcaggcggttctacttattgctaaagaggtctaccttgagcttatagtaaatttgtcagttagttgaaagtcgtgacaaattaatacattcctggtttacaaattggtcttataagtatttgattggtttaaatgaatttactaggatttaactaacaatggatgacctggtgaaatcctatttcagacctaatctgggagcctgcaagtgacaacagcctttgcggtccttagacagcttggcctggaggagaacacatgaaagaaaggtttgtttctgcttaatgtaatctatgaaagtgttttttataacagtataattgtagtgcacaaagttctgtttttctttcccttttcagaacctcaagaggctttgttttctgtgaaacagtatttctatacagttgctccaatgacagagttacctgcaccgttgtcctacttccagaatgcacagatgtctgaggacaaccacctgagcaatactgtacgtagccaggtacagtgtcagtctctgaaactgcctttgccagactggattcacttatcatctcccctcacctctgagaaatgctgagggggctaggcaggctttctctactttaccacatttataatatatttggtgaacttcagctgattgctggaggacacagggctgtttaacacataggtgttgatacagttcctacctaattcacatatcaccacctcagttgaagccttctccagcttcccaaggtgtgcagcgcctcatagttcatgttgtttattattttacctatcttgctcttattcttctacggctgagtccattttatttactgtattcattacctaacagttccttttagtgctcagtaaatattcattatgattgtacaatgcaaggataagtgtagaagttctaagggttcaaaggagggattcaggaaaagaacgtaatctgtgctgtcggacaaagagattcctcaccagctacatacacagacatgaaatttgactgcaactctactagctaatcatcataaagtgagagcagaggccaggcacggtggctcatgcctgtaatcccagcactttgggaggctgaggcgggcagatcacctgaggttaggagttcaataccagcttggccaacatggagaaaccccatctctactaacaatacaaaaattagccgggcttggtggcaggtgcctgtaatcccagctactcaggaggctgagccaggagaatcgctggaacccaggaggtggaggttacagtgagctgacgtcgcgccattgcactcgagcctgggcgacgagcgaaactccatctcaaaaataaataaataaacaataaataaatagagaaaaagaaagaaaagaaaagagagagagcatggatgtcctgtgagacagttggagtatctataggatttttagaggtggacccagaatagaggaaaacacaaggccaactataagctatccagttgcactaggtgtggggtcagattttcctctgttaggaccagagagcagagctaggaacagtggtggaagttaccaggcaataaggtctggatcaataaaaagaactttctcatagcctggcatggtggtgcatgcttgtagtcccagctactcaggaactcaggaggctgaggtacgaggattgcttgtctaagagtttgagtccagcatgggcaacatagagaggttctgtgtttttttttttttaattttcccacagttatggtacatctgggctgccttgtaggcttgtgtgtacatttcactacaaacagtcacaaaaggctggaaggccactccagcaagatctgtagaggattagtccgtgaattccgcagttgaactagagcactgaatggcgtggaacttccttttacactctgaagatttaggattcttcacttttcccatcagtaaaattaggtaatttactagataatttgaaaattctttcccagctgggaagttttgatgtgcccagaagctaggatgggcagttgtccaggtttgtttaaaactagaggttctagaacacaggactttcagttttaaaattgggacagtcctgagcagtaggatcaagtcagttgtctaccagagtataatcaaattgaaataattttggatctgactaaccaagtcttattcaattagttgacattgttgtttaacttcgagtactattacagttctatattgttatagttcaaatagaagataacatctaaagcatttctcattccaaaggttaaatcttgcctttagcttcatttcttcaactctaagcaaatactgtgacgagctgctatagcctggaaaatagttttccttttgtgggctgctgtgcataatctcattcatagtaaagggatttgaagtttgatgacagaatagtcagagagctgaagttgtgtttgtttttttagcccaaatatttatttctcaagtttttgttgtgaaatgtttctagcacatacagaaagtatggcacataatgtaataggcacccatgtacctatcacccagctttattaaaccttaacatcttatttgctgtttttttgataagctttttttgcttctattgcttattgatcctacactaaatgaaatcctaactaaacaaaacaagattttgcatttaatttgaaaagagactagttatatgacaaaaaattgcagataaaattgaagtgctcctcccccattctttttcctcttttctcaggatagttactgtcctgaattgggtatttaccatgtttaataaaattgagtattaggcttactataatatttatgtacataaatcgtatcgcattatgtaatacacttggcatgttttaaaactttaggctgggtgtggtggctcacgcctgtaatcccagcaatttgggaggccgaggctggtggatcacaaggtcaggagttcaagaccagcctggccaacatggtgaaaccctgtctctactaaaaaaaaatgcaaaatttagccaggcgtgatggcaggcacctgtaatcccagctactccagaaactgaggcagagaattgcttgaactctggaggtggaggttgcagtgagccaagattgcaccactgcactccagcttgggcaacagagtaagactctgtctcaaaaaaaaaaaaaaaaaaaaaaagccaggtgcggtggctcacgcctgtaatcccaacactttgggaggccgaggagggcggatcacgaggtcaagagacagaccatcctggtcaacatggtgaaaccccgtctctactaaaaaaatacaaaaattagctgggcgtggtgacacgcgcctgtagtcccagctacttgggaggctgaggcaggagaatggcatgaacctgggaggcggagcttgcagtgagccgagattgcaccactgcactccagcctgggcgacagagtgagactccatctaaaaaaaaaaacaaaaaaaaactttatgtggtttatgtctgaaagttgaagagaatttccacatatatgttagtatatgttgcaaaagagacattcctatgtagaattttgggcattcatgtatatgtagatgcatgtagctctagcatttgttttctcttgtgaatatataaaaataattctgtttacaaacatttggtaggttccagtttttcacaataactgacagtgctgcagtgacatactaattcattagtctgtgtgcacttgtgtgagtttctcaaagatagttgctgtgattggatatatggatcttagaactattttagagattgctaggattcttccaaagtgtatattgcaggccaggcatggtggttcacggctgtattacatctatctcagaaaaataagagaagaaaagcatgggtgatcttggtgatttccccctttcattttctaaatgttctataatacagttatttaataatttaaaaagctattttgaaaaagtaatctcacgctgtcaccaaagctggagtgcagtggtgcaatctaaactcactgcaacctcgacctccttgagaccagggtggtctcaagtgatcctgccacctcagcctcccaagtagctgggaccacaggctcatgccaccacacctggctaatttcttgtatttttggcagaaatgaggtttcaccgtgttgcacagtctggtcctgaactcctgagctcaagtgatccacatgtcttggcctcccaaagtgctgggattacaggtgtgagctactgcgcccaacctaaaatattttatatatatatatatttttttttttttttttttttttttttttttttgagacggagtctcgctctgttgcccaggctggagtgcagtggcacgatctcggctcactgcaagttctgcatcccgggttcacgccattctcctgcctcagcctcccaagtagctgggactacaggcgcccgccaccatgcctggctaattttttgtatttttcatagaggcggggtttcaccgtgttagccaggatggtctcggatctcctgacctcgtgattcgcccgtctcggcctcccaaagtttttttatattttttaatgtgaggaaaggtcacaaaagaatagtatgctacctgaggaatatctctggaaagggatcaagcattcgaggttttctgtgatgactgactaaagtcatggagttagaacagctgatacaaaagaaaccaaaaaaggccaggcatggtggctcacacatgtaatcccagcactttgggaggccgaggcaggtggtcaggagtttgagaccagcctggccaacatggtgaaaccccatttctactaagaaaaaaaaaaaaaaaaagtcaatgggtgtggtggcatgtacctgtagtcccagctactcaggagactgaagcacgagaattgcttgaacccaggactcagaggttgcagtgagctgagattgtgccactgcaccccagtgcagtgtgacagagtgaggctgtctcaaaaaaagaaaaaaaaaacccacaaaagctcggtagcatgagatctttgagagcattcttatgttcttattggtaattggagtttatattatgcccttgtcatcaataatagcttcagttatgtttcttagtctccatttgaaaaaagaaatattcgctgggcatggtggctcacgcctgtaatcccagcactttgggaggccaaggtgggtggattacttgaggccaggagttccagaccagcctggccatcacggtgaaaccctgtctctattaaaaatacaaaaattagccaggtgtggtggtgcgcccttgtaatcccagctacctgggaggctgaagcaagaggattggtttcaaggttcacctgggaggtcaaagctgcattcagccaagatcacaccattgtactccagcctaggtgacaaagtgataccctgtctcaaataaatacatagacaaaaagcaaacctatgagctatttaaaggaccttgaggagaaaaaaaataaatgaaatgggtgatctaaatttaaatagaatctgcagctctggttagcctttgacagtgttgttgtatcattatagttatgaatttgttttctcagttgtgttaaagtggagtaaggcaaaaaagaacttgaaatctcaacgacctccagagaaacatgctagcttttgcatgagtaaaatctcttaggcacaaatattaataatatgttaagaaactttaggcttaagcctaacataacagccccataagtgttcagtattatctctaaccagttatgtcaactgtttgtggaaatgacagcctttcttggcattagaggaatggttaaacctctgactccagggaatcacaaagcttggtcagatgctgaatggaattatgtgtgttgttggaagcatgttccctatgattaataaatgttttcaagttttccacttaacttgccagttctttggttaagccactcttctagtcctgtcctacagagcaggcttagagccccacatttgtcattgtagaaattcaaacaatatccattaagtcatttttttttttttttgcccattaagtcttaaaggattaatacattttctttccttttttttttttttttgaaacggagcctccctctgtcgcccaggctggagttcagttgtgcgatctcggctcactgcagcctctgcctcccaggttcaagcgattctcctgccttagtctcccgagtagttgggattaacagggttgtgccaccacacctggctaattttagtattttagatagagatggggtttcaccatgttggtcaggctggtctcgaactcctgacctcaagtgatctgaccacctaggcctctcaaagtgttgggattacaggcatgaaccaccgtgcctgccaatacattttcttacaaatattaattattgaaaaaatgtattttaagtaaatattcagactataaatatatcagcataattgaatacattataaccacgtaggcatgttaactgcttacatgcgtgcatgaaatattaagggaaaagggcagaatataatatttgtaaacacaactatgtatacctgtgtgtatatattgaaaaacgttagcatttggggtgtcgtaaaaataagtttctgttttctttataaaattacctaaattcatattcaactacacacaattataaacttaattgcagagctaggtgtggtggctcatgtctgtattcctagtactttgggaggctgaggcaggaggatcccttgaggccaggagtttgagactagcttgggtaacatagcacgatcttgtctctacaaaaaaaaaaagtgaaaattagtggggtgtggtagtgtgcttctatggtcccagctacttgggaagctgaggcaggaggattgcttgagactaggaggtcgaggctgcagtgagctgtaatcatgccactgcacttcaacctgggcagcaaagtgagaccctgcctcaaaaaaagaaaaaaatgtgtggcaaaaactgccatgaacaaagtccaaaacaaactaggacaaaggcttgaaatatatgacagatatatcccaatatacatagaattcttatgaaattaaaaggaacatgaacaacttaactcagtagcaaaggttacaagcaatatttatggagtaagaaatagaaatggcaataaatatatgaaaagcctagttgatcagccttactaatagggataaaaattaaaacttcacttcttacctatcagtgagttaaaattgatacactgctgctgaggttgtagggaaataggctttcttgtatgctgtgttctttggagttaagttagtatttatttggaggcaagctcttaattgaatctacagatacacatgccttttggaaataatttagcaattaaatctaacctaatctgatctcacctagcatttcacttctgaaagtttatcctataaaaatattaccatagaagtgccaagaatttttattgaagttttatttataacagtgagaatgtggcagtaatctcaatctttatcattaattgcttatggtttacccagttagtagtgtaaaggtactagttaacagtagggtctcttgactaaacagttggactttgaatctccattctagaacttcttagcattatgatctttggcaaatttaactggcctcgctaaacttcagtttctttatctgttaaatgaagtttatagcaattaacttagagttttatttaaattaaatgagataaactgaatgattagtacactacctagcacatacttgttcaataaatattaacatttcttatcaaaattgccatatttaagaatgaggtatatttatatgtctagcatagaatcaaatatatattatcattattattttttttttgagacagggtctccttctatcacccaggctggagtatagtggtgtgatcatagctcagtgcagcctgtaagtcctgggctcaagtgattctcccatctcagccttgtgaatagctgggagtacaggtgtgtgccaccatgcctggctaattttttttgctgttagtttcactttttttgtagagctggggtctcgttatgttgcccaggccggtcttgaactcctgggctcaagcgattctcccgtctcggcctcctgaagcatacagattttttagggcagtgaatctattctgtatgatactgtaatcatggaaacctgtcattatctgtttatacaaacccatagactgtataacaccaaaaagtgaaccctaaggtaaactgtggactgtcaatgtaggttcatctgttgtaacggtttaccacagtggtgcaggatgttgatagaggctgttggaggggttatgtgggaactctgtgtactttctgctcagttttgctgtggatctaagtttgcatttaaaaatattttatggcttggtggctcatacttgtaatcctagcactttggaaggctgaggcgggtggatcacttgagttcaggagtttgagaccagcctgggcaacatggtgaaaccccatctctatgaaataaaaaaaaaagtaaataatactaatagtaattaactgggtgtggtggcatgtgcctatagtcccaggtacttgggaggctgaggtcggaggatgacttgagcctgtgaagtggaagttgcagtgagcagtgatcatgccactgcactccagcctgggcaacacagccagactcggtctcaaaaaataataataataaaataaataatataaataaaaataatattttgaaagaaaagagctatcaagccacaaatgcaaaaggcttcaagttcctatcttttagaaatacatactaaaatatttatgaaggaaatgatatatctaagatttgcctcaaaataatactggagtggcaaagtgagcgggggagtagatgaaacaagattagcatgagttcataattattgaagttgaataaattgcacatgggcttcattgtacatttctgacagtatttgtttgaactttttccataataaaaagttttgtttgtttttttttttgagatggagtcttgctctgtcacccaggctggagtgcagtggcatgatctcggctcactgcaagctccgcctcccaggttcacgccattctcctgcctcagcctccagagtagctgcgactacaggcgtccgccaccatgcccagctaattttttgtaattttagtagagatggggtttcactgtgttagccaggatgatctcgatctcctgaccttgtgatccgcccgcctgggactcccaaagtgctgggattacaggcatgagccaccacgcctggccttttttttaaaatggtcttacaggtaataccatgcatgcttaagtcatcattctcatatttagctaccaagatttttcctttcggaaatccctcagtattctagtaccactttcctctcatttgacacttttcaaagcacctacacactcccttgagaaagatacctttttttttttttgcgagggagtttcactcttttgttgcccaggctggagtgcagtggcatgatcttggctcactgcaacgtctgcctcctgggttcaagcgattctcctgcctcagcctcctgagtagctgggattacaggcacgcaccaccacacccagctaatttttttgtatacttttttttttttaagtacagatggggtttcaccgtgttggccaggctgggctcaaacttctgacttcagatgatccgcctgcctcgatctcccaaagtgctgggattacaggcgtgagtcaccacgcccagcccaagaaagatacatttttaaaaacagctttattgtggtataattgacgtaaaatgtacatacttaaagtatacagtgtgatgttttgatatatatgtatactcttgaaaccaccaccacagttaaaataatgaaaatgtccattacctccagaagtttcttcatgttttgttgtaatctctccttctcctccctgattcctccccatccccaggcaaccatgttttgtcaccgcgcgcagccatttactattatgatactattttatataaatagtatcatacaggccgggcacggtggctcatgcctgtaatcccagcactttgggaggtcgaggtgggcgatgacttgaggccacctggccaacatgaaaccccttctctattaaaaatgcaaaaattagccaggggtggtggcgtgcacctgtaatctcagctcctcaggaggctgagacatgaggattgcttgaacccaggaggcagaggttgcagtgagctgagattgtgccactgcactccagcctgggcaacagagtgagtctctgtctaaaaaaaaaacaaaacatacagactcttgtctggcttctttctttcagcataattattttgaaattcgtccatgttatgtggttcctttttattgctgagttgtataccacagtttttgatctatttacttgttggtagatatttggattttcagttctgaagcattacagatagtggctgttacggatattcatgtacagatctttctttgtatgggcatatgctttaatttatcttgggcaaatacctaggagtagaatatgatccaatatggtaggtgtatatttaacttttttttctatctatctatctatctatctatctatctatctatctatctatctatctatttttaagacggagttttgctccatctggagcaaaggctggagtgcagtggcatgatcttggctcactgcaacctctgcctcctgggttcaagtgattctcctgtcccagcctccccagtagctgggattacaggcgcctgccaccacacccagctaatttttgtatttgtagtagaggctaggtttcttcatgttggccaggctggtcttgaactactgatctcaagtgatctgcctcggccccccaaagtgttgggattacaggcgtgagccatcacacctggccagtttttatttatattttttatagaagatggagtcttcctatgtttcacaggctgatcttgaactccaggcctcaagtgatcctcccgccttggcttcccaaagtgctgggattataggcatgagcctctatgcccagccttatatttaactttttaaggtactaccaaagaactttccaaactggttgtataattttacatttctaccagcagtatgagttccagttcctccacatcctgtcagtacttgatactgtcagtcttttaaattttttagctcttataaaaaggtatatagttacatctcattttggttttaatttacatttctctattgagtaatgatgttgagtttcttttcatgtgcttgtcatcctgatatctttggtgacttgtctgttcaaatctcttgcccatttaaaaattgctttcttaatggattttaagaattatttacatagtctggatacaagtcctctgtaatatatataatttgcaagtgttttctcccagactgtggcttttctttttattaacagtgctttttgaagggcagatttttttttttttttttaaagagacagagtcttgccctgtcacccaggctggagtatagtggtgtgattatagctcactgcagcctcaaactcctgagctcaaagaattcttctgcctcattcttccaaacagctaggactacagatgtgtgccactgcacccagctaattccgtttgtatttcattgattgtgtttttggtgtcacatcttaagaaactttggcctacttcaagttctcaggagttttttcctgcattttcttctggaagctttatagtttcatgttttacattaggtctgtgatccttttgaagttgattgttatacgtggtccaaggtatggatcaaagttcatttttctgcatatggatattcaattgtttcagcactgttttttaaaaaagactattttctccactgaagtgcctttgtacctttgcaaaaatcagttgtccatatatgtgtcaatctgttccatcagtcatgggtcaaaggctgttctcatggggaggcttttgaatttgaaaaactgaaactctatactcattggacaactttatacccattgaacaactccccattttccatttctctcagcccgtggcaatatgctttctgtttctataacatggactacttgagtttttttcttttttttgatgacaagatctcactccgttgcccaggctagagtgcagtggcatgatcttggctcatggcagccttcacctcctgggctcaagctgtcttcccacctcagcctcctgagtaactggaactacaggtgcactctatcatgcctcgctaattttttaatttttttgtagagacgagttctcgccatattggccaggctgatctcaaactcctgggctcaagtaatcctcccactttggcctcccaaaatacagagattatgggtgtgagccatcatgcccagctggctagatatttcatgtaagtggaatcatacattatttctcttttagtgacttgcttattttgcttagcataatgtcctcaaggttcatctatattgtagcatgtgacaagatttcctttttaagggctgaataatattctgtgttatgtatataccacatatctgtgagtagacatttgggttacttccacttcgtggctatactgaataatgctatggtgaaagtggctatgcacatatctgtttgaggtcttgtttgtaattcagttcgtttttatatatactcattggtatttatataaatgggattgctgggtcatatggtagtttaattttttgaggaacctccatattgttttccatggtggctgcaccattttacattcccaccaacaatgcatagtggttccaatttcttcacaactttaccaccgcttgttactttctgttttttggtagtggccatcctaacgggtgtagtttttttttgcatttttctaatgattagtgatgttgagcatcttttcttttttccccccatattacacagatgtagagcatcttttcatgtgcttgttggctatttgtatatcttctttgaagaaatatctgttcaagtcctttgcccatctaaaaaaatctgatgatttgtttttttccaattgtttaattgtaggactttttttttttttttttttttttgagatggagtctcgctctgtcgcccatcctggaatgcagtggcgcgatcttggctcactgcaagctccacctgccgggttcatgctattgtaggactttttaatgtattctggatattaatctcttaccagatatatgatttgctttttttttttttttttttcgatacaaggttttactgtgtcacccaggctggagtaaagtagtgatgtaatctgggctcactgcaacttccgcctcccaggctcaagcagtccttccacctcagcctcctgagtagctggaactataggcactcgccaccatacccacctaatttttgtattttttgtagagacggagtttcaccatgttgcccaggctggccttgaactcccaggctcaagcaatccacctgccttagcctcccaaactgctggggttgtagatgtgagctaccacacccagcctgatttgcagatattttctccagttctgtaggttgccttttcactctgatgactgcttcctgtggtgtgtagaaatttggtgtaggcccatttgtctatttttgtttttgttctttaatttctcttagcaatattttgtaagtttcattgtacaggatatttggggatctgtaagacaaccctcaggttcagtaatttgctagaaagactcaactcagagaatgttttatactcaaattatagtttagtacattgaaatgatatggattaaatttagcaacagaaaaagacacatagggcagggtccaggagacaccccaggctcaagctgtcaatagtcctctcccagtggagttgtgcacacagtgcttaatttttccagcaacagtgtatgacaacacacgtggaatattggcaaccagggaagctggctgagccttggtgtccgggtcacacatggctgacctcagttctctggccccttcagaggccaagctgatactgtgtgacacaaggccctcaccgtagatcacattattagcggaaacttgttggcatgacccaatgcctcatgtaaacagcgcagtggctgtttataggccgggcgcagtggctcacgcctgtaatcccagcactttgggaggctgaggcgggcggatcacctgaggtcaggagtttgagaccagcctggctaacatggcgaaaccccgtttccactaaaaaaaaaaaaaaaaaaaaaaaatagaaaaagaaaccaaaccaggtgtggtgataagtgcctgtaatcccagctactcgggagactgaggcaggagaatcactctaacctgggaggccaaggttgcagtgagccaagattgcgccactgcactccagcctgggcaacaggagcaaaactccatctcaaaaaaaaaaaaagttaaatagaaaaaggacataaatgaaaaagcactcaaccatcctgataataagagaaatagatattaaatttatgccaagattccatatttctcccatcagattggtaaaaatctaagcacttgctaacataaggtgttagcaacagtgtggtaaagtaggcaatctcttgcattgctgattctctaaattggtgcaatccacagggagggcaatttggcatgctctcgttctctctctcgctcgctcgcgcgctctctctctctctctccatgagaaggagagagagagagagagagagcacgcgaacaagcgattgagtgagagagagagcacgtatctgcagtctcagctgctcaggaggctgaggtgggaggattgcttgagcctaggaggtcaacgctgtggtaagctgttgactatgccactgcactgcagcctagtgacagagaatctgtctcaaagataagaagaatgaggatattctttatgtactgatgtgtagaaaaatctctaagatacatagttaagtggagaaaacaaaatgctgcatggtgcatttactgtactaccatttgtgtgaaaagggggagtaagagtatgtgtttgtatttgcttgcatatgtagaaagaaactttgaaaggattcaccaaataacagtagtaagcagggggattaggaaactaggtatatattaagagggagcttttgtactctataccttttaatactttctttgagaccatgtgaatgttttacctatgtatttatttatttttaatttttgctttgcctgcttttaaacaaataaattgtactttttttgaagagctctatttttatttcctttcgattatcatctgtagattcttatgtcacattttactttaacagcacatttagacagaatacagtctttaaatggaagccgacaattgatttccctggaaaatttttgaagtacaataacatttgattgattgaactttatttagtaagaattcttagcaaaattccctcccaggcacacctacatggtgcttcattttcagtgaactacaaatctctgaaacccaaaactgcaatctaaaagtacaagatggctggactcgatggctcatgcctgtaatcccagcacttcgggaggccaaggcaggaggattgcttgagcccagaagttcaagaccagcttgggcaacatggtgaaactttgtctctacaaaaaattagccgagcttcacaaacaatcttacaggagtcattcattaattaactcaacaaatatttatagagtacaggagacactagagatccagcaaaggtcaataacatgtgctgtcttagagaaaacttatattctaagaataatcaagtgacaaacaggagctacatcaaataatcacaagtacacttcagagaattaaaaccagatcaacgtagagaaaggcttccttacattcgatagtcaggaaattctctctctaccaggagggaactgagtgacaaggaacagtcaggtgggagaagggcattccagatgaaccagccctgagcggggaactagaaggccagtttgagaaaaggaatggagagaggaggaacagtttgtggtcagagcaaggaccaaaccattttagacttcatgagcctaagaacttttgattttgttatgagcatgacaagaagccattgtaatcgagttttaaacaaaggaatgacatgatctcattttgtttaaaaaaaaaaaatcatcctggctgtagtgtggagaatggactaggggagcataaaagcagaaagaccaattggaagcctattaacagtaatccaaatgatagataatagtggtttgaaccacaaagattatggacatagaaagaagcagatagatccaggagatgttttggaggtattctggcagaatttgctggctgactagacagaggtactaaggaaaagaatcaagaataattcctagattcgggacttcctagaaactgggagaatggtgctgctgtttattgagataaatggagaagacagaggagaagcttagaatagagttctaggagaggtcagagatggagatcaacatttgggagacagaattttctaattccatagtgccgacgattttctattgatagactaaaaatgtctggaattttatatgcagtttcatctggacaataccctaagaggagatcagttataccttggcacctgctaatagccataggaatatgtatatgtagaataaatggtaaaactactgaatgcttaatatgtgccagacaccgtgagatacgtctttgaagtactatcccagtagaatttacaacaaccctatcaggagatactttttttatcaccattttacagatgaagacactgaagttcaaagaggttaaataactcgccccaaatcacactatatagaagagaaatctaaatcctggtagtctgaccccagaacttgggctaattaccactatataatacagtgtcactggggtaaacccaagatatgataacataagttagagacttttaaattccaaatttcacacactatgatttcacccataaaatgtagtgattcagccatagtcttctgattagttggagtaccctatgcaatactttaggaacttgcttcttttattttcatatatatatatgttcattcataaattaaatctggacagccagtgaatctgccatttttgtctctaaccaacacttctgtcacaaaattgtacttttttttgtttttttttgagacggagtctcattctgtcacccaggttggagtacagtggcacgatcttggctcactgcaacctctgcttcccgggttcaaacgattcgcctgcctcagcctcccaagtagctgagattacaggtgcccgccaccacactggctaatttttgtatttttaatagagacagggtttcaccatgttggccaggctggtcttgaactcctgacctcgggtgatccgcccgcctcagcctcccagagtgctgggattacaggcatgagccaccacgcccggcccaaactgtgctttttttaaataaagaaattaaaacagtatttttttccttaaagatggtgtctcactacattccctggctcaaacgattctggctcaaacgaattcctaggctcaaacgattctcctgcgttagcctcctgagtacctgggactataggtatgtgccactattcctgaaaacataatcagttttgaaggtagtgtctgggctgggcgcagtggctcacgccttcaatcccagcactttgggaggccgaggtgggcggatcacctgaggtcaggagttcgagaccagcctgaccaacatggataagactccatctctactaaaaatacaaaaaattagccaggcatggtggcgcatgcctgtaatcccagctactcaggaggctgaggcaggagaattgcttgaacctaggaagcagaggctgtggtgagccgagatcgcaccattgcactccagcctgggcaacaagagtgaaactccgtcttaaaaaaaaaaaaaaaaaggtagtgtgtggccgggcgcggtggctcacgcctgtaatcccagcattttgtgaggccaaggtgggcggatcatgaggtcaggagttcgagaccagcctggccaacatggtgaaaccctgtctctactaaaaatacaaacattaagccggcgcagtggtggatgccgataatcccagctcctcgggaggctgacgcaggagaattgcttgaacctgagaggcagaggttgcagtgagccaagattgtgccactactaggcgacagaatgagactctgtctccaaaataataataataataataataaaataaaaataaaagtagtatccagcgtactacaaagaggaagagtttgtgaatgtgtatgttactgttaagttaaacagtgttctagtatccatctcattatcagccttgggcagggcagggttgagttggctaatgttcattataaaccagatcatccagttggggactctgaatgagcatatgattgcccctttcatgctagacttagctaattaaactgttcatatgacctaaaaggatggctgtggtgccatagaaagaaaacaagttttgaggcaagagactttagtttgattcctacctctgctgttttctggttgtgagatttttggatcagttgcttttgtgttcatttaccaaaacttctcaagacaaaaagaataaatgagataatgtgacagtgccttgtaaataccaaatactatatagagatagctattattacttgtatgtttattgtgaacattaatcagccaatcaagttgttcagacttgtactgctgaacatcaattgcagatataacattcttggcagatgacttagtcacctccttctgtggaagaatagaagatagacagctccttgctgtctatcacagtatgttctggtcccgttggcctcaccttccatataatcatttccattctactgggctttagccactctggtgacttgagttcagcaaaaataatctttcttgatgggtggtatatatatttctaccttttatgctttagaatagtttcctttccatttctcatagggtttggatcttcataactgtttgaagagaaatcctgacctccagactgaaggaaagcacaccatgcctttataatgccagcctcggtcttttttttgttcccctctgtcttagttccttttgtattgctataacagaataccgcagactgggtgatttatttatttatttattttgttgttgtcatttgttttcttcttttttgtatcttttgaaattcttttcattgttgttgttgttttgagactgggtgatttgtttattcagctcatggttcttgaggctggaaagcccaagagtatatggtaccagcacctgattatgccatggtggatagacagaacggcaagagagagcttgcttttgtaacaaagtcactcccatgataactaacctactcctgtgataacgacattgcaggttcagtatccctgatttgaaagtctgaaattcaaagtgctcccaaatctgaagctttctgagtatcaatgtgatgctcaaaggaaatgcttattggagtgttttagattttggatttttagatttggtatgttcaacctgtaagtataatggaaatattccaaaatgcaaaatctgaaacacttctggtcccaaacatttcagataaaggatactgaacctttaatccattcatgaaggcagagtcctcatgacccagtcacctcctaaaggcctcacctcttgatactaccacaatggcaaccaggtttccagtacatgaatttttagggggatcattcaaactatagcaccctcctttatcccttaccctattccattagttttaatccccactttgtctcttcctctaatcttcagtctacactgtgacatgataggtatgctcaagtctctaacagctctaaaataacgttttctgtttttttttttgtcttcatttctggtggggttggataagaaaagtttttcaagttaaatcactctctattgcaagcctcttccaccttttttttttttttttttgcttcgaagaatgattgcctttaccttctcagttctcagttattttccagcacattatgattttatgaccttgatacagaagggctgggctcctggctaaattccacccttaaacctggaactgcaaccctaagtgaaaacagctaaccccattttttttcccacccaaatgttgcctctttggcctgccatgcccctatcctgtgctcataaaaatatttcagctgggctgggtgcggtggctcactcctataatcccagcactttgggagaccgaggcaggtggatcacctggggtcaggagttcaagaccagcctggccaacatggcaaaaccgtatctctactaaaaatacaaaaattagttgggcatggtggtgggcaccataatcccagctacttgggaggatgaggcaggagaattgcttgaacctgggcggcggaggttacagtgagcccagattgtgccagtgcactccagcctgggcaaccgagtgagactctgtctcaaaaaaaaaaaaacaaaaacaaaaaagatttcagcagctgggagaacaatataagcagctgacgtcagggatataaatggctgtgtgttgggaatacaagcagctgattgtcggaaatacaagccactgagtgttggtgatacaagtggctgagcagcgagcagagaatcaggtgagcgttggagactatggatgggacgtggctaacttcagatggtgcagctttggagaataggcccagccggagatggcctggcttcagggaaagatcaccttcttcccataccatccctttttcaactccccattctgctgagaaccacttccatcgtgcaatacaatcttctgcatatactacccttcaatctgttcatgtgatctgattattcctggacactggaagagaacctgggtgccaagaggagagggcaggggctgccaccctgaccctccactgagctggctggcacctggccatccccgaatggccgcgttgaaggagcattgattgtaacacacttggatgctgctgcggggccgcatagagcctgcgcctgccagagaggagcaactggctggttcccgcattcgtttgctctgattcccacactcactcactcgcttgcacactgcctcttgcaaggggtttgagtgtgtggtggccgagtaaacgagccacgctccgagccatgagggggtcaagggaattatccagtctcatctcaatccgacttccctcttcactgttttacttttgtaaaacccttgatgaacttcccattgtcaattcagggtctttttagctctcatcctgccagactgttgataacacctctgatttgtgctccacttttggcttctgtgtcatattgattcctgagttttcttccttctcctctattctcttaatctcgttttctggttttctcccatcacctgctggttaagcttaggggttatttacacttctctccttggtcatctttttactgtatttttccctccacagctatttcatccatttctgaggcctgagatttcatccatttctgaggctatagagaccagtgacttcctctgactcttctgagcttgaaattcctattggtaactgccattggacttaactgcctggttatatctctaactaaagtacttctctcttccagcctgtttatcttattgtgttccattgtgttccttatctctaccaatgctagttccttatgctagaaatctcattcattgccactcaatcaagtttgctaaaaacgaaacatctgattgtgtcacttattcaaccttaccaatttttttttttttttgagccttgctttgtcacccatagtggcacgatctctgctcactgcagcctccaccacccaggttcaggtgattctcctgccgtagcctcatgagtagctgggattacaggcatgtgccaccatgcccgactaatttttatatttttagtagagacggggtttcaccatgttggccaggctggtctcaaactcctgacctcaagtgatctgcccaccttggcctcccaaagtgctgggatttcaggcgcctggcctgttacttgattatatgctaaacaaggggtggattattcatgagttttctgggaaagaggtgggcaattcccggaactgaggatccctcccctttttagaccatacaaggtaacttccggacgttgccatggcatctgtaaactgtcatggtgttggcggggagtgtcttttagcatgctaatgtattataattagcgtatagtgagcagtgaggataaccagaggtcactctcctcaccatcttggttttggtgggttttggccagcttctttattgcaaccagttttatcagcaagatctttatgagctgtatcttgtgctgacttcctatctcatcccgtaactaagagtacctaacctcctgcaaatgcagcccagtaggtcttggccttattttacccagcccctattcaagatagagttgctctggtccaaacgcctctgacacaaggattttaaagtcttattaattaaggtaagatagttccttgcatatgtggtctgaaatcacagaaagctgaatttgaaaaaggtgcttggagctgcagccagtaaacaagttttcatgcaggtgtcagtatttaaggtacatctcaaaggataagtacaattgtgtatgttgggatgaacagagagaatggagcaagccaagacccaggtaaaagagaggacctgaatgccttcagtgaacaatgatagataatctagacttttaaactgcatacttcctgtacattgttttttcttgcttcaggtttttagaactcatagtgacgggtctgttgttaatcccaggtctaaccgttaccttgattctgctgagaatctgatttactgaaaatgtttttcttgtgcttatagaatgacaatagagaacggcaggagcacaacgacagacggagccttggccaccctgagccattatctaatggacgaccccagggtaactcccggcaggtggtggagcaagatgaggaagaagatgaggagctgacattgaaatatggcgccaagcatgtgatcatgctctttgtccctgtgactctctgcatggtggtggtcgtggctaccattaagtcagtcagcttttatacccggaaggatgggcagctgtacgtatgagttttgttttattattctcaaagccagtgtggcttttctttacagcatgtcatcatcaccttgaaggcctctgcattgaaggggcatgacttagctggagagcccatcctctgtgatggtcaggagcagttgagagagcgaggggttattacttcatgttttaagtggagaaaaggaacactgcagaagtatgtttcctgtatggtattactggatagggctgaagttatgctgaattgaacacataaattcttttccacctcagggccattgggcgcccattgctcttctgcctagaatattctttccttttctaactttggtggattaaattcctgtcatccccctcctcttggtgttatatataaagttttggtgccgcaaaagaagtagcactcgaatataaaattttccttttaattctcagcaaggcaagttacttctatatagaagggtgcacccttacagatggaacaatggcaagcgcacatttggacaagggaggggaaagggttcttatccctgacacacgtggtccctgctgctgtgttcttcccctactgactagggttagactgcacaggctaaactaattccaattggctaatttaaagagaatgatggggtgagtgctttggcaggagtcagggaagagcaggtagcaggtaactggaatgagggtggagcaggtaatggaaaaacattgctttacgaggaagttaagtttaaaagtagaaggcaaagaattgaacatactggcgtattaattctttgaaatttagaactcacatctaacattggcttaaatgttaaatcctcaaagataacattcctgtttctcctaacacgattaagtccttcttggtatcttttctcatagcaacttgtcctttctcacttgtcacaatttgcaaatatatatttatttacattgtttatttaatgcctaatttccttctttattgcaaggcctgtgagggtactgagtctccagggtgaggtgtataataaatggccaaacgaattgttaattgaaaggatgaacaactaattcaagccagcactctctagactcctggggggctatcatgtgggttccctggtgctgctgatgtcagcccttggcctccaagaaaaatgcttgattcaaatgtcatctagttccatctctacgactctcatggggtccaaagaagagttttaattgagttttagaatttgaagttgtgaagtgtctgaaaaactacatggtgttctgaaagccaaacttttagccttttgggagagcatctaagacagcaggtgaagggcaggggttagaactagagggattgaagaatattatccatataggttagggttaggtttggcaacgtattatagaacaaacattggcaagctacagccacaggccagatctgtctgctacctttccacaaaggtgtaataacaaagttattcacaaatttgtgaataaactttcattggaaagtgaccacgctccttggtttatacattgtctgtggctgctttcacactacagtagcacagttgagtgtttgcactggagaccatatgacccatagagcttaaaatattcagtctggctttttacagagatgtttctgactttgttaatagaaaatcaaaacaactggtttaaataatgcacatactttctctctcatagagtagtgcagaggtaggcagtccagattagtacggtggcttcacgttcatcaaggactcaatctccttctttcttctttagcttctaacctctagcttacttcagggtccaggctggagccctagccttcattctgacagtaggaaggagtaggggagaaaagaacataggacatgtcagcagaattctctccttagaagttccatacacaacacatctccctagaagtcattgcccttacttgttctcatagccatcctaaatataagggagtcagaagtaaagtctttttggctgggaatattggcacctggaataaaaatgtttttctgtgaatgagaaacaaggggaagatggatatgtgacattatcttaagacaactccagttgcaattactctgcagatgagaggcactaattataagccatattacctttcttctgacaaccacttgtcagcccacgtggtttctgtggcagaatctggttctataacaagttcctaataagctgtagccaaaaaaatttgatgaggtattataattatttcaatataaagcacccactagatggagccagtgtctgcttcacatgttaagtccttctttccatatgttagacattttctttgaagcaattttagagtgtagctgtttttctcaggttaaaaattcttagctagattggtgagttggggaaaagtgacttataagatacgaattgaattaagaaaaagaaaattctgtgttggaggtggtaatgtggttggtgatctccattaacactgacctagggcttttgtgtttgttttattgtagaatctataccccattcacagaagataccgagactgtgggccagagagccctgcactcaattctgaatgctgccatcatgatcagtgtcattgttgtcatgactatcctcctggtggttctgtataaatacaggtgctataaggtgagcatgagacacagatctttgctttccaccctgttcttcttatggttgggtattcttgtcacagtaacttaactgatctaggaaagaaaaaatgttttgtcttctagagataagttaatttttagttttcttcctcctcactgtggaacattcaaaaaatacaaaaaggaagccaggtgcatgtgtaatgccaggctcagaggctgaggcaggaggatcgcttgggcccaggagttcacaagcagcttgggcaacgtagcaagaccctgcctctattaaagaaaacaaaaaacaaatattggaagtattttatatgcatggaatctatatgtcatgaaaaaattagtgtaaaatatatatattatgattagttatcaagatttagtgataatttatgttattttggatttcaatgcctttttaggccattgtctcaaaaaataaaagcagaaaacaaaaaaagttgtaactgaaaaataaacatttccatataatagcacaatctaagtgggtttttgtttgtttgtttgtttgttgaagcagggccttgccctgtcacccaggctggagtgaagtgcagtggcacgattttggctcactgcagactcaacccaccagtttcaagcgattctcctgcctctgcctcccaaatagctgggattacaggtgtgtgccaccacactcggctaatttttgtatttttagtagagacagggtttcaccatgttgaccacactggtctcgaactcctggcctcaagtgatctgcccaccttggtctcccaaagtgctgggattacaggcatgagccactgcgcccggccctaagtggttttaatattttgattgacagtatactgaagaaatatactctaagacctttatgaatctcctcattcacaaataacactgtaggatataatggtccctataaaatacggtataactaaaatcagatttttatattggagtacagaacaataaagccatcttcagatgctggtattaaactcactggtgactggtcacaccttgcctaaactggtagccaccatgcatcctctcaccatctccactgtactacttccttccttgggaagtcgggcgctgggaggttgtacaggaaagatacagacccacccttctcagcctctcctcccctagctcgctcttttgccaaagtgacctactgctgagtttcaaagtgacctactgctgagtttcagccaactagcacgtttcagattcataccttagaaaaaattacacattatcacaagtcatgcaccttttaaggtcattttcaaataatagaaattataagtgttcggccaggcatggtggctcatgcctgtaatcccagcactttgggaggccaaggcaggaggattgcttgaggtcaggagttttttttgtttttttgtttttttccccgagacgaagtctcgctcttgtcccgcaggctggagtgtgacagcgcgatcttggctcactgcaagctgtgcctcctgggttcaagcgattcttctgcctcagccccccgagtagctgggattacaggcgcctgccaccacacccggctaatttttgtatttttagtagagactgggttttaccgtgttggccaggctggtctagaactcctgacctcaggtgatccacccacctcggcctcgcaagggctgggattacaggcgtgagccaccatacctggccgaggtcaggggtttgagaccagcctgagcaacatagtaagacctatctctaccaaaaaaaaaaaaaattaactttccaaatgtaggagtctactctgtttccttctagtatttatttctgtatacttttctaacatggttaaaatgtgtaatcaatatgtgtccttttactttggtgtgaacattttttctattataaattcttagaaaatatttctatggctatgagatatttgattcaagtgccttgtaatttacttctcaaatgtccctgatgttggacatttgtttctagtgtttcactattttaaaaaacagtaatatctgtctttatgcttagagctttttcagtttttcaaattatttccttagggtaaaatcctagaagtagaatttttggggcaaattatctacatatttataactgtcttggtattcaaaatctcgttttcaaaaagcttatatcaatttgtacttaacaccagtagtgaatgagagtatctgtcgtaccccaccagtgctgaatttcttttttaaaactgtgctggtttttataggtaaagaaaatgtcttaatttgcatttagttggttactagtaatatcacataccttttcaatgcttgtgaactttaagcttatacagagtttaaccttgcatgttgaacatttgagtgagtggaagtgttaagtgatggccatctgtataatctattagtaatgtatggagaccattaaagatgacaggtatgtgtgatgatgacaggttgttaccaacactcagaaggccaaaaagcaagtgatataaacccatgctgggaagcattcgcctcccccactttaaaaatgctagtttcttaattccttttctttatccctttttttgtctgcacgtgtttacttgcctttagtttccctgctttagtaggctgaccttgtgacttttaccaggatcccattatacttttgttcttctgtttatttctcagattttattggagggtggaattctactttttctttcttataatctagaatttacattcagatttcctgcctttcccttacaaaatacctgtgtagttggataggtggagctctggactcagagttctttcttctagtaatcttaggaaattatttaatttttctgtgttttcatattttcacacataaaagagaaaacaccatttctaaactacctcttcttttctctgcttttaagcatgtaaaggttttcccaatcttgggcagtgacatgtacaggacagtatagctttacatctgccttgttttaattaaacactagttctttgaggtaacccctactattatcccagttttatggatgaggcactgaggcaggggtcacacagctagtgtgggtcagaacctaatgggtcagaatggacatttgagtccagagtttggcctggattgacacacatagctattacgtaagattcctctcaaattcagtcctcagctccctgaagtgtgggttctcttttcatgcctccatggaaactgcgtatcatgtggttaccagtttttcctttggtcgtatctgctgacctttttgaacctaattttttctggaccttattgccatttgacttatttattgcctcccacttgacactgattctggcttttgcttttcttcctactttggtcctttttgcagttttctaaagctaaccagccatgactctcagatgatggactttttcgtctctcccattacttcttgggaaattatattttaatctcatggtttaaattttcatccttaaatataacttttaatgtagtatttttagcccagaagggcccatggttggtttgttttctcctttgcatatctcttctactcagatacctggtagcatataaatcaaatgaattatccttcataccatttcattatcatcagtaggactgctttgctggggtttttttgtgtgtgtgtttttgtttttgtttttgtttttgttttgagataaagtcttgctttgtcacctaggcaagagtgctaggattacaggcgtgagccgctatgccaggacagccgttttcttctagtattatttgccctctgtctgaacatcttcctttagtaatgcttttagagcaaggcagctggcctcaatttgttttaatttttcttccccttaggatgttttaattttacctttattactgaaggatattgttactgggcagaaaattgtcttgatattccccttttcagcatttaaaaaatgctcttctgctttctttcagcctccatggtttctcataaaaatcagtcattcgaatcactgttcttctaaaagtaatacattgttttgttctggtcactttcaaaattttctttttcttttcagcagtttaattatgggactgtgtgaggatttctttgttcattctgtttggagttcactgagctttttgaatctctaggtttatgtcttttaccaaatttggaaaatttttcaaccattatttcttcaaaatttttctgtaccacattctttactctttttttttttgaaacagagtggcgcactgcaacctctgccttcccggttcaagtgattctcctgcctcagcctcccaaagtgctgggattacgggtgcctgccaccatgcctggctgattttgttaatttttagtagagacggggttttaccacattgaccaggctggtcttgaactcctggccttaagtattccgcctgcctgggcctcccaaagtgctgggttacaggtgtgagccaccacacccggcccttttttttttttttttttgagaccgagtctcgctttgtcacccaggctggagtgcagtgatgtgattttggctcactgcagcctcagcctcccaagtacctgggattacagagatgtgccaccatgcccagctaatttttgtatttttattagagatggggtttcaccatgttggccaggctggtcttaaacccctggcctcaagtgatccgtctgcctcagcctcccaaagtgctgggattacagacgtgagccaccatgcctggctctttaccctcttctgggagtgacaacacaaataactttttattccacaggtttctgaggctctgtttattttccaatttttttcactattgttctggttagataatttctattgatctgtcttcaagtttcctgaaatttgcattttgttggtaaacctattcagtaaaatgtttttggttattttatttttagttctaaaattcctatatagcccgtctttacatttttttattctgaaacttaaaactttcctttcattttaagagtgtttgcccttacttcttggagcatttttatgctccaaggattttgatatttttgttttattggccaattgatctgattgggctaggtccagccagccttgtcaaagcctttgcagtgttgctcagatctgccccatgtatatgccacccagtcaccagtctgggactggtatagtggtgttctatttgtaattcggttgtcagggtcggtgtgtactgttgaggatcatatccatactcactcaccttgggaatggacccacaagtttataaacagctttaagagattgctttcatgagtttctttctttctgtgatctccatgtggtttcttgggcttcccttttccattcctgcagccaaaagtggactttatcttcctaaagtcagggccaaaatgtgggaggagagagagaaataaagcaagggctatttgccccactctctcgggactgacattcttccagtcagagtaaggattccctccctctgaattttaggcttctgccacccacattaccatcaccacaggattgtgtgaggactgggcatacgagaatggagaaaagcggaaaagaatgccgggtgtggtggctcacgcctgtaatcctaacactttgggaggccaaggcgggcagattgcctgagctcatgagtttatgaccagcctgggcaacacagtgaaaacctgtctctactaaaatacaaaaaattagccaggcatggtggtgggcacctgtagttccagttactcaggaggctgaggcaggagtattgcttgaacccgggaggcagaggttgcagtgagccaagatcgtgccactgcactccagcctgagctacagtgcgagactctgtctccaaaaaaaaggaagaaaaactggatttttacactgtctgggtgttaggagacctctttcctgatcctcaagccagaactagaggtcttctggagctcccattgtcttgctaatgcccactcatgttgtaatgagcacaggtggaggaaaaaaagtggtcagctcactgctagtacttctaattccccagcccacctacctctcattacttttcatcttttgcaaccagctgctgcctgctttctgcccaggttttgtaactgtattcagtgggatagagagagtggaaggtacttactccatcttatctggaacctttcttaatatattttttgtcgcatttgtacatcttttatccatccttcattttattttatttttttttttgagacggagtctcaagtctctcgcccaggctggagtgtagtggcatgatcttggctcactgcaacctccgcctcctgggttcaagtgattctcctgcctcagcctcccaagtagttgggattactgggacacgccaccatgcctgggtaatttttgcatttttagtagagatgagggttccccatgttgcccaggctggtctcgaacttctgacctcaggtgatccactggtttcggcctcccaaagtgctgggactacaggcctgagccaccacgcccagccttatccttcattttagacagtttaagaggtttgtattcagccagatctccacatttacttgttcatttgtgttgtgatgttttttaatgttcaagtcttagcacacacaaacaattatatagaaacaagttgtttactttgacacccagtataactaaaaggatcttttgagtcagagattcagtaacttgccagagcctgtttggaaataaaccctgaggatttttcatatcagtggttggttatgcaatgtctgtggcaagccctagaaactaaaagaccaaaccttaaaatgttaaaaacaggaaaggcagttaattattatacataatttgttataaaaggaactataacttattaaagtcagatgatttctggccttgatagtttagggtttagagaagatactgttgtgtactataaaacagcagggctgttttctttcataccctttagcacaggaaagctgaactagggatttttgcaagatgagaaaggcctgttgaaatgtgtgtgtataacatagtaataaaagaaatgcatatgaaaataacaaattaacatatttgacatattgactttgtcaagattagtcttttttgtcaagtaactaagccagtgtgtattaattaaatcagtaattagaaaaagtttgtacactttgatttagtaattttgcttttatgatatattctaaagaaggaattagaaatgcagaaaaatatttgtgaagtaggatgttcattttaatgtaaattaaaattggggaaagaaagggaaaacaatacagattccatgcataaggcaaaggttcaattgtgggtttatccgtatgagtagactattattttgtcatttaaaaatcatagtttcagctgggcgtggtggctcacgcatgtaatcccagcactttaggaggctgaggtgggcggatcacctgaggtcagaagatcgagaccagcctgaccaacatggagaaatcctgtctctactaaaaatacaaaaaaattagctgggcgtggtggcgagtgcctgtaatcccagctactcaggaggctgaggcaggagaatcgcttgaatctggggagtggaggttgcggtgagattgcgccattgccctccagcctgggcaacaagagcaaaactccatctcaaaatcaatcaatcaatcagtcaatcaatcatagtttcacgccaggtgcagtggcacggacctgtagacccagttacttgggaccctgagacgagatgattgcttgagcccaggttttccagtctagcctgggaaacatagtgagaccccagtctcttaaaaaaaaatcatattttcaaataatatttggtggcatgagaatatgtttgtaataaaagattacatttgtgaaagcagaatgtaaacagtacactagttgattctcactgttaaggtctttacacacgcctatacgtgcagatagaaaacatgtctgaaagggaaacggttttattttgtttcgtatttttttttgagacaatgtctcactttgtcagtcaggctggaatgtagtggcactgtctcggctcactgcaccctatacctcctgggttcaagcaatcctcccacctcaacctccatggtagctgggactacaggcacctgccaccacgcctagctaatgttcgtatttttagtagagacggggttttggcatgttggtcaggctggtcttgaactcctgacctcaggcaatccacctgtctcagcctcccaaactgctgggataacaggcgtgagccactgtgcctggcctgaaagggaaatgttggtattaattttggttgtcactggcctttagaatagttttcttcttttagtgtttctgtgtttcttaagtgttacaagcatatgttacttttgattcagaaaaatgctatttttaaaataagcaagactgggcacggtgactctcaccagtatggctgagaccagaggatcacttgaagccaggagttcaaaaccagcttgggcaacagagtgagacccccacctctacaaaaagaaaaaaaaaaaattaaaaaattagccaggcatggtggtgtacccacgcctatagtcctaggtactagggaggctgaggtgggagtatggcttgagcccagtggttcgagattgcagtgagctacgatcatgccactgtaccccagcctgggcaacacagtgaggccctatctcaaaaaataattaaaaaaaaaatatttgggggctcctagaaggtacagttaaaaaaattaaaattaggccgggcatggtggctcacgcctataatcccagcactgtgggaggctaaggagggtggatcacttgagatcaggagttcaagaccagcttggccaacatggtgaaacttcatctctaatacaaaaatcacctgggcgttggtggtgggtgcctgtaatcccagctactcgggaggctaaggcaggagaattgcttgaatctgggaggtggaggttgcagtgagccaagaccatgctactgcactccagcctgggcgacaaagtgaggcttcatctcccaaaaataaataaataaaattaaaaaaagaaataaataagaacatcttcttcctttgccaaaaaaccgaggtgaaaagcatctctcaagaatgatgagaatttcaattatttaatatttactctggtccttaatttaaagcttaatatggaatcccagtgtacatctcccactggtattgtttgtcttggccaagacagacaagttttaaagagtgagataaaatttaggctaaagttgaagtatttggagggaaatgtacagatgttctcagcttaccttttttgtttttttgagatggagtctcgctctgttgctcaggctggagtgcaatggtgcgatctcagctctccacaacctccgcctctcaggttgaagtgattctcctgcctcagcctcccaaatagctgggactgcaggtgtgtgccactatgtctggctaatttttgtatttttttttttaatttattttttattgataattcttgggtgtttctcacagagggggatttggcagggtcataggacaatagtggagggaaggtcagtagataaacaagtgaacaaaggtctctggttttcctaggcagaggaccctgcggccttccgcagtgtttgtgtccctgggtacttgagattagggagtggtgatgactcttaacgagcatgctgccttcaagcatctgtttaacaaaacacatcttgcaccgcccttaatccattcaaccctgagtggacacagcacatgtttcagagagcacagggttgggggtaaggtcacagatcaacaggatcccaaggcagaagaagttttcttagtacagaacaaaatgaaaagtctcccatgtctacttctttctacacagacacggcaaccatccgatttctcaatcttttccccacctttcccgcctttctattccacaaagccgccattgtcatcctggcccgttctcaatgagctgttgggcacacctcccagacggggtggtggccgggcagaggggctcctcacttcccagtaggggcggccgggcagaggtgcccctcacctcccgggcggggcggctggccgggcggggggctgacccccccacctccctcccggacggggcggctggccgggcagaggggctcctcacttcccagtaggggcggccgggcagaggcgcccctcacctcccggacggggcggctggccaggcggggggctgatccccccacctccctcccagacggggcggctggccgggcggggggctgacccccccccacctccctcccggacggggcggctggccggccggggggctgaccccccccacctccctcccggacggggcggctggccgggcggggggctgacccccccacctccctcccggacggggcggctggccgggcggggggctgacccccccacctcccgtcccggacggggcggctggccgggcagaggcgcccctcacctcccggacggggcggctggccgggcggggggctgacccccccacctccctctccgacggggcggctggcctggcagaggggctcctcacttcccagtaggggcggccgggcagaggcgcccctcacctcccggacggggcggctggccgggcggggggctgacccccccacctccctctcggagagggcggctggcctggcagaggggctcctcacttcccagtaggggcggccgggcagaggcgcccctcacctcccggacggggcggctggccgggcggggggctgacccccccacctccctcccggacggagcggctggcggggcggggggctgaccccccacctccctcccggatggggcggctggcctggcggggggctgaccccccccacctccctcccggacggggtggctgccgggcggagacgctcctcacttcccagacggggcggctgccgggcggaggggctcctcacttcccagacggggcggctgccgggcggaggggctcctcacttctcagacggggcggccgggcagagatgctcctcacctcccagacggggtcgcggccgggcagaggtgctcctcacatcccagacggggcggcggggcagaggcgctccccacatctcagacgatgggcggccgggcagagacgctcctcacttcctagatgtgatggcagccgggcagaggtgctcctcacttcctaggtgggatggcggccgggcggagacgctcctcactttccagactgggcagccaggcagaggggctcctcacatcccagatgatgggcggccaggcagagacgctcctcacttcccagacggggtggcggccgggcagaggctacaatctcggcactttgggaggccaaggcaggcggctgggaggtggaggttgtagcgagccgagatcacgccactgcactccagcctgggcaccattgagcactgagtgaacgagactccgtctgcaatcccggcacctcgggaggccgaggctggtggatcacttgcggttaggggctggagaccggcctggccaacacagcgaaaccccgtctccaccaaaaccagtcaggcgtggcggcgtgagtctgcaatcgcaggcactcggcaggctgagtcaggagaatcaggcagggaggttgcagtgagccgagatggcagcagtacagtccagcttcggctcagcatgagagggagaccgtggaaagagagggagagggagaccgtggggagagagagggagagggagagggagagcgcttaaaacaatttttaagatgtatttcttttctcatagttccagaggccagaagtcccaagtcaagggttggaagcaatttttgtatttttagtagagatggggttcaccatattggccaggctggtcttgaactcctggcctcatgatccgcctgccgtggcctcccaaagtgctgggattacaggcatgagtcactgcgcccgatctctcagtttactttgatatgtattaataataacaaagactaatggatgaggagctagacagaaattttataaaccaagtactgcaaaatatgaatggtagactctaggtgatatatgggtgttcactgtaaaattaattaaattttgctgtgtgttcgaacatttttgtaacaaaatgttggaaaatttttgtggaagaacaccagaaacaactttgttgtatctggatataatttagaatattcaaatgttggctaggtgcggtggcaacctgtaatcctagcactttgggaggccaaggcaggtggatcacctcaggtcgggagttcgagaccagcctgaccaacatggagaaactctgtctctactaaaaatacagaattagccaggtgtggtggcacatgtctgtaatcccagctacttggggggctgaggcaggagaattgcttgaaccctggaggcggaggttgcggtgagccgagattgcgccattgcactccattctgggcaacaagagcgaaactccgtctcagaaaaaaaaaaagaatattcaaatgtccaaggagtaccaatatctaggtaaagccattctgttggcctttgccaaattgtactattttataaagttgttttaaagagagatgtgggccgggcatagtggtgcacatctgtaatctcagcactttgggagtctgaggcgggcggatcacttgaggtcaggaatttgagaccagcctgggcaacatggcgaaaccctgtctctactaaaaatacaaaaattagcctagcgtggtggcgcgcacgcgtggttccacctactcaggaggcttaagcacgagaattgcttgaacccaggaggcagaggttgtggtgagctgagatcgtgccactgcactccagtctgggcgacaaagtgagaccctgtctcaaaaaagaaaaaaaaaatctgtactttttaagggttgtgggacctgttaattatattgaaatgctttcttttctaggtcatccatgcctggcttattatatcatctctattgttgctgttctttttttcattcatttacttggggtaagttgtgaaatttttggtctgtctttcagaattaactacctttgtgctgtgtagctatcatttaaagccatgtactttgttgatgaattactctgaagttttaattgtttccacatataggtcatacttggtatataaaagactagtcagtattactaattgagacattcttctgttgctccttgcttataataagtagaactgaaagaacttaagactacagttaattctaagcctttttgaagattatatagtcttctagtagaagtctgtgcatcagaatgttttaagaaagggttttaagaatgtataaaaaccaaaataattgattttcatacttctatattgttttttatcagtgactcttttttctttcaaatgaaatcttatatgaaattttcatatataatatagaaaaaagtggatctagtctgtcaaagagaatagtgaagctcagagatgtgccagcctggcctttttctcagctcaagtggcagaatacagtttgtaaacaattgcactagctcttaaattcgaagaggcagtcaaactaataaataaattggagagttatttctttggtagaggattaagggaaataaccacagacagaagaagcaaatatgagaatctatgtgaaatggatgatattctagaaaaaaaattatcaaaactgacccctaaagagagaatatctaaacagagtaaagaagaggtacagaaagttactgaagaagtttccaccccacctgcacaaataacaatagtaccaggccccagtggattaatggggaaattctgttaaacctttaaggaatggtaactctaatactaagtgttccgaacatataaaaagaaaaaaagcttccagattaattttatgaagccagcataacattaataactaaagccctgcaagttatcaagtaaaagaaaactattggtcggttatatttattgatttcaaaagcataacagaatattaagagaattcagcaatagatgaaaagaataatactttttttttttgagtctcacgctgttgcccaggctggagtgcagtggcatgatctcggctcactgcaacccccacctcctggattcaagcgattctcctgcctcagccccctgagtaaccgggactacaggtgcgcaccaccatgcccagctaatttttgcatttttagtagagacagagtttcaccatgttggccaggatggtctcgatctcctgacctcgtgatccgcccgccttggcctcccaaagtgctggaattaacaggcctgagccaccgcaccctgccataataatacatttgaccaagtggagtttgtttgcagaatcgttcattataagttgccatattactagatcatcatctctgtatgtgctaaaaggcatttgataagattcctgttcttgatcagattccttaataaatagacggggtcgggtgtggtggctcatgtttataatctcaatactctgggaggctaaggtaggaggatagcttgaggttgaaagttggataccaacctgcgcaacataacaagactttgcctctacaaaaaataaattagccagttgtggtgtgtgcatgtagttctagctgcatgggagactaaggcgggaggatggcttcagcccaggaattcaaggctgcagtgagctatgattgcaccactgcaccccaggctgggtgactcagtctctaaaaataaataaataactaaatctctaacattataaaatgtatgcatctcattctaaaggccaatgtcatcctcatagggaagctagaagcttgcctattaaggtcaggaatgagatggaggttttcttttctttcttttgtttgtttgttttttgttttgttttttctgagatagagtctcactctgtcatccaggctggagtgcaatggtgtgatctcggctcacaggaacttctgcctcctgggttcaagcgattctcctgcatcaaggcctcccaagtagctgggattacaggcacctgccactatgcccggctaatttttgcatttttagtagagcaggggtttcaccatgttggccaggctgttctcaaactcttgacctcaggtgatccacctgcctccgcctcccaaaatgctgggattacaggcgtgagccactgtgcctggctgagatgaaggttttctttatcaccaattatctagcattgctctggagggactagcaaacacaattaaacaggagaaagaaatacgaactatataatttggaaaagaaggttaaattaccaatatttggagataaaatgattgtttactttgttttagaactaactgaaaaccaattcaaattactaagtaagtttggtaaggcaattaattgattacaaaattaaacaaaagtcccctgtctgggtgccgtggctcatgcctgtaatcccagcactttgggaggccgaggcgggtggttcacctgaggttaggagtttgagaccagcctggccaacgtggtgaaaacccacctctactaaaaatacaaaaaattagccgggcgtggtggtgggtgcctgtaattccagctactctggaggctgaggcaggagagtggcgtgaacctgggagatggaggttgctgtgagccgagatcgcaccattgcactcccacctgggcaacaagagtgaaactccatttcaaaaaaataaagtgaaaacacaaatcaataaccttcacataaacaactagttagaaaacataataaaaggataagtcccatttatgatagcagcaaaaaagattaaatatctacgagtaaacaagaattgtgcaagccctggacactggtgaagcagagatgccagctgaggtcctgcccccagctccccttaagctgagcagtgtggagaacatcttgcacaggctgctgactgccttccaagaagcccttgacctttaccatgtgttggtctcccttgaccgggtgggcactgagcagtagcaggtgtagactgagctggcctctaacttcctttggatccacagccagttgtaggccaacaacggggtggaggggtctgatgtggctccaggccctctccagctcaggttacccctccttatgtacattgtactcagagctgctagtgcaggctgtgcagaggaaggcaggggacactgaggtccagcagtccctgctcctgcttctgaagaaatagatattttaagtgaataaactgacagcttagaggggtaaaaaagataatatgcaagatctattgagaattttaaggctgggtgtggtggctcacacttgtaatctcacctatttgggaggccgaggtgggaggatcctttgagcccaggggttctagaccatcctgggcaacatggttgaaactccatctctacaaaaaatacaaaacttagccaggcgtggtggtgcatgcctgtagccccagctgcttgggaggctgagtcaggaggatcacttgagccaaggactttggggctgcagtgaactgtggttgtgccctctatccagggtgacagtcagaccttgtctctatttaaaaaaaaaaaaaaaaaaattaaaatatgctatcatttgtgtcaagtagaaaagtatatatatgacatgtatagactttctggaaggatgtacatgaaattaatagtagtgctttccaatcaggcacggtggctcacacctgtaatctcaacatttttggaggtggagacaggaggactgcttgagcctaggagttcatagccagcctgggcaacatagcaagaccccatctcaagaaaaagtagtgctttcctctaaagaggggaaccatggggcacagtggggagaaaacctacttttcacagtatctgttgtgaattttatatcttattcatgtgttacctggccaaagattaataaatagattgtttttgtttttgttttttagtttgaggatactggaaatgcttaatataaatatctacatcgtccagaaatttcaatgtttactctattttggaatttcaaagtgggagaggaatcatctttttggatggtacctgaaactgaaagtttatgcctaaaggcgtgcttgctttctcctcagttacctcaggcatcttctacagttgcaatctctttgttgttagatggtggattttgcctccccagaattaaaatagcattttcttcattataaaaatacttaacattcattgtttttttaaaaaagacattatataagattataaagaagaaaaatgaccagattcccaccacctaaagataagtcctgtcatcctttcaggaattaatatatcaatttctcatctactcttctctcacactactttgcataaatgggatcataaatgggatcctatattttttcaagcaacagtgtgttatgcctatactccatgtttatatgtgtgtattaaaaaatgtatttgtatatatgtgtatgtataagtgtgtgtgtgtgtatgatgattcttctcccgctttgaaggtgaaagaaagcacacctttatttaagcataaactttgggtttcagatactgtctggaaaaatgatttatctcccactttgaaattccaaaatacgtacatatattttttttttcttttcttttttagttttagggtcttgctgtgttgcccaggctggagtgcagtagtgtgatcatagctcacacagcctctaactcccaggctcaagctatcttcctgccccagcctcctgagtagctgggactgcaggcatgtgccatcaactttagctaattttaaaatttttttgtagtgatagagtctcactgtgttgcccaggctcgtctggaattcctggcctcaagtgatcctctcacctcagcctcccaaattgctgggattagagtgtgagccactgtgcctagcctgcatatatctatttttaatgactgctaaatctcattgtatgaaaatttatgtcctagctataaaatttgttagcacatgtttaattttttctaatttcagatgttttaaactaatatttcccaaagtatagtatggcattttaggtatgatatgatcttttttcctcttcgtactcatttttatagttatggcctgtgcaactggtttcccatttatatgaatgatacagagcttcctattaagaaaaagttcagcttgggaaaaaaaaagtgaattgttcaacttgagggaaaaaagtgaattaattggccaggcaccgtggctcatgcttgtaatcccagcactttgggaggctgagacgggtggattgcttgaacccaggagttttagaccaacctgggcaacatgttgaaaccctatctgtacaaaaaaaattagaaaaattagctgggcatagtggcacacacctgttgtcccagctacttaggaggctgagctgggaagaccacctgatctccggaggtaaagactgcagtgagccgtgattgcaccactttactccagcctgggcaacaaaatgagaccctggctcaaaaacaaaaacaaaaacaaaaaaagagtaaattaatttaaagggaagtattaaataaataatagcacagttgatataggttatggtaaaattataaaggtgggatattaatatctaatgtttgggagccatcacattattctaaataatgttttggtgaaaattattgtacatcttttaaaatctgtgtaattttttttcagggaagtgtttaaaacctataacgttgctgtggactacattactgttgcactcctgatctggaattttggtgtggtgggaatgatttccattcactggaaaggtccacttcgactccagcaggcatatctcattatgattagtgccctcatggccctggtgtttatcaagtacctccctgaatggactgcgtggctcatcttggctgtgatttcagtatatggtaaaacccaagactgataatttgtttgtcacaggaatgccccactggagtgttttctttcctcatctctttatcttgatttagagaaaatggtaacgtgtacatcccataactcttcagtaaatcattaattagctatagtaactttttcatttgaagatttcggctgggcatggtagctcatgcctgtaatcttagcactttgggaggctgaggcgggcagatcacctaagcccagagttcaagaccagcctgggcaacatggcaaaacctcgtatctacagaaaatacaaaaattagccgggcatggtggtgcacacctgtagttccagctacttaggaggctgaggtgggaggatcgattgagcccaggaggtcaaggctgcagtgagccatgattgcatcactgtattccagcctgggtgatagaacaagaccttgtctcaaaaaaaatttggtttttcaagctttttgaggttttgacaagctggccaatatggtgaaaccccgtctctactaaaaatacaaaaattagctgggtgtggtggcgtacccttgtattcccagctacttgagaggctgaggcaggagaattatttgaacccaggaagtgaagtggaggttgcagtgagccgagatggtgccactgcactctagcctgggtgacagagcgagactctgtctcaaaaaaaaaaaaaagcaaaaaaaaaaaagcacaagcagagtggtagacacacaaaatgctcaattcattttttaaacgatttttttcctttatatcttactgcagaagcttttttcttttttttgagacaaagtcttgctgtgtcacccaggctggggtgcagtggcacagtcatagctcactgcaaccttgaactccctggctcatgcgatcctcccacttcagcctctcaagtagctagaactacaggtgtgcaccaccatgcctgactaacttgtttattttttgtagagagaacgtcttgctatattgcctaggctggtcttgaactcttgggctcaagcaatcctcctaccttggcctctcaaggtattgggattataggtgtgagccactgcatctggcctcaattcacttttaaaatcaaaattaggttacctactttttataaggtaatgtatagaattattcttttaaaaataaaaccgatttggacagtgtgagattcacattctgtaaccaccagtgtgacatgggtcctgaacagttagaacatactccagccattaacccaggcagctttcaggtacgtactctgtggctgttgccttgtatgaaagccaaaaagagatccattttcagagattaatatgtgaccccttctatattataaggccatggccatactcttttttttttctttttgtttttttcttccaaagacaggatctctctctgtcatccacgctagagtacagtggcatgaacgtggcttactgcagcctcaaacccttgtcctgggctcaaacaatcctcccacctcagccttcaaagtagatagaactacaggcatgcactaccatgcctaattttttaaaaaaaaattttttttcagagatgagatctcactgtgtttcccaggcttgtccggaactcctggcctcaagcgatcctcccaccttggcctgccaaagtgttgggattacaggcatgagccaccatgcctggccatacactttttttttttttttttttcaagacggagtctggctctgtcgcccagactggagtgcagtggcgtgatcttggctcactgcaagcttcgcctcccaggttcatgccgttctcctgcctcagcctcccaagtagctgggactacaggcatctgccaccacgcccggctatttttttgtatttgtagtagagacggggtttcaccatgttagccaggatgatctcgatctcctgacctcatgattcacctgcctcggcctcccaaagtgttgggattacaggcatgagccaccgtgcccggcctggccatacacttttgtcattatttacatacttactaaaatgtttggtggcctgtaataggaaacatcatcctcatttgattgacgaagaagtctgtggaaataggattgaactggttctgttcttgtatttgagtaatcagttgtggaactatagaagtcatatactctctctgactttcataattaccttatgttgtatagtacttgatggtttgcaaagtaaccatctattcttgcttagctgtgagtaagaatgccaggtctggagacagaatgtctgggttcaaattctactcatcactttttatttttattttttttgagatagagtctcgctttgttgcccaggctggagtgcagtggcgtgatctcagctcactacaacctctccctcccgggatcaagcgattctcctgcctcagccttccgagtagctgggactacaagtgcgcaccaccacgcccagctaatttttgtatttttagtagagacgaggttttgccatgttggccaggctggtctcaaactcctgacctcaagtgatctgcctgcctcagcctcccagagtgctgggattacaggcttgagccactgcgcccagcctactcatcacttactagctatttgaccacacaagttactcaactcctatgtcagttatgaagattaaattaaatgatccatttaatacaataatacacttagaacaatgtctatcagtaaatttttttctgttttaagaaacaggatctcactctgtctcccaggctggagtgaagtggcacgattatagctcactgtagcttcaaaagcctgggctcaagcagtcctcctgtctcagcctcccgagtagataagactacaggcacaggttggtgttgacctcctagcctcaagcagcctcccaaagtgctgagattacaggtgtgagccactatacccagcccagtgttatatttttgtataatcctatgaagtatcaaggcagttattatccctgttttactgctaagaaacttgaagtttacagaggtaaattatttgcctaagcttaaactctgatctcgaatctgaatcccaagtccaatattcttttcaccgtattacaatatttttaccatcaaccctccattctgtctgcacatcatacaaatgagtatctctacagagctttgagttgcttttaaacaaaagagatttttgtacccaatgtttagagtagtgattctcggctccatttttacaagatttcaagatttaatttgtcaaaaaagttctgaaattttcaaagcaaaagcaattttaatttaattgctctaaaaaataagcagatttatcatttagcaattctttaagggagagtgtatcataaaactgaaatagtactgaatgtggcagaatcaaacaagttgaaaatctcatcacttcagagcagggcagacttctcattcaaacaaattgaggtagaagtggtgagagtagagatttctttgtgtatgtgtgttttattactgtactatattatattatagttctatatatactatattatattgtacatatatattattatatgaagagacatgaccactttgaggcatgaaattttttttttttttttttttttttttgaggcacggtcttactttgtcacctaggcagtggcgccatcttggctcactgcagcctccacctccagggctcaagcaatcctcccacctcagcttcctgagtagctgggactataggcacctgccaccatgagctgctaattttttgtatttttggtagagacggggttttgccatcttggccaggctggtctcaaactcctgagcacaagtgatctgctgcctcagcctccccaaagtgctggaattacaagcataagccactgtgcctggcaagacatgaaatttttaaatgtaaatgcatttaagtgacaataatgtgaatacaagttatcaattcttcctttacaagtttagctatacctgttttatatttttcagtgtttaaaattatttttatatttttatattctgaattttctttctttctttcttttttttttttttttttgagacggagtctcgctgtattgcccaggctggagtgcagtggcgcaatctcggcgcactgcaagctccgcttcccgggttcacgccgttctcctgcctcagcctcccgagtagctgggactacaggcacgcgccaccacacccagctaattttttgtattttttagtagagacagggtttcaccgtgttagccaggatggtcttgatctcctgaccttgtgatccgcccacctcggcctcccaaagtgctgggattgcaggcgtgagccactgcgcccggcctatatgctgaattttcatgacagagaatgaaagaaaaagtgcagttgatcgaaagaaatggtggtataaacaggaataacaggcatgttgtttcctctctgatttattatttttgtaaaataagctacttttcagcaccacatacatatgttctgagacctgaatatttgtgaccaaagagtaaagaagtaataaactttatctcgcaaagagttattattgtgttttatttaaatttactgccctcttacttcaagtacttctcagtagtacgtaatactgcttttaaaaaggagaagggatgaatttcttctactctgctcttcatattttgaaaagttcagtcaaatcccctttattaaattcatctcagagtaatctttttaatttgtagttcatatccgtgattagtttagaagtgacttctccctgtttctgctcactgtaggttgacaactgcttaaaatagtctatctcatcattatctctgcagctttcctttaaactaggaagacttgttcctataccccagtaacgatacactgtacactaagcaaatagcagtcaaacccaaatgaaatttttacagatgttctgtgtcattttattttgtttatgttgtctcccccacccccaccagttcacctgccatttatttcatattcattcaacgtctttttgtgtaaaaagagacaaaaaacattaaacttttttccttcgttaattcctccctaccacccatttacaagtttagcccatacattttattagatgtcttttatgtttttctttttctagatttagtggctgttttgtgtccgaaaggtccacttcgtatgctggttgaaacagctcaggagagaaatgaaacgctttttccagctctcatttactcctgtaagtatttgagaatgatattgaattagtaatcagtgtagaatttatcggaactgaagcacatgtaactatggtcattttcatggtacttgttctcatcttaaatgcacagcattcctggaactcctgcagatctctttgtttccttgcaagcaattgtcttctacctgatgttgattcaagagagttttcaatatgaatagaaagaaagaaaatgtttagatattggggaaccagcattcccattttaaaacctgttaggagttgttgattagggcaagctcaaggattcctttgagtgactggtttagatgtctttctgctattcggtgaccactggggaactgagattgttgagcagaagggtaatgtgagcagagccgtgcctttgtaagctggcagcactgtgtgagatgaattggtgggttggatactgagatcatgagaggcatactaagcataattaagatgatattgccatgatctaggtggaaagtaatgggggtttgaattatgatagtggcagtagcaatcaagggaaagagttgatcagaggattcagaggtagaatcaatagttctagcaactgaggagagaagttgtaagcttgaaggaaaggtgatgaagaaaaaatgctttcctgtgttttcttgttgttgttgttgagatagggtctcactcccatccaggatggagtacagtagtgtgatcatggctcactgcagcctcgacctcccaggctcaggtgatccacccacctcagcctcccgagtagctgtgactacaggcacgcactaccaggcctggctaatttttttgtgttgtgtgtagagactgggttttgccatgtgcccaggctggtcttgaactcctcggcttaagcgatcctcctgccttgacttcacaaagtgcttgagttacaggtgtgagctaccacgcctggccatgttttcttgtgtgaaggatctgtttagttttatatctttctgtggctcatatctaatttagttgacagtacctgtgggtcactaggtagacattgctagcagacgtttagaaatgaaatactagagcttgggaaaaagttgatatttgagatagagacttgaagaacattagcagagagttggtagttaaggtctgtgagctggtgagcaattcaaataaaagcagaagagaagaggaagacaagggtcaaactttgtcaactactgtgtttagagaatgagacaagagaggatactacaggaagtagaggaaaatagtggaaaattgggcaagccagtatttttcacttaagaatatcattactgttttttgatgtcagcacatgaaatggctgcatagtgttctcttacgtagatattcagtggtgggtatcctcattgatagacatttagatcatttccatttattttctatcacagacagcacttacagagtgcatccatgaacttatgaatattattataaaatgtattcttacagtagaattgctaagtcaaaggatgtatttaaattttgatagtttgccatattgcctcctaaaaaagctgtgcctgtttacattcccttcagtaatatgaaagtatcaatttccttacccctttggtgttttggtttgttttgttttggagactgagtctcgctctgtcatgcaggctggagtgcagtggtgcgatctcggctcactgcaacctccgcctcctgggttcaagcagttctcctgcctcagcctccggagtggctgggattacaggcgtgtgccaccacacccagctaattttttgtatttttagtggagacacggtttcaccatgttgaccaggctggtctcgaactcctgacttcaggtgatccgcctgcctaggcctcccaaaatgccaggattatagctgtgagccaccatgcccggccactgctttgttaatgcttgcctgtgtctgtgcatacatgcatgtgtgtgtgtctgagagagaaagagatctaataggcaaaaaaataacatcttgttttattttttattgtttgtctaatgctttgggtgattatttgaactttttttcatgtgtttcttagttacagatctgaatttattttgtaactggcttggtataatctttttcatatttgtgaaattaatcttttttgtgtgtgtgtgagacagtctctctctgtcacccaagctggagtacagtggcgcaatctcaactcactgcaacctccatctcccaggttcaagcaattctcctctctcagcctcccaagtagctggaattacaggcgcatgccaccacgcctggctgatttttgtatttttagtagagacgggatttcaccacgttggccaggctggtctcaagtgatccaactgcctcagactcccaaagcattagtattacaggtgtgagccactgctcccagccctgtaaaattaatcttaattatacaagtaattcattatccttgaaaaaggataaacattacagataaaaataaatttcacggtaactatcatctctaatcttaatgccttatcaagtacttacccctgttgtcagtttgttgtatatccttgtagattttttttgccaatttttctgttgagttactggaaaagcagtttcaagaaggagagaggctgggcgtggtggctaacacctgtaatcccagcactttgggaggcctaggtgggcggatcacttgaggtcaggagtttgaaaccagcctggccaacatggtgaaactctgtctttactaaaaatataaaaatcagctgggtgtggtggtgcacacttgtaatcccagttacttgggaggctgaggtgggaggatcacttgaacccaggaggcggaggttacagtgagccatgatcgtgccactgcactccagcctgagtgacagcaaggcttcatccccaccctcccaaaaaaagagaatatctttttgtttgtttgtttgtttgtttgtttgtttgtttgtggcagagtcttgctgtgtcgcccaggctggagttcagtggggcgatctcggctcactgcaagctccgcctcctgggttcagccattctcctgcctcagcctccccagcagctgggactacaggcacacgccgccacgcccggctaatttttgtatttttagtagcaacggggtttcaccatgttagccaggatggtctcgatctcctgaccttgtgatccgcccgcctcggcctcccaaagtgctgggattacaggcgtgagccaccgcgcctggccgagaatatcattttttataaagaagtcaaaggtaatgaggactaagtaaaaccatacagtatttgctgtctaagatgtcattagtgacattgaagagagcagtttcagtagagtgatagaaccagaagcagtactccaaagggaaggtgcgtatgtgtgcatgcatgtctctgtgttttgccagtgctggcagtggaagtgatggtgtaggcagagaatgggtggtgaagaaggagaggtatagtaaatgtcatgtactacatcaaagattcctgtctcacaggcagagcaggtggtgacctgacaggagaacaggtttcaggaaaggtgtttcaaggagagggaaggttccattttattttatttatttattttttttgaaacagagtcttgctctgttgctcgggctagagtgcagtggtgtgatcttggctcactgcaacccccgcctcccaagttcaagcaatggtcctgtctcagcctccggagtagctgggattataggcacccaccaccacatccggctaatgtttgtatttttagtagagttggggtttcgccacattggccaggctggccttgaactccccacctcaagtgatccacctgcctcggcctcccaaagtgctgggattacagacgtgagccactgcacccgacctgttttattttatttttgaggtaagtcttgctctgttgcccaggctggagtgcagtggcgcaatctcagctcactgcaacctccatctcctgggttcaggcaattctcctgcctcagcctcccgagtagttgagattacaagcatgcgccactatacctggctaatttttttttttccatatttttagttgagccacaggttgggagaagggaaaatacattctactcaaagtgagtccgtggcaaaagtgtgagtacagagatgggtgaggaattaggaccagactttcagtctgcagcaacattaaacatgtatgttaatttaatactcagaaagaagcatttactctgttttaaaatatctatcacatactatatatatatatatatatatatatatatatattttttttttttttttttttttttttttttttgagacagtcttgctctgtcacccaggctggagtgcagtagcgtgatctcgactcactgcaagctccacctcccgggttcacgccattctcctgcctcagcctcccgagtagctgggactctaggcgcccgccaccgtgcctggctaattttttgtatttttagtagagacggggtttcaccgtgttagccaggattgtctcgatctcttgacctcgtaatctgccctcctcggcctcccaaagtgctgggattacaggcgtgagccaccgtgcccagcctatcatatataatatttttaaaactcaacgtctgtgctcgctttagcagcacataatagtaaaattggaatgatacagatgatttgcatgtatttttttaaaagttctcaagtctatttaataaccacagaatatgagacattctgagatgttttagaaacagttcaacatatgtgggaaaataggagtataaacccttacctcctgtgtagatcaggtaggttcaagattgcatctgttcttttgtaatactaaatgtctggtgaagatttgaggattttatataaatcattgagtttgagaggtttttttgtttttgtttttgagatggagtttcactcttgttgcccaggctgaagtgcaatggcacaatctcggctcactgcaacctccgcctcccaggttcaagcgattctcctgcctcggcctcctgagtagctgggattacagacgcctgccaccacgcccagctaattttttgtatttttgtatttttagtagagagagggtttcaccatgttggccaggctggtctcaaacttgtgacctcaggtgatctacccgcctcaccctcccaaagtgctgggattacaggcatgagccaccgcacctggccttcgttttgttttttcaacagaatgtaagaattttttcttacatttttcttacatttttaacagaatgtaagaaaaccacaacgcaatgccgatgagtactttttccctgaagtggatataagcatgaatataaaaagttttaaatcagtcatcctggctatttgttctctaaaaatcaataaataattctttcatgcattttaatactgtctcccagttaagggtattcagtttgcaaaatgctcttactgacaggaaatgtatgagcatttttgttttttacttctgtcgtttgacagaaaaaatatacacctactctttgagctaatttattcttacctagtggtcattagtagaagtggttcactctgggagcttaactagaagggaaactaacaattccttgaggtagatcattttatctaaagctttttgatttcatatcagttgggggcgggtatattatgttaatttttaaatctgcatattttccagccaggcatgactataatcccaggactttgggaggtagaagcaggaggattgcttgagcccaggaattcaagaccaccctagactacattaaaaaacatatttttttgtatttattttttattttatttttttgagacagagtttcgctctcattgcccaggctggagtgcaatggcacgatctcggctcaccacagcctccgcctcctggattcaagcaattctcctgcctcagcctcccgagtcgccgggattatagacatgcaccaccacaccgggctaattttgtatttttagtagagacagggtttctccatgttggtcaggctggtcttgaactcctgacctcaggtgatccacccacctccgactcccaaagtgctgggattacaggtgtgagccaccatgcctggcctttttttttttttttaatttaaacgaaatctgcttattttcctgttgatgtaaggtgtttgtgttaaggtgaaatgaaaagtgatttttaaaaaaatattattttaggactatttaacaaatatactatttatgataattaacatggggttagcaaactactgcttgaagccaaatatggcccatggcttgtttttgtacagcttataagctaaaaatgctttttacatttaaaaaaaaaaaaaaagaacaaggaagaatatgtgacacacaaaacctgaaatgtttactccctggccatttacagaaaaagttagctggacattgattttcatgttactattaactgctaaaacaaaggagcttgtagctatattttttcatacttgcataaagaaagaaaacctaataaatcgctggtggcttcatttccaaaaggctatggaaatccataaacaggctgggtgcagtggctcatgcctgtaatcctagcactttgggaggctgaggcgggaggattgcttgagcccaggagtttgagtctggcctgggcaacgtagtgagaccctgtttttagaaaaaatgaagataaaaaactaatccataaacctcatacttggtggttgcccttcagtttttcttctttagatctggatttagttaaacagtgtattgcctgcctggtttctgttaacttttgatcatttggttgggttatcctataatgaaacttggttgacctcagaaataacaaggtggtcgttcagcttctttgattgtgtgtttctttcataagttcttcaagaagcctgagtattagaaacatggataaaattattgtgataaaaagccagagagacataaatgtcaagtatcttgtttaaaattactgtgaccaggccgggcgtggtggctcacgcctgtaatcccagcactttgggaggctgaggcgggcggatcacgaggtcaggagatcgagaccatcctggctaacacagtgaaaccccacctctactaaaaaaaatacaaaaaattagccaggcatggtggcgggcgcctgtagtcccagctactcaggaggctgaggcaggagaatggcgtgaacccaggagacggagcttgcagtgagccgagatcatgccactgtactccagcctgggtgacagagcaagactctgtctcaaaaaaaaaaaaaaaaaaaaaaattactgtgaccagattggactcagcttgctgctggcatttggttcccaccataacctcatatgtcatgtgtttgcttatatgtacttttgtgttattgttggtgtatcttcaggataagttccaaaatgtaatattgctgggttaaaggattaatgcacatgtagttttattagatgttaccaaatttccctccagtggggattataccatttttcattcctgcctgaaatatatgagagaagcaccattttaaagttttcacaatgtctctgaactaaaatgtggtagagatgcacatgtgtatatctagatctagattgatatattgatatacatgtatttttgtagaaggggcacagaggaggcctcttgactatccctattatgtttattgcttttaacgttttttctcacgccgggtttaaaacatggtttagcattattgaacattctaaaaatgagacataatatgaaggaaatttactctgtgcatcttttgaattataatcaccatctgaggcttttgtgagctccagtttgtcctggaatttagaacattcaactagtccagctattgtttcagtggaatcttgctggcctgaacagttttccttctggttacttttcagggactaaaaatgatgaagagttttgtgatagcaggtgcagtttgagtactacagtaaacattcagtttcagaacttcttctcttacctgctaaaaccaaagagaaccttttttttatttttacttctgattgttgaacagtcttaaggcagcattaggaagactggcgatttgtgtggagaaatgatggcttgttgttgtctatgcatactttgtgtgtccagtgcttacctggaattttgtctttcccaacagcaacaatggtgtggttggtgaatatggcagaaggagacccggaagctcaaaggagagtatccaaaaattccaagtataatgcagaaagtaggtaacttttattagataatattttgatttttcagggtcactgttataagctaacagtatagcaatgtttttatcgtctttctttggtcatagactcctttgagaatctcttgagaactatgataatgcccagtaaatacacagataagtatttaaggagttcagatactcaaaacccaacaatacagtcaaagcatcctaggttaagacacctcccattaaatacagaataccagcatggaaaggttcaggctgaggttatgattttgtttttgttttttgtttgttttttataagtcatgattttaaaaagaaaaaataaactctctccaaacatgtaaaagtaagaatctcctaaaagaaacaaaaaagaaacagacaataaaggaaaaataagtaaacaaaaaaagcaaaatataaacaacataaaaatgagaacctcttgtctaacatggccagaataactgaaatatgatttgagatgtgctgatgtgtatactgagaagatcaaatattctaggtggatatgactttttagaagaggataagaatgacttaggatgagctgggtgcagtgatgtgtgcctgtagtcccagctacatggccaaggcaagaggatcacttgagctaaggagttccggattaccctgggcaacttataccttacctcaaaaataataataataatgaataataataatgacttaggataagagagtgaaaggccctctaaggatactacagaacatattaaggagaacacaagttagaagttgttattagatggagttgagggggagctttcattcagttttctggaatggaggctaccttcccacacacactaaaaaaaaaaagaaagggttgaggaataacagcacaatataaatagtctaaaaaaagggctaacttttatgaggaatctgaaaaacaacaggcacagtaaatattggtgaggaaaaaaaggccttaattgagttgctgtttgtcaggaaagggagagtttatgttttataaagccaggaaatctacagagttagcatttaggcaactgcaaggaagatactttcaaccaggaattcctatttggaactcagagatgtgagtctttattatacagtaagcaaggcagcagaacaaggtcatgttagactctcacgggatccttagggtgtgactttgctagccagaaacctctgtggctggtggcaccttttcctgagatttgctcaggcccactgggctcattccacctactcagcctagctggctatgcttggctttctctaccagctggaccccatgcctgccaaaggcaagccaggcatggagcagcgaggagtgcatgagcaagtgagtgcagggtccagccactgcacacagccaggcatgctggctgcagcagggcaggcagcctcaggtactagctccctgctgcagctagaccaggcattacctaagcagctttgactacaggccactaccactagtaaacctgatagaaaagtaagaaatatactggaaagaattgccacaagcctggctcttgtgttaaccttgtgttaacctggggaacacaggggcacccagaagcttggagatgccaggaactgcagaaccccaaagaggggggtcatagccctggcttagggaactcctgagtctggactccccgaagggccacatctcttcactcctctcttctctccttctcgccacctgcaacgtggcaagtggggggcacgtttcagccctgtttgtcttacggttctttcaatcctgccattcaatgggtcccaagttcttgtcctgcatccaggaagaatgaagtacgtggacagctggagggagagcaagatgaaaaggtgctttattgagcaacagtacagctctcaggagaccctatctgcaggcaggtcgtcccattgtctctgcagctctcagtggagaggagacctggagtgggtagctcctgtctgcaggcaggtcatcctgatgtctgtaatcctcagtggagaggagacccggaatgggtatctcctatccacaagcaggtcatcccatcatctctgcagccctcagtggagaggagacccggagtgggtagcttctttctgcaggcaggttgtcccttcatctgcccaagtctgactgagtctggggtttttatgggcttcagaggggggaagtacatgctgatgggtccatgggtggccatgagcaggcccagaaaatgcaccataagttctcactgtggtctgtggaactgggagcttggcctccaggcttcaggctttccctgacttgaggtggtgcttcaccagggaacttcccctttccgcctaggagcctgtctgcctcctgctgccatcaacctgctgtctatagctcccatggcacccaggctgttcatgccaaagggtgcctgcaggcccacggtaagctgccttcagcccctcctcagtctccctcccatgcttgtcagcacccaaagtccagagggggccaaggtggcagggggctggcatgtcagtgctgccccaagcgcccgcacacccggccaggtcatgacagcacccagcctcagccacaactttgctctgaaatcggagcctgcagacgcaaggggcttcctggacccctgagagcacagggatgcccaggtctacagccacagctgggaagctgcagctgtgggagtgcgggacttctgccccaccaactcagaagggggcaggactcccgcctgttcctggctcctgccagctcacagagcatgctgccccagctgcacctcccctgctgcagctgccatctttgcagcagccactccagatgggccgctgctgccatcaagaccactagtaaacctgatagaaaagtaagaaatatactggaaagaattgccacaagcctggctcttgtgttaacctgtgttaagctaaagaaaatcaaatgattgtctgtgagcatgtaggtatatatgtatgtgagtgagtgatacaacagaatttcattcattttacagatgttgactgagcacctgactatgtgctaggccctggggatatagcactgaacaagatttcccctgcccttgtggagcttatagtctatttggagagatagatggtcaacaaattattacataaataattcatacagttgtgataggtactacaaagaagacgtataagttgctatgaaagtttataataggggaattttacgtatcctggaaagtcaaggggtgcttccctgaggaagtggtaataggggacggcccgctgaaggatggaggaagagctttccaagagagggacaacatgagcaagggctttgaaatgagaaggctggatgaactgcaggcttcctcagtgagaatgctgctggtattttggggggcacagttctttgtgggactttccctcatattgcaagatatttaacatccctggcccctcacccactaaatgccaataatggctttaaggctttgcaataatcaaaaactcctccatcctagttatttccaaacactccccggaagggaggtgctatccctagttgaaaaatcactgtgttaacggaactagaagttacattggaacaaaagggcatagggctccaagagggatatctgtgtaaggaaaaaacaaacaaaagaactgagagattacctgatgtggttgagctctgtcagagcatttcaggataaattagtcatagataataatataaaattcatcagtggaaaaaaatgaggcagttttccaaagaaaacaaaaacttgctcaaaaaagcaaatgtaattatagtatattctggctatagcaaagtagtttagttgtgaatattatttgcatagtgagaatataaagctgaatttaatataaggttatggcactgggaagacaggaagagttacatttgcgtgcactaaaggatgagacctaatgctttatcttctctataggaggtgaataagtacctcaaattaaaacatcaagttatggcacaatgagcatgctacttataattaattatggaggtaaataccaaaagggatggctaaaagagtttaaggtaggaatgagtatcagaagtgaggagggagggggtagaaaagggactgctgttttcatttataaatcttattcttatattatttcataaactccaaaccagagaagattcaggtttttggagatctggataataaaaagaatacaaaactatcaatacaaaattgtgagggctctcccagaggaagccatgcaaggaagggccctgaagcttacaagctttacttattcatggcaaatctacttctgctctgaacatgtattacttttataaaaaatgaaggaagaataaaagtactttgaacttcacttatatattttaattatttttaatgtatggaagttttttaagactatcatgctcaccattttcaatgagattgatagtcattataatgaaatgactggcccataaagacattcactccccgctcctttcccaatccaccctccagaatgaagccacttttataattttgtcaccaaatccagggatgagtgccaacagttaggaagctttcagttgcaaaagataaaaagcccaactcagttgccttaaacaaagaagaaatttattctttcacgtgacaggaaggcctgaggtgtaggcatttgaaatttgtagggttggttaatttggtggctcagggatgttttcaagtagcccaacttcctactctaccatcactagtgtataggcttggtcttcagcccactgctcttcgtggtcatgacagctgtagttctaggcatcatgtctagataaggcaacattcaggggtagaaggggactgtttattttttcctttagtctctcttaaagagtgagaaaaattttcccaggaatcccggtggactttgcttcaccactcataggttcataccaagttacaaccccacaaccttagagcttttgttaggaagaggcttggtgggattaccgtgcttggcttggcttggtcaggattcaccaccagagtcatgtgggagggggtgggaacccaaacaattcaggattctgccctcaggaaataaaggagaaaatagctgttggataaactaccagcaggcactgctacagcccatgctttgtggtttaagggccagctagttacaatgacagctagttactgtttccatgtaattttcttaaaggtattaaatttttctaaatattagagctgtaacttccactttctcttgaaggcacagaaagggagtcacaagacactgttgcagagaatgatgatggcgggttcagtgaggaatgggaagcccagagggacagtcatctagggcctcatcgctctacacctgagtcacgagctgctgtccaggaactttccagcagtatcctcgctggtgaagacccagaggaaagtatgtgcatttctctatgttgcaaagtcatggattcctttaggtagctacattatcaacctttttgagaataaaatgaattgagagtgttacagtctaattctatatcacatgtaacttttatttggatatatcagtaatagtgctttttttttttttttttttttttttttttttttttttttttgagacagagtctcgctctgtcgccaggttggagtgcaatggtgcgatcttggctcactgcaagctccacctcccgggttcaagtgattctcctgcctcagcctcccaagtagctgggactacaggcgtgcgccaccacgcctggataatttttgtatttttagtagagatggggtttcaccatcttgggcaggctggtcttgaactcctgacatcatgatctgcctgccttagcctcccaaagtgctgggattacaggcgtgagccactgtacctggcctcccttcagactttttaagttggcattttacagcctgaccttttggcatttattttataaagtaaaagatttgtttttttaattgttccagtaagccttcatggccgtaatacatttgtctacaaaaattttattaatatgtctcactctgctgtagagagatctgtggatttgcatgatacaaccttgtacattattattccttttgttgacaagtgctatattttattttaaagaaaatcaaagggatttaggatattggcagaaatgcaagtatttcttcagtgtctaagatgtgttgccacttgatggatttaagttaacacttagggcttcttaggaacattatcagccactaaagccctttggttagggctcagtcatctcttcagttagtcttagagatgtggttcattgaataagactttagcatattttccaaccaagttatttttggttgtcttgtttttgcaagagtgaaacttgattaaaacattacaacaagaatattaagtagttttaaggaaacaaacacctaggttccttagcatctttaatcattagtcactaattattatgaccttgacatatccatcagtttgaggagaacactttttacaccttgtcctcagttttttaactgagtcagaactttcactgggcatgttcatgactttactgcttggctgagttttccagatatcaaagcccagctgcagcctgtgactttcacactcctggaaaagtagacgtatctgcctgctcttacagcaggctttagcttgcctttgctgggactttgttctgccctcagttaccacagtaattaggttgcctcttctactttcctcttttctcacaggcaccaggagccagaggaaataacataatagttgttgaccagagcagcagcataattctttcatgactgccttttctaatttgacgattccctctcctgagagggctctttgtgtcctcctcctcttcgtctccaacttttaaaaaaaaaaaagtgaaactatcaagtattgctcctgctaacttcagatcagtattttctttctctgaagccaatgcaaagtaataacggacgtgcttcatcatcttagcattcagcacacgtgtcaccatctctgatggtgtgagcatgttaaaccagacttgtgggtacttaccaaaaggttcagttgacactataggtcagttgctaaaaggcacaaatgtcttctaaagcaatctgttaaaagtcaacatttaacatttaattagaaaactgatcaaaggatctgaatgtttagttctcccaagaaaatgtaaaaatgatctgtaaacacataaaaagatactcagcatcattagccatcaaggaaatgcaaatcaaaaccacttcatactcactagattggctataataaaaaagatagacaataacaggtgttggtgaggatgcgaagaaactggaatcctcatacactgctggtgggaatgtaaaatagtatagtgattttggaaaacagttcggtagttctttgaaagattaaatatgacccggtaattctactcctaggtatatactcaagagaattttaaaacatatgtcaacacaaagacacatatacaatggtcatagtaatattgttcataacaggtaaaaacagaaacaacccacatgtctattaactgataagtggataataaatgtggtatattcatacaatggaatattacttggttataaaaagaaacaatctatcattagtacacttaggatgagcttgttactggcatgttggctgtgggaagtatatcttgaaattcactaaaagaccaactattgctgggcgcagtggctcaagcacctgtaatcccagcactttggaaggccaaggcaggcggaccacctgagatcaggagttcgagaccagcccaaccaacatggagaaaccccacctctactaaaaatacaaaattagcccattgtggtggcacatgcctgtagtcccagctactcaggaggctgaggcaggagaatcacttgaacctgggaggtggaggttgcagtgagctgagatcataccattgcactccagcctgggcaacaagagcgaaactccatctcaaaaaaaaaaaaaaaaagaccaactaccttcacaataaataaaaatgtcttacatttctaattaaaatttttgttcagttttattattcagctttaaaaaggaagggaattctgacatgttacaacatgaataaatcttgagtactttgtgctaagtgaaataagctagttacaaaaagaaaaatactgtatgattccacttacatcagagtagtcagaaagtagactggtggttgccaggggttaaggggaggggaaatgaagggtcgtttaatgggtgtagagtttcagttttacaagatgaaaagagttctgtggatggacgatggtaatggtagcacaatgatacgattatacctagtgtctttgaacggtgaacttaaaaagggttaagatgttaaacttgatgggtatcttaccacagttaaatttttattatttttttattttttgagacaatttcgctcgttgcctagggtggagtgcagtgctgggatctcagctcactgcaactctgcctcccaggttcaagcgatactcctgcctcagcctcccgagtagctgggactacaggcacacatcaccatacccggctaatttttatatttttagtagagacaaggtttcaccatgttggccaggctggtcttgaactcctgacctcaagtgatctgcccacctcagcctcccagagtgctgggattacaggtgtgagccactgtgcccggccaaaaaaattttttttaaataccgttaagaagtggaaaataaggccaggtgtggtggctcacacctgtaatcccagcactttgggagaccaaggttggtggatcacctgaggtttggagtttgagaccagcctggccaacatggtaaaacctcatatctactaaaaatacaaaattagccgggcgtggtggcgcatgtctgtaatcccagctattcgagaggctgcggcaggataattgcttgaaatcgggaggtggaggtttcagtgagccgagatcacttaaaaaaaaaaaggaaaataagctaccagctgagagaaaatatatgcaaatcatattgaagtcctgttaaaggacttgtatttaggatatataaaggatgcttacaacttaatacgaagacgatagcccaaatttaagatagggaaatgctttgactagacattctaccaaaagagatatataatggctaaaaagcacatgaaaagatgctcaacatcattaatcagagtggctagaatgaaaaaggctaacaataccaagagctggtgaggatgtgaaaaaactggaactctcaattgttgctggtggaaattcagactggtacagccagtgtggaatgtgatttggcagtttattaaaaagctaaaaacctaaacttacatagcccagcaattgcacccccaggagtctacccaatggaaatgaaaacagtccgtccccacagagacatggacataaatgttcatagcagcattattcagaatagccccaaattgaaaacaatccagatgtccatcaactggtaaatggataagcaaaccatataatggaaaaccattcagcttccaataacttccaagaaactgtagacacatgcagtatcatggttaaacctcaaaaacattatattaagtaaaataggcgaggcatgtattgtatgagtcatatgaaatgtctagaaaaggcaaatttattgagatagaaagcagatcactggtcgcttaaggcctagggtaggagtggggattaactgtaaacgggtacaaggtacctgactggggcaatggacatgtggattgtgatgatagttaaattgtacagctctctctatatatagttgtacagctctattaattttccacaatcattgaatcatgtcttccagttttatgaggtaaatcatagtccaatgaagcttttttaaaaataagatgataggccatgcgtggtggctcacgtctgtaatcccagcactttgggaggccaaggtgggtggatcatgaggtcaggagttcgagaccagcctgaccaacatggtgaaaccctgtctccatcaaaaataaaaaaattagccaggcatggtggcatgcgcctgtaatcccacctactcaggaggctgagacaggaaagtcgcttgaacctgggcggcagagtctgcagtgagccgagatcatgctgctgtactccagcctgggccacagagcaaaactccatctcaaaaaaaaaaaaaatattaattaatatgataaaatgatgcctatctcagaattcttgtaaggatttcttagtacaagtgctgggtataaactatatattcaatagatgacgattattacttattattgttattgataaataacagcagcatctacagttaagactccagagtcagtcacatagaatctggaactcctattgtagaaaaccaaaaaagaaagaaaacacagctgaagcctaattttgtatatcatttactgacttctctcattcattgtggggttgagtagggcagtgatatttttgaattgtgaaatcatagcaaagagtgaccaactttttaatatttgtaacctttcctttttagggggagtaaaacttggattgggagatttcattttctacagtgttctggttggtaaagcctcagcaacagccagtggagactggaacacaaccatagcctgtttcgtagccatattaattgtaagtatacactaataagaatgtgtcagagctcttaatgtcaaaactttgattacacagtccctttaaggcagttctgttttaaccccaggtgggttaaatattccagctatctgaggagctttttgataattggacctcaccttagtagttctctaccctggccacacattagaatcacttgggagcttttaaaactgtaagctctgccctgagatattcttactcaatttaattgtgtagtttttaaaattccccaggaaattctggtatttctgtttaggaaccgctgcctcaagcctagcagcacagatatgtaggaaattagctctgtaaggttggtcttacagggataaacagatccttccttagtccctggacttaatcactgagagtttggtggtggttttgcatttaatgacacaacctgtagcatgcagtgttacttaagacagcaagcatctagtgagaggagctggtgccatgcatgaccccacatagatcttgctgatagtgctacagcatgaaccctgaagctttcaaaactatgattttttttttttttttttttttgagacggagtctctgtcacccaggctggagtggtgcaatctcggctcattgcaacctctgcctcccagatttaagtgattctctgcctcagcctcccgagtagctgggattacaggtgcctgccaccacgcccggctaatttttgtatttttagtagaaacagggtttcaccatgttggccaggctcctcttgaactcctgacctcaagtgatgtgcctgcctcggcctcccaaagtgctgggattacaggcgtgagccaccgcacctggctttttttttttttttttttttggagacagagtcttgctctgtcgcccaaactagagtgcagtgacattagctcactgcaacttctgcctcctaggttcaagcgatcctcctgtctcagcctcccaagtagctggaattacatgtgtgcaccaccatgcctggctaatttttgtatttttagtggagatgaggttttgccacattgcccaggctggtctcaaacttctgacctcaactgatctgcctgcctcagccgcataaagtgctgggattacaggcatgagccactgtgcccaacctgaaaactatgatttaagtaaacaacccataaaatatttcttgctatttttactaaagatgtgttatcttggccgggtgaagactttctagtgtttccgtaactagggtaaaaaatgaactctattatatggcttgtacatgtgtttacaagaaagcagtgtactcctcataaataaacttttagtttattttattttttaaacactgcagcctcatcatgcttcacggaggagcctgtgcgggaagaatgctcccacacagcataaagaatgctcccgcacagcatagagaatgcccccgcacagcatagagaagcccccgcacagcatagagaatgcccccgcacagcatagagaagcccccgcacagcatagagaatgctcttcacctctgggtttttaaccagccaaactaaaatcacagaggccaacacatcatttaagatagaaatttctgtatcttttaatttttttcaaagtagttttacttattttcagattctatttctttactagaattaagggataaaataacaatgtgtgcataatgaaccctatgaaacaaacaaaagctaggtttttttcatagctcttcttccagattgaatgaacgtctgttctaaaatttaaccccaaaaggaaaatattcagttaactatgttaaaaaccaagacttgtgattgagttttgcctgaaaatgctttcataattatgtgtgaatgtgtgtctttcccatcttctccacagggtttgtgccttacattattactccttgccattttcaagaaagcattgccagctcttccaatctccatcacctttgggcttgttttctactttgccacagattatcttgtacagccttttatggaccaattagcattccatcaattttatatctagcatatttgcggttagaatcccatggatgtttcttctttgactataacaaaatctggggaggacaaaggtgattttcctgtgtccacatctaacaaagtcaagattcccggctggacttttgcagcttccttccaagtcttcctgaccaccttgcactattggactttggaaggaggtgcctatagaaaacgattttgaacatacttcatcgcagtggactgtgtccctcggtgcagaaactaccagatttgagggacgaggtcaaggagatatgataggcccggaagttgctgtgccccatcagcagcttgacgcgtggtcacaggacgatttcactgacactgcgaactctcaggactaccgttaccaagaggttaggtgaagtggtttaaaccaaacggaactcttcatcttaaactacacgttgaaaatcaacccaataattctgtattaactgaattctgaacttttcaggaggtactgtgaggaagagcaggcaccagcagcagaatggggaatggagaggtgggcaggggttccagcttccctttgattttttgctgcagactcatcctttttaaatgagacttgttttcccctctctttgagtcaagtcaaatatgtagattgcctttggcaattcttcttctcaagcactgacactcattaccgtctgtgattgccatttcttcccaaggccagtctgaacctgaggttgctttatcctaaaagttttaacctcaggttccaaattcagtaaattttggaaacagtacagctatttctcatcaattctctatcatgttgaagtcaaatttggattttccaccaaattctgaatttgtagacatacttgtacgctcacttgccccagatgcctcctctgtcctcattcttctctcccacacaagcagtctttttctacagccagtaaggcagctctgtcgtggtagcagatggtcccattattctagggtcttactctttgtatgatgaaaagaatgtgttatgaatcggtgctgtcagccctgctgtcagaccttcttccacagcaaatgagatgtatgcccaaagacggtagaattaaagaagagtaaaatggctgttgaagcactttctgtcctggtattttgtttttgcttttgctacacagtagctcagaatttgaacaaatagccaaaagctggtggttgatgaattatgaactagttgtatcaacacaaagcaagagttggggaaagccatatttaacttggtgagctgtgggagaacctggtggcagaaggagaaccaactgccaaggggaaagagaaggggcctccagcagcgaaggggatacagtgagctaatgatgtcaaggaggagtttcaggttattctcgtcagctccacaaatgggtgctttgtggtctctgcccgcgttacctttcctctcaatgtacctttgtgtgaactgggcagtggaggtgcctgctgcagttaccatggagttcaggctctgggcagctcagtcaggcaaaacacacaaacagccatcagcctgtgtgggctcagggcacctctggacaaaggcttgtggggcataaccttctttaccacagagagcccttagctatgctgatcagaccgtaagcgtttatgagaaacttagtttcctcctgtggctgaggaggggccagctttttcttcttttgcctgctgttttctctcccaatctatgatatgatatgacctggtttggggctgtctttggtgtttagaatatttgttttctgtcccaggatatttcttttaagaacctaacttcaagagtagtgtgcgagtactgatctgaatttaaattaaaattggcttatattaggcagtcacagacaggaaaaataagagctatgcaaagaaagggggatttaaagtagtaggttctatcatctcaattcatttttttccatgaaatcccttcttccaagattcattccctctctcagacatgtgctagcatgggtattatcattgagaaagcacagctacagcaaagccacctgaatagcaatttgtgattggaagcattcttgagggatccctaatctagagtaatttatttgtgtaaggatcccaaatgtgttgcacctttcatgatacatttcttctctgaagagggtacgtggggtgtgtgtatttaaatccatcctatgtattactgattgtcctgtgtagaaagatggcaattattctgtctctttctccaagtttgagccacatctcagccacattgttagacagtgtacagagaacctatctttcctttttttttttttaaaggacaggattttgctgtgttgcccaggctagacttgaactcctgggctcaagtaatccacctcagcctgagtagctgagactacagcccatcttatttctttaaatcattcatctcaggcagagaacttttccctcaaacattctttttagaattagttcagtcattcctaaaacatccaaatgctagtcttccaccatgaaaaatagattgtcactggaaagaacagtagcaatttccataaggatgtgccttcactcacacgggacaggcggtggttatagagtcgggcaaaaccagcagtagagtatgaccagccaagccaatctgcttaataaaaagatggaagacagtaaggaaggaaagtagccactaagagtctgagtctgactgggctacagaataaagggtatttatggacagaatgtcattacatgcctatgggaataccaatcatatttggaagatttgcagattttttttcagagaggaaagactcaccttcctgtttttggttctcagtaggttcgtgtgtgttcctagaatcacagctctgactccaaatgactcaatttctcaattagaaaaagtagaagctttctaagcaacttggaagaaaacagtcataagtaagcaatttgttgattttactacagaagcaacaactgaagaggcagtgtttttactttcagactccgggattcccattctgtagtctctctgcttttaaaaaccctccttttgcaatagatgcccaaacagatgatgtttattacttgttatttacgtggcctcagacagtgtatgtattctcgatataacttgtagagtgtgaaatataagtttaactaccaaataaggtctcccagggttagatgactgcgggaagcctttgatcccaacccccaaggctttgtatatttgatcatttgtgatctaaccctggaagaaaaagagctcagaaaccactatgaaaaaatttgttcagtgttttctgtgttcccgtaggttctggagtctgaggatgcaaagatgaataagataaattctcagaatgtagttataatctcttgttttctggtatatgccatctttctttaacttctctaaaatattgggtatttgtcaaataaccacttttaacagttaccattactgagggcttatacattggtgttataaaagtgacttgattcagaaatcaatccattcagtaaagtactccttctctaaatttgctgttatgtctataaggaacagtttgacctgcccttctcctcacctcctcacctgccttccaacattgaatttggaaggagacgtgaaaattggacatttggttttgcccttgggctggaaactatcatataatcataagtttgagcctagaagtgatccttgtgatcttctcacctctttaaattcccacaacacaagagattaaaaacagaggtttcagctcttcatagtgcgttgtgaaatggctggccagagtgtaccaacaaagctgtcatcgggctcacagctcagagacatctgcatgtgatcatctgcatagtcctctcctctaacgggaaacacctcagatttgcatataaaaaagcaccctggtgctgaaatgaacccctttcttgaacatcaaagctgtctcccacagccttgggcagcagggtgcctcttagtggatgtgctgggtccaccctgagccctgacatgtggtggcagcattgccagttggtctgtgtgtctgtgtagcagggacgatttcccagaaagcaattttccttttgaaatacgtaattgttgagactaggcagtttcaaagtcagctgcatatagtagcaagtacaggactgtcttgtttttggtgtccttggaggtgctggggtgagggtttcagtgggatcatttactctcacatgttgtctgccttctgcttctgtggacactgctttgtacttaattcagacagactgtgaatacaccttttttataaatacctttcaaattcttggtaagatataattttgatagctgattgcagattttctgtatttgtcagattaataaagactgcatgaatccagctgtgctagtgttttttacatgaaagtatcataatgtataactgtaactcacagaactgtctagcacttatcaagaaacagtttagaatacaaaaattagccaggcgtggtggtgggcgcctgtagtcccagctactcggaaggctgaggcatgagaatcgcttgaacccaggaggcagaggttgcagtgagccgagatctcaccactgcactccagcctgggcgacagagcaagactctgtctcaaaaaaaaaaagtttagaaacaaatgcattgtttctattcttaactcataagaaagtggtatggattatagcacaccacagctctgaagagtgtaatattaaatctgtttataaaagccccaaagcagctatccttaatacatcctgaaagatattttttctaataactttcacattaatgtaaatatgtcagaagaaactgtaaacttataagacgtatgttgtacagtgcagatatgtgctggaggattttttttaaagaaattaggtcacactaatgggaaaaggcaacattacttttattgacctggtagagcatagaatgtcctctcactccattccccaaacttgataaaacgttttgtttctaaacagtaaataacatacaatctggaaatgattgatcagaaatacatttatggcagaaaaaccacagttggccatggtcttcagaagggggcagataagacattgatgtgttcccggctacatctgctaagggcatcaggaagcagggagtgtttattccctcctttgagaattggaggcatcatttgttttcatggctcttttaggcagtgtctgtggagtctcctacagaggcatcaggacttgggagaggtttctgatttttaggggtcctgacaatggtgttcttgttttttttttttgagacggagtctcgctctgttgcccaggctggagtgcagtggcgcgatctcagctcactgcaagctccgcctcctgggttcatgccattctcctgcctcagcctcctgagtagctgggactacaggcgcccgccacgcccggctaatttttttgtatttttagtagaggcagggtttcaccgtgttaaccaggatgggacaatggtgatcttgatgagaatgaggacggactttgagcagggttgagaagcaagggtagtgaggctgggtttcctgtgtctctaggtaagtcccgtagctttccgtcagcccatgccacaccttcttcctggggacccttctgtgtgcggtgtggagagtagcttaggatctggtcaaaagtgaaatgacagcatacttgagtacgagtgcaatgttgacttgtcagttgaatgagaaagagtaaaggagagatccacaaaagcaggggtttaaaatcagaaatttctcagaaagaaggtttgttgttgttttggagacaaggtctggctctgttgcccaggctggagtgtagtagcgcgatcatggctcactgcgttgttgaactcctgggttcaaaggatccacctcagcctcctgagtagctggaactacaggtgtacaccaccatgcctggctagttattttttatttcgtgtagagactgggtcttgctttgttctccaggctggtcttgaactcctgggctcaagtgatcctctcagctcagcctcctgaagtgctgagattataggagtgagccactgcacctagccagaaataaagttttgaactcagtttggaaagggggaaaaagcctgaattggccaagaaggcaaaggacatatactgtactaaaaatcaggaagacggaagtacctgggagacacctatggataattggtttttgaataaaggtgatgatttattcagaggaaaatccaattagctaaccaaatctgttttcatatttacttagaatatatctccttcatcacatgacttgtagtgacctagaggatgatgacctaatctaccacaggggtctttcaacatgtggagtgtcccatgcttggagaaggttgatgtgcttgcatggactgtcctgtgcctggtatgccacgcccttcaaagggagagacgggaaaagcctcgggaaccaaatttgttcaagtcctaattgttggcagaaagggagacatgctcttgctgcctctgtttcttctactttttttttttttttttttttttttgagatgaagtctttctctgtcgcccaggctggagtgctgcaatctcggctcactgtagcctctgcctcccgggttccagcgattctcctgcctcagccctctgggtagctgggagtacaggcacatgccaacacgccctgctaatttttttttttttttcatatttttagtagagatgggatttcaccatgctggccagactcgtctcgaactcctgacctcaggtgatccgcccgcctcggcctcccaaagtgctgggattacaggcatgagccaccgtgcctggcctgcttttttttttttttttaaattgcataggatttgatatagactatacataacccaaggtcaatttctcgtgcataagaggaaaggattttcttacccttatggagtaaacctatagcatacctcaaggtggacctgtcggtgaaagtctgattgtgatttgttttctcggtcgtagactaaactcaaggatagagtacacatatgatgtaaaggggaagcaagactggagctaaacatgatactacatttaaatacctgaatttaagagagtgctttcagggctagtgcatctccatgcaggggtggagacatagtgttcttccaaatgctcgatgagaaaccgaagagagaaatttggaactttgtctggcattcaggtttttaaaaatgtcctatgacttgtaataactggtttttctgtttactaatcagatttacccacatatatcataaaatagtattaaacttatttagtgagataactgagttttaacttatgtgggctagatgtatgatttataaatttataatttatagtttataaatttatacatgaatgtatgagttcttcagattttctgaaatgtcgaaaatggcttccatgcctcctcctccctcaggggacatctgctcgggaggccttgttttggtgtctcctagccgagctttcctttcccccttgctcccagttcagggatcttctctataatcacccagctccaaggtcatctagtttaaaatgtcaccaggcttgaggactggaacatcccagcagaaggggaagggctttttatcttggggaacctgcacaggcccaagcacagtctgaggacacggtgagggtgttggaggccatgctcggttgcaagggtgtctgccttcactttggtttatttcatatctgccccctaggccagggctgggagagctgagccagtgcttcacagtttgtttgtttgtttgtttatttttatttttatgtgttttttttgagatggagtctcgctctgtcgtccaggctggagtgcagtggcgcaaactcggctcactgcaacctctgcctcctgggctcaagtgattctcctgcctcagctcctgagtagctgagattacaggcgcccgccaccacacccagctaatttttgtagtagagacgaggtttcgccatgttggccaggctggtctcaaactcctgacctcaggtgatctgctcgccttggcttccgaaagtgctgggattacaggcgtgagccaccgtgcccagccagtgtttcacgttttgtaaatgtgccttctctggctctcaggttacttctgtgggcatccagaaattaatttcaggatattttaggccctttggcctctgtcagacctgaaagtgaagccagcctgcctgggttaatgtgctgttgacggcacaggctgtttgcactggcgatgtagggtgctgcccactgagccagggtgccccatgtgtcagatgggcccatggcgatggagccagtgcagcccacttgagggaggagacagggaccggctcctctgcctgtccacacacatggcaggtcatctttgaggactctgttttctcaattgtcaaggaccagaattccctctttcccctcttgcactatggataaaggcatagacatgttataagtgattatgcagcttttgtcattaaagatatgtaataacacggttcgccaaggtgctccaagcatttggtaattattgcatgaattgatttttgtttttaaatcaaaacatactttggtaaacattcctgtgaagggaggcccattccaagtctcagagttggagtgccaccaagaccccgcctggagccccgctgctctgccagtcaactgatgggctcctttaccctctctcttcctggcagtgctccatagcggtgggaaagagggtgaggccttgccactccgcggagggccccctggcccaccccaatgctgaagacaaatctgaccccatcttcccactgggaacttggccaacccagatgttcccgcagcccctccctccgctcctcgctccctggatggggcccacctccagcgcatttttctcactccaagctccttccttgccagatggctctgctggaggattctgccccgggctgggaggggctggggacctgattctctcatttccctgtggtttggcgagtcttccctcgcccctgtcgttttcagagcgagccccgcccttgtctgcagactctggctgcctggacaggcaaagggaaatggatgggtcaccctgatgcctccgagcccggtgacaggagctaaggatggcaaatacagaccgaggggccaccttgccactgcctgaccctccagggagcttgggcgccgtcccatttcttaaactcctggcagttgcccaataaatggtgagtcagtgaaggactgtaggggtggctgcggggtctgcgggaggggatttccatgcagaatgatgtcaataggtcatgtgcatgggaattgttgtgagtaagaacaaacattaaccagcttttgcccctgtttacaaggctgtgctggagagtgtggagccgaagtcaaccagccttatcccttcaggagacctgaatttataaatggtggtcaggatgaatacaaacaggattcctcccccagttcacgtttgtgacatctggagagatgtatgggtttgtcctgggtcattgtcaccacattggatgcagggggaataaaggatagggcggttgttaatacataccccacatttaaccaagaaaagccacagaggaaggtactgcttcataaaaccaatgtcccttgagcatgtcccttaatatgccacagacactatgccaagcccatcacaggcattgtctcctgtcctcaccccaccctatgggtagggcctgttagccccattttacagaggaggaggagcgctcccagagtcactgcccgcaggtaagtgggagaggctgtgcctccagcactgtcaaggacgggggcactggaccccatttctgatgaaccgaatcttcgtctgagtgggccttggtagcgcagtctcacaacctttctcaactttctcactaaagctgctcaagcaacagaggacagagacactgagggatgtggacacagtccaaggtggcagccttaggtggagagttctctggagttttaccaaaaccaaaagttttatttcataatatatgctttttgttgtcttactgggtaaaatacaacataaaatataccatcctaaccatttttgagtgtgcatttggtgacattaagttccttcacagtgatgtgtagctatcacacgcccatctccagagctccttcctcaccacaaaacagctccccgccccagcctccagcacccccattccagctctgtctctgtgaatttgactactccaggaacctcacaaggagtggaacgacccactattcattcttctgtgactggcttatttcacttagcgtgaagtccttgaggttcatgcatgttgttgtagacgtgttttaatgttaaaaaaaaaaaaaaaaacggctgggcatggtggctcacgcctgtaatcccagcactttgggaggccaaggcgggcagatcacctgaggtcaggagttcaagaccagcctggccaacatggcgaaaccccatatctactaaaagtacaaaaattagctgggcatggtggcaggcacctgtaatcccagctactcaggaggctgaggcaggagaattgcttgaacccgggaggcggaggttgcagtgagccgagatcgtgccaccgcactccagcctgggtgacaagagtgagactccatctcaaaaaaaaaaaaaaaaaaccatcaccaaaaatatatgacaccaccatacacactcctaaagttgatgttcccagaagctgtgccttatttattcagtgtcttcctgtgatgctaaggtcacaagctctggtgcgagagaccctgaccagccaggcctcagctcccaactctggccgagcaggacagcccgtcacagtctgcctttcagtgccaatgctgcctggaggcctgcgctggaggccccagtcgacacgggtgtgtgccactccccttcagagaggatgccacctccagctttctgctgcctcactttgttctcagagtttggggtggtggattcctgggaattttcaattttagtatttattttttatttacatcaatctattgtcttttaaaaatgagaaaactgccatgcaggaaggttggcttgcctgagatattacagccaggagtggtagacccaagactgcccaggctttgtgcctccctacttcctgcccccaagcttggaccacattcatggcaccaccaggaggtgattccagtaggccaccccgcccaccacatcacacaaatgctgctcatctgaatcccatctgctctgcgttatattgcgtttaatgggcaaaatttacaaagctctgaaaactgaaaggtttcttatcaatgtgtccgtaatacctgactgaactttatgccctttaggaggacatttgtgtgttttgccgcagagctatgagtgtgtatgtgcggcggttttgctcgttgatttgttttgattaaaaagggcttctggccgggcgcggtggctcacgcctgtaatcccagcactttgggaggctaaggcaggcggatcacaagatcaggagatcgagaccatcctggctaacatggtgaaatcccgtctctactagaaatacaaaataattagccaggcgtggtggcatgcgcctgcagtcccagctactcgggaggctgaggcaggagaatcgcttgaacccaggaggtggagcttgcagtgagccgagatcgcaccattgcactccagactgggcaacagagcaaaactccgtctcaaaaaaataaacataaaaagagggcttctggccaggcacggtggctcatgcctataatcccagcactttgggaggccaaggtgggcagatcacctgaggtcaggagttggagaccaatctggccaacatggtgaaaccccatctctactaaaaatacaaaaattagctgagtgtggtggtgtgtgcttgtaatcccagctactggggaggctgaggcaagagaatcgcttgaacctaggacgcggaggttgcagtgagccgagatggtgaaaagagggcttccagcctgctgggagtattatataatatgcagtttagtcacttctaaagcctggaaaattctcaattctgaaacacgtttggcctcaagagtttctgataagggattgggacctagatatatagaattaacagtgatatgaaagctgtaaaaataaagagcttagaccccgttttgtgtctgtacatctttccgtggcattatactataaagtaggggtccaggataacaggtccccacagaaatgagagctagagaagcactgcagcaaaaaaaaagaaaagaaaagaaaagaaaaattatttcctctcccttcagcttcggggaagtcttgttttaggattgcgaggcactggcccactgacttctgggttgtgtttccaggtctttggcccgagacacaggctgtctctcaatgtctgggctgagaaccattcaggtacagaggctgaagccacagggtagatgagaagtgtcccaggagcatggtggagggtgagaccaagacaaaaggatctaaacagccttgactgctggcctctggggctaccaatccagggcccctgtccgtgacagccccccagggacagcaccagggacctcagagcctggctcactggattcatcacaagagaacagggacttgctgccttctgcaaccatccgaggggccaccaggcggccacaggacaccaggcttgcctgggagtctggggtgcccacctggagcttcaaggcccagagacatgctccgggcctgtgctcttgagctggttccacaccttacaccgacctttgtggggtctgggccaggagctgctctcccctttgggaagtgagggtgggttcctcacagcagctcccttaatgtctcaaccagcttctccaaaggaggccgtggttggggtcgctgtggtaggagtttgtgttcccctgtgggcagaggggatgagatctctgccggctggagctgctggctgggagctagtcagaaacagcattggaaagccccttcctttcccactgtctctgctctccttccccaggcattgtcctgcctccacacagcctctcccgcatcccggtgccctttccgggatccgagtcagtgtgggcctggtgtcactgaggggacatcccaggaattcctgttctttccctctggatggccttcttgtctgcaggaagggtgggaggagctattatatatttctgtctcagctttaagggtaaaactcccctccaaaggccaggtggcttatctcctgacagccacttgtcagacacactgagccctgaattcccactccagtggtctggcatggtgcttcaaagagctgacttggatatggcaacgcaatgggggaaggaaggttgaggtggcgtctggaagcacagcacggagtggagttttgaccctcgccttcccgccgttcccagcgtttgaatgactgtattaagggaaatgaatatatgtattggggggtggggagacgttagagaaataaatgcagcagcctctgatgtggagtatcttttttccttttggattcctagtgggctgtggcatcggttctatgacttttatcgtaaaaatgtttgaatactctgattgtaaaactcagcttagtctaaactgacacacacagcactagaatgcaagtccccactagagtgtaaactccccgagcagacctagtgagctggagcccacgcctgggagagctgactgcatctcttcccaactccacgtctggtgacgtcaccttggtagcttgaaaacagccatggtgggagcatctacaccaaacgccatgggaaagaatccacctgcacagcagtgctgcctcctgcagcaagctgaagcttaaacagttatcaccactgggccggtctctcccagcttctagcgcagcgtaggcactcagatatttggatgaacaacctccaaatgaaggaagagggaagcagcatcctctaaattcagttcaatgggagttcaacaaataccctgtcctggtggacatgtgttttctggggcagctgccatctgaacttccacctggggaccctgccaattcttgtttctcaggtcctggccatcagggtacaggcatgttcctgtggggagtgagtctacaaggacgcttcagggtttttctaggcatgtgtcagcattgcctaaaattggtggtgacacgagttcagcgtccagcggaagagcagcatagatcctaactggaactgctcctggactacaactaggacattgtcgggggtccagcccaagcatgtgcctgattttcagccctcctgtcaatctgcgatctcccattgcctctcttctaagcaactctcctgtttaagctgactcagtccttttctgtgatgtgcaaccaagaaccgcaagggttggttcaggccctctgagagcagaggctgagacgggactagatgtgcgagagatctacaggggagcgcctgtgaagatgaattgcggggaggaggaggtgcagggggagtcttcagaacctggtgtggggctgagtgcagccactggaagctggtcaccagttacacttctcaaagcccctctcttgaggcaaaccttcagggccaccatgaacctctggtccagggtataacatgaaaatggatctctgcccttgcaatgttcacaattatgagagagaaagagaaacaactacatcactgcagtagtttgaaagtgctagggcaaagcccggcaccgatgggagtgcagagccagatgtacaggaaggcttcctggaggaggtgaatcctgggagccccgaggctcttggcattttgccctctctcttctctccagccttccatcccaacccaaccacacaaagagatctggccacttctttcttagcctcatccttagatctgcaatctgtggagatatgaaaatgtagagaattgaggatacacatggcgggagcacaggacagaaatttaacaaaaatttttttagagacagggtcttgctctgctgcccgggctggagtgcagtggtgcaatcatagctcgctgcagcctcgacatcccaggctcaattgatcctcctgcctcagccttccaagtagcttggccagtggtacccgacctttttggcaccagggaccagttttatggaagagaattttttcaggtctgggagcggggtgggatggtttcgggaagaaactgttccagtctaaagcctgatcctgttcagatcatcaggcatcagagtctcctaaggaatgcacaccctaggtcccttgcatgagtagttcacaacagggttcatgctcccgtgggaatctaatgctgccactgacctgacaggtggcggggctcaggcagtaatgcttgctcacctcctgctgtgtgcccgttcctaacaggccatggacaggtaccggtccgtggcctggggattgaggacccctatcttggactgcaggcaactgccaccatacctggctaattaaaaaaaaaattgtagagatggagggtctcactgtgttgccctggctagttttgaactcctagacttaagcaatcctccctcctcagcctctcaaagtattgggactccaggcatgagccactgcgcccagatcagaactaacttttattctgcatctagtaggaattttatggaaaccagttacttccctactctaccacctgctgtatgagtctcaagtgagcaagttgtggcttaaggaggtgacccgacctgcccaagtacacacacagtgagaagcagagcagccttccagtccaggtctgcctccgccccaggctaccccaaacccccaatgcgagggcgtctcaggtgcagacactgagtggcatagagccagcacagaggggacttgacaataggaaggaaggtcttacactttttcctggaatcttctttctaaaccaccctattttaatgcatcagttctgttcacatctctgtgaggtaagcagagaaatgaggcttaaagagaatattcctgcccaagccagtaattgctagggcctggctggtgggtctaagacagtcccttaccactgagtgtgggttctgcctcccaacctcagagtcctctttgcagctggcgtgaggcataagaaatcacagccctgggtgtctgagaagaaaggatcataggaaaagcagggacacagcaggaaagtgagctccttgggcctcagcttcccccaccctgcagcgggagaagcattttcctcccacttaacagaggacctttgaccaagctcagaaaagtcccagctggtgggggcagggagtggggcttgttgaatggaagaagcgcttttcctctttagagaggctgcatgattccactcccctttctctgccaagctttatctttgcttaagaattcacacaactccccaggggccccgctacagctgctgctcctcctgtcttcattgataggtaagaaatgcacctgatttaaactgatttaaactggccatgttctaataagcattttgtccaaacaggcagctgctggagccagggggctgaagtggggctgagcttcccgctggtgacttctctttgcccaaatgaggccaagggagaagtggcagggccagcaaggggctaaaggcagaacagcgtgggggaaggggaccagcctttgccaccaccccacccccaacctctccccaacttcttccccccaacctccctcgtgtccaggaccagtttctaaagatgagtgaattccagtttcaaaaaaagaatggtaggcaaagagtgtcttggttgtgaaaaaggacaaccaggaaaacaaatgaagttgatcacatgcgttgagcccctgccttgatgctaattagtgccctggcacaggtggtggggctgcattgcaggccctgccccccgggactcacagctgagcaaatcacagcaacagggacagaaagcgagggagcaggacatgcaccccatcggcctggggtggtgtggagacggcttcaaaagcaggtgacatgctgggcacggtggcactttggcaggccacggtgggaagattgcttgagctcaggagttcgagaccaggttgggcgagaccttgtttctatttaaaaaaagaagaagaaggctgggcgcagtggctcacgtctgtaatcccagcactttgggagtccgaggtgggtggatcacctgaagtcaggagttggagaccagtctggccaacaaggtgaaaacctgtctctactaaaaatacaaaaattagccaggcatcatacagacgcctgtaatcccagctactagggaggctgaggctggagaatcgcttgaacccaggaggcggaggttgcagtgagccaagatctagccattgctctctaccctgggcaacaagagtgaaactccgtctaaaaaaaaaaaaaagaaaaggagggaggaaagtagaaagaaagaaaagaaagaggaagaaagggagggaggaaagtagaaagaaagaaaagaggaagggagggagggaaagaaagaagaaagtgagggaggaaagtagaaagaaagaaaagaggaagggagggagggaaagaaagaagaaaggaaggaaagtgacatttgaccaaggttttgagggctgactaggggtttgagaggtagaggggattgggagagcgcattctgagtgagaaaacgtgctgggagatgggtaacagcagcgtgtgcggagaaactcagttgcggctgaagaataggatccaggggtggagaaggtggtggctggacacaggtgtgttgtgtgtaggataggcatgaagaggagcggatagggcaaagctagaaggcttgggcaaggggaaatgggattggagaggtgactggcgctgacccaagagaggacagacggggtgaccagagtggaggatgagccaagccttggcacagacccaagcgggtggaggccccgggcaacaccggtcaccacgagggcctctacgaagggctctgtcctcccacggggattggaggtgggtaagtgagacagggcggggtggagggtgaggccaggcagcggcggagagagaaagtcccacccctgcgggcgttccttgcggcccggccgacctcgcgggcttgggcctgggcgggcaccgacggagcggccctggctgcagcctcccggcgccagcgaagacaggtagggaggcggagggactggaagcccccgggcgcccagcggcggggaccccgcaccccggggcttctgcaggaatttgctcgcctggctcacggcgacgggggtgtcggagaaagtgggggccgcagagaagaccccgccccggctcgctctccggaggtgggcgcagggtcatcgctcggcaccgcgcgccccccggcctggaggaaaggaaatgcagagagccggggagctggtgcgggacggccccggcgcgcaccctccgcccgctcggaccttcccttcaggcgaatgccgctcccggcgcgtggtacaagcgaggccctggagaccgtgcgcccctcccgggaggtgccactgggccgcgggcctggagcgtccgggagccccagcggctgccggcacctgcgcggccaccccgggcctcccgtgggaaccgcgcctctccgcctcgggggtgcgcggcgcgttcctggggtggggacgcggggtgcctggtcagggctggaccgatgcagaggggggccgtgggcgggggccacggggacgggcgtctgcggactgcggcggtcccggagtcggctggggaccctgtagggggaggcttggtcggcggccacccgccttcccgccctctggcgcctagggtcgccgccttcggccctagctcaaggcagacgcgttccccgggaacaacacgttgagggcgcccaccctgcgtgcccggggccacccggtccctgccctcgggcggcaggagaggtcgagcttccacggccctcggagtagccccgtgaccagacccggactggccttggagttgaaggggttgtttgccaccaaatgaaccgaaaaaactgaacttttcagacttcggaatggcagatatgggcttggagttcagtgaaattgcagcggaggcggtggtgttctgagtaattacaagtaaaattcttctttcacccgtcttttcctcagcctcgcccgccctagcaggcctagcctggccctagcagggggctcctgctctgggagctgcccccagcagagcagaggcagggctctggcagcaacccccttccctcaccctccaaccccaggaatctcgaacttgaccacgaaaataatgactcaatgactcactgtgccaaattaacgagtgtgtacattgttcagtatgccaggttacatttctgctgagcttggcttctgtatgctgtcttttatccttgtaagcagaagtcattttatatctttaaaaaattagaacattggtagaattacagattttaaagttcaaacctgcacgctagtacttgtttaatgttttgtactgaagggcgcacattgtttatgtcattctgcgatacagcgacatgtatgtacacatacacactgcacagcgtgtataccgactggacacctgcaccaaatagtacacaccagactgcacatggacccgccccgcacactgcacatgcactttgcatgcatgcacacatcaaaccacagacactccacacacactgcactgcacactgccctgagcacactacactgtactgcacactgcactgcactttcagggctcacacgctgcaccacgcacactgcacggcgcacactgcactgcatacacacgttggttatggaggctgcttatggagcttccctgtgcagagaaatgctggcttgggttttaaatgggctacaattaacacttttagagcatttgggttttcaaagtgtcttcagagacttgatttttttaaagcctatattaggagtttttaaacatctgatgtaatagcttttttaaaaggaatcttgctgaattaaaagtgagtctaattactcggattctgaacttgtttttcaaccacatagaagtatttttaattgctctctctttttttcccctctggaactctgaaacaagttgttcttgaacttctgccagttgcggatgggccattcctttcttgctcacatgttgagccgcccggcggggcgccctcacgctgtgttctctgcggtgcaccgaggcgcacccggctgtcctgttgcgggtctcctggtcacctgtgggccatagggagagacgcgcccacacactctcgcccgcgcccaggacagctgcgggagccccgggccgctctaacccaatgcgtctcccgcaggctgagatgcggctgctcctgctcgtgccgctgctgctggctccagcgcccgggtcctcggtgagtgcggtcctgccccggcccccggaggaacctgcaggggagtcgggggcggggacgcgcgggcccgcaggcaacgtccccaggaaaggggcgatgtcagggaagctgggctgggaggaggcgagcccgcaccgctgagctccctcagaaagggctgggcccttgaagccagctggccagggttcccagaactgcccgcccggctgcagggcgcagtgtgtaggaatggcaccttcccagggcttccctccttcagaaggtggtgggagcactccatgaagtccccgccaatcctggcgggtgcagccaaggtgcagggctgggtggtccatcccaccagacacctgtcttctgcctggagccaaacacggcttccctaagctggggtgttttggcctagaggtttggggtgccagtcgtttccattccccttggggtagcacctagggcagggctgtcctatggaaccttctgagatggcagaaatgtcctgtttctctgctatccaataggtagcccctaggtccattgagcacttgaaatgtgggtgaggtgagttttaattttacttgactttaattaatttaaatttatttttaaaatttttaagtatttatttatttttgagacagagtctcactctgtcacccaggccggagtgtactggcatgatttcggctcactgtaacctccacctcctgggttcaagtgattcttctgcctcagcctcccaggtagctgggactccaggtgtgtgccaccacgcctggccataattaatttaaacagccgcatgcggctagtggctactgtattggactgcgaattaagacagtggacccaggaagctggctggtggtcagagctgctgtttcattaacaggggcccaaaggccagggctctctggagaaggtccctgggtcttgaggatgtacaaggaatcttctagaccacaggccccacctttggggaggagggggtctgcagagctgggtgttgccctggctcagtgcctggcagaatagaagccacagaggcagctgggccctgtcctgccccaggagaaatctcccagggtgacccacagccctgcccacccctctgtgaggcaggcaggaagtgaaagaggaaggatccctgcgaaaggacccaaactgttttctgccatggggaggtcgggggggggatgccacgtctggcatctgtgggcggaggctgagcaggactcctctgcaggggtgtgtggggcaggcaggatggatggcagtgggcacttctcccactagaagtggatcccatagatgacacttcaagagccctgtgaacccaacatgggccacagctggagcggtgggtgggctagaggcagcctttttcatgtcctctcgaccacctgccagctacccacggtcccctctgccaccccatgaatcttgcttcctaaatgccactctcaggtccttcaccacgtgctggtggcccagctgcatgaaggccaaagcccaggtggagggggcacgaggacagcgtccaggccccaggattaaatcccagagccacctggacagctgcatgatcctaggcaaataagccttagactgctctaatttgggagtaataatgcccaccccagaggttgtcatgcagatgaaacaaatcaaggtttccaaagcgcccttggttctcttaaaccttttctcccttaaggccacgctgagtagcctcatccggctgccacctcctcccagtgagtctcagatggggctgggcgcagcctgggctgagaattcttctctccctgccctctgtgagtctgcagggggtgtggccccgctcacagctccactgcctccctctgttgctggggcaggaaccacccagtccgagcaccttctctggatcacttatgctgtcagcggtcagtctgaacagaatgagtaaatgaataaaggtggcggcctgcgtgttcctgggcctcagcctctgctcccgtctgcacacgggtgtgcatgtgttctgtctctctcttacacacgtgcacattgggcagttgattcccctggaaacagtgcagcaggaaaggggacccctgagtggctccaggtgggagttgaaggaggcatgggtggggcgcctagcgcagcatgagacaggtgagggcaggccccaggtgaggctggctgtatcagctcattccggcttcacgccacgtcgggcagttcacggtttgggtaattacagagcaagagtgtgctcatgctgcctgtggctgaaggtgctttccttccttggagagacagtgtggagtgtgtggacagagcacggctctaggatgggacggactagggctcctggctagtggacacctgccttacaggtgctgggcacaggaggcaagagggcattctggaaacagcatgtcccttagggggcccttgttcaggccagtcctgcccctgccttatcctgacggccaggctgtggctccatggcaggggtaccccttggccacacaccagtacacccagcccagctccagggaagggtggattttgctggctgctgtgccaaggagccaagacagacatccaaacaggccttagtcagagggtaattgacaaccaggcccaacccagcagctaagaaagcagccacccctgaagacctctcctgaatacttaaaatgtgggatgaggctgtgtgtggggggggcgggtgccagaatcccagctggggctgcaggctgtctctggaaagtcacccttcacgctcaacactcagtgtcttccttgtgaaatagaaacttgatccaagtaaatttcagtttaactttcattcagagaaaactttgatattttggctcagtggtttcgaaagcttagagatttttgtccaagttagacttgaaggagtagatattttacaaagtgaaagctaagacctctcatctggcaagcccttccttcttggttgtgtgtggttcggcaggcttagcgtggtttgtgcgtggtttgttctgcttcagtgttctgggttttgttataagacaaggataactagatgtttggcaccagggatgttagagatgagtaaacgtccttcctcacctgagattcagcgaagctgctcaggggtcaccatgaaagcaagagcctgcttttcttttctttttttgagatggagtctcactctgtcgcccaggctggagtgcagtgatgcaatctcggctcactgcaacctccacctcccgggttcaagcaattctcctgcctcagcctcccgactagctgggattacgggcacccgccgccacgcctggctaattttttgtagttttagtagagacggggtttcgccatgttgggtaggctggtctcgaactcctgacctcaggtgatctgcctgccttggcctctcaaagtgctgggattacaggcatgagccaccgtgcccggctgcttttctgtgtgaccattgagctctttctctgaaaagtgggaatggtatttttccttgagtcttaagtggtgataccctaaaagaaagtccccttccagcaaatgtttgcatgtacaccatatgcctcctgggaaaattgtgaagttacatctaatccctgtccaaccctgtagggaatcatctagtgtctcatttgattcccccaggtgggtgggggcacagcctcggcaggggagcagaggactgcagtgaggctggccggctactgtgcccacttcttcccctgtggtttcctctctctgcctcacttttcttattcatgcaatggggtctgtcgggttgttgtgaggatgaaatgagataatgtgtgtgtggcatgtggattcctgatgccagctgcaaggggtccaatctttctggtgggaaagtgtacctgctaggattataatcctgtgtagagtcccaaataacagttcttcaataagacagacatgattcctctctcatataaacacccaggggtcagaagtctggggctattctgttgcacaaaatcctccaggctctagagtccctctatctttgcttcactgtttgaagcctctatttccaagttacctcacagtctaaaaggctgctccaactccagccatcacatctgcttcccagacagcctgaaagagtacaggaggaaggagaaaaggacaaaggctcacgcaggctctctcttaaggagattatttgcggcagctgcccaacacttgtatttacatctcactgatgagaactaagtgatgtagccacagttagctgcaggcagtccaggaaatgtatttttttttaaaattttgggcagccaggtacccagctgagtcaagttttcaagcattctctcacaatgggagaaggaggggatgaatattggggtactcctgggagtctcggccagattagcaggatccccccacgttgcttccctttattttcttttaggcccccctcccctacatcacggttaacctacaaatgcctggaccctcaaactgcccctggctgtagggtccctcccctccagtggcccctgaaactccaaactcttcccagctgctcctgctcccgccctccaggcctggctctcagctccttatgaggaaagcaggctaattctgaaaaggaatatgttttggggtgcccggcagtgttgctgagtcctaaaggtgggccctggaagggagaatcccagactccttgatgggtaggggagggttttaggcagagcatctttggaggggcctctgggctcaggctgtgagtgggcaatgctgatgcatggtcctgtcttctgcaggctcccaaggtgaggcggcagagtgacacctggggaccctggagccagtggagcccctgcagccggacctgtggagggggtgtcagcttccgggagcgcccctgctactcccagaggtaggagagatgaaaatgggccagcttgttaaagcaggagcaggggatgctgccttctgggtggtgggctaggtggtcgtggcctaggctagcactggccacatcagcagaacccaccaaggagcagattcattctggaagcagcatcagttcagcgcaggaaatcaaaccatttcccagggccttccactctgagctggagcacgcgtgctgcctgttgcccctggtctccagctcctgatgctgcaccggcctgcagtatggcaggtgcagtcaattttgctggaactggtaaataatcttcaaccggcagttcccaattcctgtggtttctttaccgagtacagatgttccccacttcaagcgatttattaaatgcttgctgtgtgtgctgcactccggcagggtcagtggagaaggtggggcacagaaggagtagtgaggtgcctctgtcccggtttgtataggggttgttcctgagaaccctatgtgaggaggaatgagagaccaggaatgatcctaagagccttatactgatgtcctgcttagatcgcaggatggctgtgccaagcgggtgggtattatatctcatgcacctcgggtcttctctgggaatctgcctaagatgcagtggagtggtcccgccttaaatccaaactatagggtgggtagggctctgagtcccgcttctctggagtaccaacatgggtcgctcactcccacctgggggatttacggggtggggtcgggggacaccctctcaccttgctgctcccactggagagtcccgcagaagttggggcctgcagagagccccagaacgggggcagggacgttgggtctcggtcaggtcttcccggtgctctggtcccgcaggagagatggaggctccagctgcgtgggccccgcccggagccaccgctcttgtcgcacggaggtaaagctcacggggcgcgggcgaaggcaccagcttccccagcccctcctggccgatttccccattgggatgcccgctcctggccgcgggctgctgggttggcccagcctggggtcctcccgccaatccacagcagggctgcgtgggggccccttcctcaccctgctcccggggactggccttgccctccacagcctagagcaccatggaggggcacgcacaggagttcgggggtccggggggcggactccacctccggcggctccgatggggcaggcaagggagactcctgggctccctgggctcgggcggggcgggaggtgggcggacctcggactccgccctcctggatcccgacttcccctccgccccgcagagctgccccgacggcgcccgggacttccgggccgagcagtgcgcggagttcgacggagcggagttccaggggcggcggtatcggtggctgccctactacagcggtgagcgcggccgggactcgctctctcggggcctcttgtatacctacgttgatgccacagttcctattgccgtattatagaggcgttgtcatatatatatatatattagagacagtctcactgtgttgcccaggctggtcttgaactcctgggctcaagggatccgccggcagcgacctcccagagtgctgggattgcaggcgtgagccactgtacccgaccaattttttttttttttttttttttgggtgggcgcgggggctcgcaatgtacaggaaatcttctagaccacaggacccacctttggggaggagagggtctgcagaggtccctcgagagagagcaagaggtctctctttttctttatctttttttcttttctttctctctcgttctctctcgcttgctcttttttctctcttcctttcctttcctttttttcttttcctttttctttctttcttttttttttttttttttgagacaggatcttgcccaggcttgagtgcagcagtgtcatgtcagctgggcagcatgtacctcccaagctcaatcaatccttccacctcagcctcccaaataatttttaaagtaaatatggaatgcttcatgaatttgcatgccataccagctaagggggcaggggctgtgctaatctctgtatcgttccaattttagtatatgtgctgccagagccagcatttgtcaaataccccatcgatcaacccataatgaatcaatcaccagtacccctgctccccccagcacatgcccgtggcaacaccatggcagccattttgaggtctttccatcctttctccccttatgtatgtatattttcaaacgaagctatggtgtgtctataccattttgagccctgtttttgctcagtctgctatgggaagcgttcctcccgtcgcacagagacggagatggggaaccccgggagcggtagcaatggtgccccacggtcatcctgcaggaggggctggaaggggcttggtacaccaagacttcatttatcaaggatctgggggccagaggagatggtctgtgcacctctgaggagggtataagtcattaatttttagagaaatacagttcagggaaaaaacacccaggtaagcaccaacatgtatgtcattaagcattttagatgaatcagaagattcctcaagacaagtcttctgagtgttcgttttccctgcttgcggcaaatgacctctggagaccctgtggcactctagattccagatcaaggagcacttatattctctctgtgtgtgtgtggtggggatcgtggctgtgggcatggcccagtgggagtctcatatcctgtgtatgtgtgtgtgtgtgttgtggggatcgtggctgtgggcatggcgcagtgggagtctcatgtcctctgtgcgtgtgtgtgtgtgttgtgccgatagtggcagtgggcgtggcccagtgggagtctcttatcctgtgtgtgtgtgtgtgtgtgtgtgtgtgtgtgtgtgtgtgtgtgtggtggcgatcgtggctgtgggcgtggcccagtgggagtctcatatcctccgtgtgtgtgtgtgtgtgtgtgtgtgtgtgtgtgtgtgtgtgtgttgtggggaccgtggctgtgggcatggcccactgggagtctcatatcctctgtgtgtgtgtgtgtgtgtgtgtgtgtgtgtgtgtgtgtgtgttgggattgtggctgtgggtgtggcccagtgggagtctcatatcctctgtgtgtgtgtgtgtgtgtgtgtgcgcgtgtgtgtgttgtggggatcgtggctgtgggcatggcccagtgggagtctcatatcctctgtgtgtgtgtgtgtgtgtgtgtgtgtgtgttgtggggattgtggctgtgggcaaggcccagtgggagtctcatatcctctatgtgtgtgtgtgtgtgtgtgtgtgtgttgtggggattgtggctgtgggcgtgacccagtgggactctagctttcagaattccccctggatcctgaagtggacacatgtcaaaaataatttgattatagtcacatgatagaaaaattggaacacaggggaaagtctaaaaagagagtagagggataccttccatggtatggagatgattataatcctgtttgtacttttgggttgttttaaaatgtgtatatatttagataaatataaaaattaaggtagggtacagtggctcatgcccgtaatcccagcactttgggaggctgaggcaggaggatcacttgagtccaggaatttgagacaagcctgggcaatgtgtgaaaccccatctctaccaaaaatacgaagattagccaggcatacaaagattagctaggcatggttgcacacccatgtagtcccagctattcgagaagctgaggtgggaggatcacttgagcccaggaagttgaggctgcagtgagtcaagatcacaccactgcactccagcccggacgacagagtgagatcttgtctccaaaagaagaaaaaaaaattaaaaccaggccaggtacagtggctcctgcttgtaatcctggtgctttggaaggctgaggcaggaggatcatttgagcccaggagtttgaaaccagcctgggtatcgtagtgagaccctgtctctacaaaaaataaaaaaattagctgggtatgatggcatgtgcctatagtcccaactattcgagagactgaggctggaggaccacttgagtctcggaggtagaggctgctgtgagctttgatcgtgcctctgcattccagcctgggagacagagtgagatcccatctgaaaaacattaaaaccagagaaaagttatcctcatcctgcccctttcacaagatcactgttagcatttcattttagcccctttcacattattctctccatatatgcttacatatttgtaattattgcatagtaatcaccattttgcattctgtgttttaagcatcttcccacaccatatagtcttcacaatcatcatttgtaactgcatagtcagcatgtgtaatattccattgataatttatttaaagagtagcctgttatggccatgcacagtggtttacacctgtaatcccagcactttgggaggctgaggcaggtggatcacctgaggtcaggagttcgagaccagcctgcccaacatggtgaaaccccatctctactaaaagtacaaaacttagccgggtgtggtggcgcgtgcctgtagtcccggctactaggggggctgaggcaggagaattgcttaaactagggaggcggaggttgcagtgagtcgagatcgtgccactgcactccagcctgggcaacaagagcgagactccacctcaaaaaaaaaaaaaaaaaaaagtagcctgttgtaaccacctcagctatggtaaataatgctgaggtagacttctttaagtgtttcactttttcctgattctgggatttttcttcgacttgatccttagaggtacaacagattcatggagacggtcccttctcctggggatggggcggggatctgtgctctgcggggcctgctgcagggctttctgacccatgctttcctgttgctagggtaagccttgggtcttggggaggggcatcatcaacctcaggatctcagtcttgccttcctgcccaccccagccccaaacaagtgtgaactgaactgcattcccaagggggagaacttctactacaagcacagggaggctgtggttgatgggacaccctgcgagcctggcaagagggatgtctgtgtggatggcagctgccgggtgagtggtgccccagcccctccctgcctccgggctgcctgggggctcagtgcgggtgtttccctgtccatcacccataggcccaggtagctgccatgagcttggtgtcttctcaagttaccaggacaccaagcccagctcctagggtaccttgcaggcatcacagatgccctatggcccctcaccttcatccttggagaacgctagccctacaataagagaaaccctctgggtggcagaaatccggctaaaaccgacttcagaaaaacaaacagcagggacagccgcaggcgcatgaatgaggtgccactcggctttcctctccttgggtccagcatcaggatctggcccattcttcccaggaggtgtggaggtggccgccagctgctccgaccttctgctccctagaaagggaattcccagggaaagggggcctcattcccaggagttctagccaccgggggttgtctctgattcgtcttggtttgggacttaccctgaaccactccaacctccccaaacccacatttggggagctccgttcaaactctgcgggagagaggtggcccctcaaggaaaacagggcattattaccagaaggggagatgggagctgagcagacagagaagtggattgtcagccacaggccagtcccctggctggtggctgaatcactcccgaccaccctatcctgcctgggctgcgtgggtgctggggttaggatgcgacggggcccaaggcctgatgtggccatgatgccgtctcccctgcctcccgcatctctgcccacaggttgtcggctgtgatcacgagctggactcgtccaagcaggaggacaagtgtctgcggtgtgggggtgacggcacgacctgctaccccgtcgcaggcacctttgacgctaatgacctcagccgaggtgggggtggttccgacaaggggcagttgcctgcccccttccttgcctgtcccttccttgcctgtccctgctctggcctagactccaggccaagtggccctcatggcactggaaggctctgatcatatcaggtcacatctgaaaggccccctgtggcctttggttaggactcgtgcccgctcgtgcagtcccatctcctgctgccaccgcctggatgccctccccatcccttcccactcccagtgtgctccgggtgccctgagccttcccgccaccctggcttttgtactgcggcctcttctgccagggttgcctttcccagcagctcggccctgtctggctcttgtgtaccctccctgcccccattctgtgctgtgtggcacttggagtcctgtttgagtggtgccgggagagggatagcccagcacacccagcacctgcgtctctgcccccaggctacaaccagatcctcatagttcccatgggtgccaccagcatcctcatcgacgaggctgctgccagcaggaacttcctgggtgagagcctagggttaggtcctaggcaggtctggggctgcagggggaggtgcggcactgctccctctggctgactgaggcggtctcctctgcgcagctgtgaagaatgttcgtggggaatactacctcaatgggcactggaccatcgaggcggcccgggccctgccagcagccagcaccatcctgcattacgagcggggtgctgagggggacctggcccctgagcgactccatgcccggggccccacctcggagcccctggtcatcgaggtaaatgggggtgtggggagagagggcgagtgggcagctcgtggtccccaagaggctgccaagctctgtacatggggggttgagtggctctgggcttgaggctggcagggggctgtgaggctgcggagggtgtgggagtgctccccagcagcagaccccaacaaggactctcccgtgacagctcatcagccaggagcccaaccccggtgtgcactatgagtaccacctgcccctgcgccgccccagccccggcttcagctggagccacggctcatggagtgactgcagcgcggagtgtggcggaggtgcgggcgtggatggcccaggggagggcatgggccctgtgtgctggatcccacggccacaggtgggcaagtcacagccctctcctcaaggcagtccctcctggggagatggacaagtaggcgagaaatctctgtgttatgggggtcgctttgaggaaaacccagggatctgggggactccatgaaggaccccagcctaagcgaatagaaccagagggggcttcccagagtcagcggcatctcataggagacagactccctcaggaccggaggctgggcctggggtcagtgatcaggtgccagagtagggctctctcacagcaaaaaccctcagagcctcagtttcctcatctgccaattggagatgtggtggcacctgcctcgggggggtcatctaagactgaatggggatgacctgtggggtgagtgcaggatggcgcctggcccagggaacgcgcttggtgaatgttgactggcgtctgcccgccatggctgggcctctgcgcaggtcaccagtcccgcctggtgttctgcaccatcgaccatgaggcctaccccgaccacatgtgccagcgccagccacggccagctgaccggcgttcctgcaatcttcacccttgcccggagaccaagcggtgagaccttgccagcccctctacccatgatgaggcccaagaacttgggtgggaagggaacaaggcctccaagctgctttaggtgtagaacaaagaggtgggggtccagggccccccacgctgtggctggggtgtgggagaggtggcagctcttcctgggggaggcagagaataggcctgagcccggggctggtctctctgctctcctgtgaccacgaagtactcagaacacctaggcttggtggcaggagggttggagaaggttccagaggtccctgtctgtctgagccagcagagggtttggcttggcagatgccaaggggtgggccaggggtcaggccaaagggcctgttggcatcggccaggctttgttcgtgcacaaaggacctcttacctgcaccggcctggagcgtggcgccttgctggggcccagcgagtgtgtgggaacaggtaacctgcaggtcacaggctccccgcagggctggtgccaccctgtcaccgcttggccttggtggcagcgggcctcctgggatggtggcggacttggctttgcatggggccacagggctgctctttcctctgggtccttgcacccggggcctggcagagccgctccacgcatgggtgagcacagcctctccaggagctgccccttgactaaggtcagaccgagaggaatggagtctgactgggagacagggacctggtgggaaggagaaagggggatagggttgaggacaggaaagccaagggggaggcgcagggccccgagttgtggggagcgctcagagagccaggcccggtggtggggatgctaaggagcgcctgggtcgtagcctttgttcaggctggaggctcagaggatgggctggggtgggggtcctcaggccacctgtgtgagtgagggcagaaaccctcagggctgggtttctgcccatgctcctgggccagccttacctgattccccctcctgccagctggaaggcagggccatgggcaccctgctcagcctcctgtggaggaggctcccagtcccgctccgtgtactgcatctcgtctgacggggccggcatccaggaggccgtggaggaggctgagtgtgccgggctgcctgggaagccccctgccattcaggcctgtaacctgcagcgctgtgcagcctggagcccggagccctggggagaggtcaggcccctggcccgcatggggctggtgctggacctgggtagcagcagggaagggctggggtcttgttctctgctgtggaaaccgaggtcctgggaggtaaaataaccggtcaggtcatcttggaagctgtggccaaggctgggaccagaagcaagtgtctggatgagtggtccagggctcttcctttttctccaggatcctagggcagggcaggaaaggcctgggcaggaagaagctggtgtgttgtttgggggcaagggaggagctggaagtgtctaggctgccagtcattgcttctagcacctacgtatattcaagttgcaaatggatggaaaatacaaatgggtgacaacctcagtctgttgtcagtagccatggttcaggctgtgtgacctcaggggagtgagtcagcctctctgggcctgggaaggacatgggcagttgggtgctatctgcctccacaccaggctggtgggccgctagctgtccgaactggcgtggctcctgggggcaaggccgagcttctgctgacagccttgtccttgcagtgttctgtcagttgtggcgttggcgtccggaagcggagcgttacttgccggggtgaaaggggttctttgctccataccgcagcgtgctccttggaagaccggccacctctgactgagccctgtgtgcatgaggactgccccctcctcagtgaccaggcctggcatgttggcacctggggtctagtgagtgctctccacccccacacctgctgcctgaccctggtctctggcaggtggctgcacccgagcgccgtccttggacctgacacgcgccactgggcaccttcccctgcctctctccatgtgggtccccgcccccagcctcgccctcagcatctctctctctcccactcgtgggcctcagtgctccaagagctgcagctcgggcactcggaggcgacaggtcatctgtgccattgggccgcccagccactgcgggagcctgcagcactccaagcctgtggatgtggagccttgtaacacgcagccctgtcatctcccccagggtaaggacaggagggcagggaggagtccggcctctgacctctctcccactcgctacaaacccagcaagcatgtcctgcctcggggcctctgcctgcactgtgtcatccctctggaccccacttctcccatgtctccccccgctgaaccctttgccatctctaaggcccacctggtgtgcagcccaccaggcagccctgctttcctccactcagcggtagcatgcccctgcccctctggcccccatagcatgctgtcatttctgtgggacccttagattcatttccttgtgctgctgtggttgtatacggcttgtcagacctacccactataagcttcttgaggactgggtccccaacttccatattcctctttatacccccatagaacttacctgacacagttaggtactcagtgaatgtctgttgaatgactgagtgactgactgtgtgctgagggaaggaggcagtccaggaaggagtgtctccacatgccacttctgcctctgtcttcttcccttcatccccatcccactgtgaaaggagcctcacaagcatgagggcctgctggagaaagggcactgaggccagtgtttgcgtggtgtgaggatgccacattgaggaagggtgtgggttgtggtgagctggggatgggggtgggtgggtagcctcccaatactgcagggaggcatgtttggccttgactcactcgtgatggggactctatgagctgtagggaccttgagatgaaggaaggcagaatttctatgagacatgtgacaggtgtggctaagaaccagtggcctcagagtcaacagcaggcttgggttccgatccactccgttgctgaccagttgtgtggccttgggcaagtgccccacctctctgattctcagtttgcccatctgcacagtggggttaaaaagagcgactttccagaccgtggtggtcatgcagcacaacgcctgaccgcatggggtgcttgctagctaagcagagggtggaaggggtggtggtgaggccttgtgggggagctcggccatccggagggcccctggtgcctcagctggggcctggtccttggggctcaccagcaggagagccttggactcccaggggtccagctctccatggagccagtctgttccccagggccttgttggcttctaaaagaggtgatcttaagcctgtcccagggactagcaggacccatatagaaaggaagaaaaagggccaggtgaggattaatcccagtctgtaatcccagcactttgggaggctgaggtgggaggaccacttgaaaccaggagttcgagacccgcctggccaacattgtgaaatcccgtctctactaaaaatacaaaaaattagctgggcgttgtggcaggtgcctgtaatcccagttacttgggaggctgaggcaggagaattgcttgaacctggcaggccgaggttgcagtgagccgagatcacgccattgaactccaacctgagcaacaagagtgagactctgtctcaaaaaaaaaaaaaaaaaaagaaatagattttaccacatatctgttggagtcttccaaccccaaattattgttttaaatatccctgggggctggatgcaactgctcatgcctgtaatcccagcactttgggaggcagatcacttgagctcaggagttcaggaccaacatggcaaaaccccttctctactaaaaatacaaatattagctgggtgcagtggcctgtgcctgtaatcccagctactcaggaggctgagacaggagaatcacttgaacctgggaggtggaggttgcagtgagctgagatcgcaaccctgtaactccagcctgggtgacagagcaagattctatctcaaaaataaaaagattaaaaaaaataataataaaataagtaaatatttctagggattggcaagatgtagtccatgtgggaatggaatattaatttactttattattattttgagacagggtctctgttgcccaggctgcagtgcaatggtacaattatagatcactgcagcctccacgttctgggctcaagggctcctcccacatcagcctcctgtgtagctgagatcacaggtgcaggccaccatgcccagctaattttttgattttttgttgagatgggctcttgttatgttgtccaggccggtcttcatctcctgggctcaggcaatcctctcaccttagcctctcaaagtgctgggattacaggtgtgagccactgtgcctggcccacttattttattctttataactttcttccattatatagtaatatgcttattttggaaaatttgaagcacgcaaatagaagggaagggcaccctgcctcccaagcactcagagcaactttcactatgggcattatttcaggggggggtcctacaggttttctcttatgtagcattaaaaaaaaattcttattgtcctaattttatctacttatccatttgcattttccaacaatattttgtgacgaaaaatctttttgaaaattttagggatgttgtttaaataattccatataccctaaaaaccacccattctaatggcacaatgattttttgtaaatttacaagttgaacaatatgatagaaactttaaacatgccaaaaagttgaaagaaatgcatagtgagcagccatgtacacactatctcaatcccacaactagtatttggctatatttgtgttttcattatctagtctctttcttctttttttttttttttttttttttttttttgagacctagtctcgctctgtcgcccagtttggagtgcagtggcgcgatctcggctcactgcaacctctgcctcccaggttcaagcgattctcctgccttagcgtcctgagtagctgggattacaggtgtgtgctactgcgcccagctaatttttgtattttcagtagagatggggtttcaccatgttggccaggctggtctcgaaactcctgacctcaagtgatcctcctgcctcggcctcccaaagtgctgggattgcgggcgggagcccgtgcttcgctcattatctagtgtctttctatccctttgtctattcatccaatttttttaaatatggaatttttttatggaggtgaaatttacattcagttaacccttttaaagtgtacaggttggtggtatttagcgcattatttcaatctctttgattatagacatcctagtgggtgggaagcaggacctcattgtggttttgatttgcatttccctgatgactaatgatgttgagtatctttttacgtgtttgttggccatttgcatatcatctttggagaaatgcgtaagttctttacccactttttaattggattgtttgcctttcatcagtccaattttttaaaaaagtatgttctgttttttgttttatgtggctgggatcataacacgtgcacattttatagctggtactttttgctgaacatgtaagattagcatttttcatgctaggtgcagtggctcacacccataatcccagcattttgggaggctgagtcaggaggatcacttgagcccaggagtttgagacaagcctgggcaatatagaaagaccctatctctaaaaaaaaaaaaaaaaaaaagtagtcccagctactcagggggctgaagtgggaggatcacttgaacccaggaggttgaggctttagtgagccatgatcaccctactgcatctcagcctgggcgacagagaccctgtctcaaaaaagatgagcattttctgtgtgactggagacttttgaagagtggctgggcattttttgaaatcctgggtcatgctccttttcccttgggctgtctcgggttcccaggccctgcctgggcagtggggtagaagccagtgctgggcagggctggccacagctcaggtccatcctctcttcctccctctccgtcccacatggacctcccggctccctgcagaggtccccagcatgcaggatgtgcacacccctgccagcaacccctggatgccgttgggccctcaggagtcccctgcctcaggtgagagcctggtcccgtcccccactcagagccctgtagtttttgtgtctgagtggatggtacatgggggtgtgggggtcacagttgggtgcagccatggtggaagggagaatggtccaggggacggaggaaggtgggtccaacgtggacaggggtggaggggaggagccaggtggacgcactgtgtgtcttttgcttcttctttctagactccagaggccagtggtgggcagcccaggaacacccctcagccaggggtgaccacaggggagaacgaggtgaccccaggggcgaccaaggcacccacctgtcagccctgggccccgctccctctctgcagcagcccccataccagcaacccctgcggtcgggctcagggccccacgactgcagacacagtcctcacgggtgctgccccgatggccacacggcatctctcgggcctcagtggcaaggctgccctggggccccctgtcagcagagcaggtgggtgctggagacaggtcttcctcctcccccgtcaaagagggaaggtgggaccccgtgggtgggccaacatctctgatcagaagagggctggggtgggtgtgcagagctcaggaataggatgcccaagctttcctccctgggctgccctgagcatgagatcttggggacttggcttcctgtggctgagtttcttgatgtgccaagtggggacacaaacccccaccttactgcagagtgtcagcgtgtggaaacacagcctgagactccgagaaggctctgggtgcgattctagctctcagatctaaccaggctcagggaactcacggtaaaggctagacgagggccaaccaactcctcacaatcttcctaacagccccggccactcccgccttatggaatgggtccgagtcatcccactcctgccaggtgccctccctctgcccctcctccttctatggcctgccctgaacgcatccccagtgtgctgtctcagagaccaggtgcttctgggcccagactttgtggccagtagcctgggggcagttcccagctcagacactcaccggctatgtgctgggtgacttgggccacgtgacttaacctctctgattttgggttcctcttctgagaaatgggaatgatgacaatcgtgatggggttcctgtgagggtgaaatgcatcacagcatgcctggcacagagagggcgccgggcaccctccctcctttcaccttgcctcgtggcacctggtgggtgggtgtggagtaaatggtgggttcctttgaaccccctcttctgccctgtctcccatctgctgctgttttgtaacccccgctgtgaactgacatttggtcaggctcagatgaacatcccccttctttgttttgtgggctgtgcaactgaggctctgccagttatgaggggtacagccaccatttattgtgttacggctgccctccctggtagctgctaagagtcggtggatttaggcagagattgcggcacacaaaatggcctgccctgcacacggggacacgtcctctcccccccaggtccccaccctgtcagcccccaccatggggagcctcagagcctgggtcctgggatgcagggagcgtgggggcaggctgggcagtgaggggctgtgtgatgtctgcctaggtacgggtgctgccctgacagggtatctgtcgctgaggggccccatcacgctggctgcacaaagtcgtatggtggtgacagcaccgggggcacgcccaggtcaagggcagtggcttctacagtaagtgtctggcctgggggaggggagcagggggccagcccgtgagcctgctcagtgtcactgtgacccaggatctttgccgctttggcctcggagaaaggaggtccctgcaaatctgctggcctgggtcatcctctggagggcaccgggcttcaaagatgggcctggggtggatcaggggtttcatccaacattctcctggcctctggtctcccctgggctggggttctggcccctccttcctgccatcctccccgtggcagcccagagtccccaacaatggccagatccactgcccacttcccaatcatgggtttcctccccaggtccacaacacccaccagccccaggcccagcagaatgagcccagtgagtgccggggctcccagtttggctgttgctatgacaacgtggccactgcagccggtcctcttggggaaggctgtgtgggccagcccagccatggtgagtggacatcccctctcctccttctcgatgggtagactctgctcccaccatgcctccagcccccacccaggaccaaagaccttcctaccagctcagttattcattcattcctaccacaaatgttgattgcctgctaggtgccaggccagagagcagtgccagagtgttctcgcatccagcagtttgaacctgtggccttctggctgcttctgggaactggggagggtgggaggtggggatcccaagggcctgggaggcagtctcgtgcttgggagtcagccccttctgaggcagagccagtgcagggcagttagtgccgggatgggcaggggtgccctgaccctgcctggaatgtgggtggagtagcaggagctgagtgctggagggagggtaggggtcagggaggtctttgaggttgcagccctggatgaatgagtagagctgctgggaaccatcacgaggacctcaaaagccgggctagggctgtggtcagggctcgcaggaggcacccatggtcatgtctaaatgtggagagatgggtcaggccatgctggcgagggctgctggaatggcaggctgggtgctggaggtgggctcagtggccagtcagtgcagcatcctggggacaagggcatgcccttgctgggcatcttcacacgccctgggtggctcaggtctgtgtccctatcacaagctaagcaggcagggtcaccctctgggctcactttgcatgtgacttcaggtggtctggtggcagggaaggccaaaggtccaagggagccggcccagggagccctggccctgacctcccagaggctctagctctgtgggtgaaggctgctgtggcaccagccgggggcaggtctgcacagtggacagactctggtggaagcatcctggatcccagggccaggtcaggcccccagacaggggtgtagacatgctttataaatggggaagggcctgcttcctgagtcggaggctgagaggatggagggtgcagctttagtactgggcacctcagtgacttatatcacacccatgccctgcagcctaccccgtgcggtgcctgctgcccagtgcccatggctcttgcgcagactgggctgcccgctggtacttcgttgcctctgtgggccaatgtaaccgcttctggtatggcggctgccatggcaatgccaataactttgcctcggagcaagagtgcatgagcagctgccagggatctctccatgggccccgtcgtccccagcctggggcttctggaaggagcacccacacggatggtggcggcagcagtcctgcaggcgagcaggaacccagccagcacaggacaggggccgcggtgcagagaaagccctggccttctggtggtctctggcggcaagaccaacagcctgggccaggggaggccccccacacccaggcctttggagaatggccatgggggcaggagcttgggtccagggcccctggactgggtggagatgccagatcaccagcgccacccttccacagctcctcctacaggtgaggcccaccttccccaggtgagggggttaggacgcccagacaaggagcatgccagttggagctaaacccctgaagtcagccggccctccctccccatccctaacttctgtttctcccgagagccctgcctggtgggccttgttgccatcattctacagatggagaagctggggcttcagagacttgaggctactctgatgtctaatagacatctgtgcagatggtggctccggggttctccatcagatctcgccagtataccccggggcctgtctggctggaaaagtttattggcttcgtgacctttggcaagtcacccaacttctccaagcctcagtttcttgacctgtaaaatggtggcattaccttctgccctgtatacctcacaggtgtgggttctggtcaagatgactcctgggactggatcatattaatgaaggatttgggaaggttaaaaacaaaattaaaagcgttgtgttccacatgggtcgagcgtgtagtttagcccccacatgaacctggtgtgtgccgtccctcccgacctctccccaccccttgggctttgcacctaccttgttgctgctacaagaacaggttgaggcagtgatgcttgggggagccgggggcaggttggggagggtagattcctgaatccatgggcttctggggctctgcctcccatagggaccctctagccccaaaagtgcctgtgacaggatgggccccaagctgtctgtcatggaacacactgattagggtggttctggtcctggcgctcatgccagtcagcagatctcacttcccacctctccaggattagcttggcaggtgtggagccctcgttggtgcaggcagccctggggcagttggtgcggctctcctgctcagacgacactgccccggaatcccaggctgcctggcagaaagatggccagcccatctcctctgacaggtgggtgagagtccccccacctcctctgacaggtgtgacagcccccctaccttccctgacaggtgtgtgtgacagctcccccacctcctctgataggtgtgacagaccccctcctcctttgacaggtgtgtgtgacagcccccctaccccctctgacaggtgtgtgtgacggccccccgacctcctctgacaggtgtgtgtgacagccccccgacctcctctgacaggttcacgtgacagctccctccacctccgctgacaggtgtgtgtgacagcctcccctgaagcatattcccccagcctcacttggggtgggagggtgctctgtagactctggtcccctctggcacgagcaccgaggcggagggaagactcactgttgcccttgggagcccagagctcatgtcctcccacaccaccccactcaggcacaggctgcagttcgacggatccctgatcatccaccccctgcaggcagaggacgcgggcacctacagctgtggcagcacccggccaggccgcgactcccagaagatccaacttcgcatcataggtctctgtccccaccccatccaccagtgcgttctcaggggcccgagtgggaaggccaggatggggagcctgaccgagggctgcctcacgctagaggggcccagggtgtctctctgagtcaattcctcctgctggcagggaccaccctgtggccctcatttctccgtaagtccctgctggtctcatggcccgcccttccttccactcccttttcctcacagctcacaccttgtttctcctggcctcatgacagggggtgacatggccgtgctgtctgaggctgagctgagccgcttccctcagcccagggacccagctcaggactttggccaagcgggggctgctgggcccctgggggccatcccctcttcacacccacagcctgcaaacaggtaagaactcagcaatgccatcttgccctcccccacgccagggccagggccgggggtctcagtggataaggaggggaacgtctgctgtgaccaggccttgccagcccctgctcagggctctgggaggccaggcctagaaaaacagggctcccagagctgggcctcttgaggaagaagcttctgggaacggtgcagttctacaggctcaggactcaggaactgaggaagggaagggcacacacagctagagggcctgagccggcttctttgaggagcgtcttgagctggccttgaggaatggttcagtttacagagggggtgtggaggaccggagggggtgcccaactcaaagacctagtggcaaatgtgcagggtggggggtgacagatggggatcctggctggtgggtgtgtctggccagctgtggtggaggggcagggagtggtagtggcggggaggcagctttagacttcaccccaggtagttattgaccatttcctaaccagaacaaggcaggggattttaggaagctgaatctggctggagagggagaaggggccgccaggcttgtgcagaggtgcccatgggagtaggcgggggcaacggcaagggcccctcatgctgtgggctgcttgtttggcaggctgcgtttggaccagaaccagccccgggtggtggatgccagtccaggccagcggatccggatgacctgccgtgccgaaggcttcccgcccccagccatcgagtggcagagagatgggcagcctgtctcttctcccaggtttatttgactcctctccccttcctcctattctgcctccagccccaccttatcctatggaggccaccggggaagggagctgctagggcatggtcatggccagtcctgagccggactccagggcctcttgagagatggagcagctgggcaaagggctccttgggttggctaacatttgagtctctgggcctttccagaatgtggttagtggacagaaataagaggccagctaacagaggtgatgacggaagaagaaaatggagtcagaacacattcccagctataaccataatggctaccctttactgagcaggcactgagtatgaggcttgtgctctatcacgtgacctgcaaaaaagccatattgagcaggtgctgttttccccccattttacacacagaagcttaacatcacacagcttataagcagcagaaccagtatttgagcccattaaatgagtatagcaaaaactagaaacccaaaccgaaattttgtatcagaaaacttgaaatggtttatacagttaagcttaaaagccagacattttcggccagtcgcagtggctcacgcctgtaatcccagcactataggaggccgagacgggggtggatcacgaggtcaggagttcaagaccagcctgtccaagatgctgaaaccccatctctactaaaaatacaaaaatagccaggcgtggtggcacatgcctgtaatcccagctactcgggaggctgagggagaattgcttgaacctgggtggcagaggttgcagtgagctgagatcgcaccaccgaaagcgccagcagctgcaggtgtaaagtctgaggccaaatggtccttctgtcagaccccaccaaacactaggggatgcttagcctctcaccagggacctagaagaccttgtgttccctccctgaccccatgctcgagggacggagctggaggagaggggaggctccttgggctggagccaactggctgtacttggtccccagacaccagctgcagcctgatggctccctggtcattagccgagtggctgtagaagatggcggcttctacacctgtgtcgctttcaatgggcaggaccgagaccagcgatgggtccagctcagagttctgggtaaagtggcagtcctgagtggcctttgaggtcaggtggcatgggtagggcaggatcttcatagtggctgacaatgacttgtccttgtgcccaggggagctgacaatctcaggactgccccctactgtgacagtgccagagggtgatacggccaggctattgtgtgtggtagcaggagaaagtgtgaacatcaggtggtccaggtaaaggctctattccaagttgtccctgtccccagaccttcacaacctcaggtgtgggtgtccacctttctgccagggatgtcactgtcaccactgcttccattccggcttccaggcctggtgccaggggagagggctgcagcaccctcatccctacagagcaaagctctgtagggccactggctctctgctggttgggctacactaaggtttcctaacctcagcactgctgacagtttggagctggtaagttttggttgctgagggctgtcctgtgctttgcaggatgtttagcagcatccagggcatctacccactagatgccaggggcaccctccccaaagtcatgacaataaagaatggctccagacccactgccaaatgtcccctggtggcaaaatctctcctggagctgtgaaccactggactacactcagctttggggactttggtggtcttttaccctagatcaattggttttatatttgtccattcatttagcagccattttttgcctcctccttccctgtaatgtgtcaggactaggctaggttctggggatcctggggtcacctgagcccccagagtactcccgggcagatggcccagtgtcccaggagctccagatgtgttttgttgcaactgctgtctgtgcacagaggagtgtcaaggaagagggccaggaaatgactttggctgcaccttaatagctaaggatggcaaaggatgttcttggtagaggaagcagcaagtgccaaaggtgggcatttgagaaaggacaccaggataggaaccggcctgtgcactggctgggagaggtgacgcgattgcggagggcatctgtgtcttgtgtggccttgagcccagggaaggcggtgggagccgctagaggtgtccccactggtgtgctcagtccagccatcccctgatcagcctgtcaggcctgcttctccatgttggcctctcctggatctttccagcagcaaacatgcatagaactcccctcttcacaaccaccttccattgagcctctatgtccctgcagaccctatgctgacatagtgtcccctttacagctgtccatgttggttgcctctgcctgttcatctccctactcacttctcagggcctgcagtggggccgcatgtcagcccctgttccaggacactgtcctggccaaggtcactgcctctctccctaactccactggacaccttgcagtctttacgtgacctgtagtgtcgttctgcttgccgtatgctccttcttgaaattctcccttccctctgctccaggaactactgtcttctgctgtgcctcagggcctgtccttggtttctccccgtgtgacttggaccacctcatagacatgcacttcgctgcgtcagtgcgatgctgacacactatctgggtctggactcttgagctccagacttcaaatctgaggcctcctgctatctcacaggcaccccaaatttgaaatagcagaaaacaacctcgccattcaccccagccttggatctcccaaggttggaggggcaccatcatcacccagtaacccaacctagaaaccttggtcattcttgatttctccctgtcctccacctgtttgctctcaaggggtgggaacggttggctctggaatggcctttgattacctcttccctctgtctcccagacctccagaggcccttgatggctctcccagtgtcctctctcctccaggaacgggctacctgtgcaggctgatggccaccgtgtccaccagtccccagatggcacgctgctcatttacaacttgcgggccagggatgagggctcctacacgtgcagtgcctaccaggggagccaggcagtcagccgcagcaccgaggtgaaggtggtctcaccaggtaggaaaggtctatatccggggatgggaaggacattccccagtagatttactggttctcaagggctggctctgcagtctgagggactctggtttgaatcctggctcaccctgccagttgctggtagtgtgacttggggcaaggggcttaccttcctgagcctcattttcctcccgtctacagtggggctgctccaccacctgagagggctgtagtggagatgaaggaaatgatgctctgctgggcccctggagatagcttaatagacattaatgcatgcaggacattcagactcaccgattttgagacatatgactgactggaatttcattataaaacttaaaacttaaggcagaccactaaaatctgtccactctaatccactctaaaccactaaaatctggccactttatggccgtttgaccatataacccagaaaggaaagggcagggattatcatcaccattttacaaatgagacaggtatgcagagagcgtaagtggtgtttccactggtcacaccgcaaatgtggcctacctgggactagagcccatgtcttttgactccccatgtttttttttttttacccccacgaaattactatacttgtacctaagtggaatcttacttgcatcatttgatatttgatattgtagccttacctcctctagctactactctatcatacttcaacaaatccaaattgcctgtaagatgcattatttttgtaccaagaaaaaaatgctgccagtgaaacgacacaattctgataccatcaattaggatgcaaaccaacttgagagatgtgaaaataagtgcatatcagaactgatgaaacagattgtggttcagagttcacacttacaagagatatgttcaaataagcaggagggaaagggggacagggctttgctcgtcccccagcctgtgcttccttgtgtccttggttcttgttcacggagggactgaagacagagtggtacctcgggccaagctgccaattctcacaggcctgatacagaccttgggggagtatgccaggctcggaggtgccagggcccttcctgcctggtcttctgggcattcctgacaatcagggctgcagcgccatgccaggagcacggttacactcagaggggcaggcctggctgcttcctggctgccaggctgagggtggagactggccagtactagaagttgaaggtctggctgaaatgttgctttgtgagtgggactgacttgtcggcttcctgtctatgatctctttagagatcgcctccccagggcccagctcagtgcttggcatcactaggtgctcatgttgtggctggaaatgttgtccagcggcttttttctcacctgttgctcggcgagcgggagggagggttacagggttccttcctgccgcttcgccagcccgccgccttgacctctgtccggggcctcgctcggcccaccgtctcgctccgcccacttggccgggcaggctgcgctccgctgacccggatcccgcactcgtggcggccccgcgctcagcgcacggcacaggcggcttccgcactgggtgctaacgtatagacaaggggaacatggtggcgcccgaaaactcggagatgccagcaaccgcggagccccaagggggtgttacagggacaaatgttcccgccgctcgcagctcggtgaacgggagcgttaaaactcgttcttccctccattccctcctgctcacccagctacaaaagccgcgacactcagatacatggtgactaagtgcctgcctgcacaatgatggagttacattggcgaaagcaccacactccagggactacttttcacctgtatcatgtccagaaaattgaccttgtctacataataaccaaatcaaggctgtgtgacaaagcaaaatgcagattcacagtgagagaactgtcaagaggacctagacattatgtttgcgattagctccagatgggattacatggaaaaccaaactacaatgagaaacttgcctgatacctggtcaccacgctgaaatggcctgagatgtgtgtcccagatgggacagacatggcctcagtctggccactctcctccggtcctctgctggctgctctcacctgttcattttttgttgggtcatacggtgtgcggctgcctgaccctgccctactcatggttgggtggcacattgaatttcagtgttagcaccagggtaggaggccttggggtggtcaggctgaggtaaaagggacatagctctactgggaggacttctcaacatcgctgtgaagtaggttgctgttgctgttattagtcccatttcacagatgaagaaatgtgcataaagggcttaagcaacttgcccagagttacccagctggcaagtggcagagcccggattgagcccgggcagtatgggtccagagctggtgtgcttaatcactatgctgagttcccactatgatgggtcttgggctgtaccagctcagagttgataccaaagttacagatttttagaaacaatatgcattaatggctttgttatctatataaatttaggtaggtaatagtctggttataccaatataccaaacgtttgtaaggttgttcgctgctaggtacagtcttttagtggtattttgtgagtaaacaaggggagagagaaagataagctttctctggctgcttgaggtctgacttcagggaaggtaccactctggtctaagtcagctgagttttaagaaccccttccagaagagagatgaagcagtagaatgaaattttttttttttttttaagacagaatcttgctctgtcacccaggctggagtgcagtggtgtggtctcagctcactgtaacctctgcctcctgggttcaagcgattcttctgcctcagcttcccgagtagctgggactacaggggcacgccaccatgcctggctaatttttgcatttttagtagagatggggtttcaccatattggccaggctggtctcaaactcctgacctcgtgatccgcccgccttggcctcccaaagtgctgggattacaggcatgagccaccacacccagctgaatgaaacttaatagggagttatgagatacagacgttcctagtaaattcagagggagagaaaacaagggctttgttctcagtgtagttagtattagagccaccgttaacaggactgttttcctattaccttgtctaatatgcattgcttcctctggggaaagtgaaaaactggaaggatgaggacccaggtgactaagataagctggtgatattgaagggacaaaactttgatggttggaggaacccagcagagaaagggaaaagataagagctcttgctaactcaaaattttacttggggctgatcctacctgctctcccaatccagaggcaagaacagttgtcatttagtaattcaggtctcaaacataaggagttaacttcaagagatgtttaattatccagtcaataaatatttgggagtctaggaagagctattcagtgggctgaggccacaaataataatgggaggaccactgcatgttgaagtgaggccaagaaacaggtagaaatcatcatccctcatagagtttgtacgtatggttaaaaggttacagggtaagtgcacttcgttttcaatctggcagttataatgctgtgttcctttgaaggaaatgaaatggcaggtgagaattttcagcatacacagagcttcctcaccaccttctctctcccctgtcgttctgcagcacccaccgcccagcccagggaccctggcagggactgcgtcgaccagccagagctggccaactgtgatttgatcctgcaggcccagctttgtggcaatgagtattactccagcttctgctgtgccagctgttcacgtttccagcctcacgctcagcccatctggcagtagggatgaaggctagttccagccccagtccaaaatagttcatagggctagggagaaaggaagatggactcttggcttcctctctctggctggcaaagggagttatcttctggaatacattagctctttcaaaaacccacccagtgtttagcctcaacggcagccagttaccagcttctctctgtagccttcagcagtgtttgcatctctgacataaccacaggctgctgttttcaagaagagcaatctgtttggataagaaaaacctttactttacagcttccctttataatttgttacacaggaatagttaaatgcatttgtttgtttgttttttgagacagagtttcactcttgttgcccaggctggagggcaatggcgcgatctcagctcactgcaacctccgtctcctgggttcttgattctcctgtgtcagccttctgagtagctaggattacagatgcctatcaccatgcctgggtaatttttgtatttttagttgagatggggtttcaccatgttggccaggctggtctcgaacttctgacctcagatgatctgcccgcctcagcctcccaaagtgctgggattacaggcatgagccaccacgcccagccatcaatgcattttttttattttttttttgagacagagtttcgcacttcttgcccaggctggagtacaatggtgcgatcttggctcactgcaacctccacctcctgggttcaagcgcttctccagcctcagcctcctgagtagctgggattacaggtatgtgccaccatgcctggctaattttgtatttttagtagagacggggtttctccatgttggtcagactggtcttgaactcccgacctcaggtaatccgcccgcctcggcctcccaaaatgctgggattagaggtgtgagccactgtgcccagcccatcaatgtgttttaaagctagctgtcagggttccacttaatttaaagctgggcagggagatgtgtaatgatttcaaagttaacacctgtttgttttctaaagggcatgccaagtcctgctgtatcagggaagtattctgtgctaaaatcagcgatggttcattgctctagtctctctcacccttctaggcagtgcatcagtcagctctaaatctggtgcagagggttaacagcataacccttgttggcaaaatggaatagatgttaagacctcaaatagggatttgggatgaaacagctgcagttagcactgttatctgagcatgaaagaactggaaacgctccttacgtcgagatgttggaccttgaagccctcctgaggccaacatgcaaatctggctgtgacggttcatctgacacctgtgtaaagctgaccagcctgctctgtacagtgacaatgaggagcccctctcttccttaagtaggaatctgtgaagcaaaatgtttgctgccaaagacaaatcagactgtcagtcattaaaaacagcattagcaggatgaggatagcaatggggaagggttgtgggcaatgcagtaacagggaaatggcttcagaaatggtttgagttggaagacaacattcttcatctctcaggacttctaattccttgatgctaaaagaagaggcatggattctatgagcttccaagtccctttccactttaaccttctacaaatctttcagaggactgcctagtagcaaaggttattcctggacacaggaaagacgggcattacagggaccaaagctctgaaaggtgacttttattaccaacacactggctggaaaagggacaaaccacatcacgggtgagtgatacttctcagtcttctctactcattcaacaaaggaaatgtgggctggggcagaggtcttttttcatttaatactggaaaaatattgaagagcatccatgttcacttatggctggttttgctatagaaattggaaaataaaggccacttttttgaaatccccagtttaattaaaccagattttggcctattggtataaacacatcagaaggtaagtttgaggttagctagcagctaactagttctaatagaaccagtcacagaatagtgggctaagattagaggtaaaactcattctaggccagtggttctcaactttaccatattgcgagcttaaaaaaaaaaaacacaacctggggggtccccctgccccactaaaattttgatttaattggtctggaatataggccaggcgttaggattttaaaaagatatcctcaggtgattctattgcatagcccaggttgagaagcactgccccaccccgctgagattctgcatttctaaccagctcctaggtgaagtccatgctgctgttacagaccacactttgagcagcaagaatctgactttagagatacactcaggattaaagtatgaatgaaaatatgaatcttaagggtatttttctagtcactaaactagggatttacagcagcagtagaatggagagtaagaccaaaagaacgaaaaataaattcatttactaataaaggaaaggggaaagaacagcccttcatgggcaaaagcttctaccatgaacatttatttttgttaaagcagattataaattttcatcagtacaaatatatataacttacatttgattgtaaggccaacgttcaaaagtaaaaatgagatgagctctcttattgttatccgaggtcaagaggctgcaactgtcaaggggatgttctcaccaaaagggggtttgggggaagaggacacacacaaagctaataaaaccagaatccccatccccacaaaactcatgggaacaaaatttaaaggataaaacaaaacccaccaagacccatattacaaaccaatatggtaacctgtgttcccttctatggtatgattatgtcatgttaccttagtgttaaaggattaacataaggaaactgcagcaatatataaaagatatattctctatagagcatatttcgattgattccattaaaataatgacattagaattccatcataggtttaaaaccaggacaatactgcttttcctttatttaaaaaaaactacaacctagtgactgtattggtcataagcatgattgttgttgcaatgtgctacttacaatgaatgactgacagaaaacaagctagggatcctgtctgcagcttccagcctttcctctttttatttcagtaggcatcaatgataaatcaatcttatgtacaatttcttacaactagcccctttacctttggcaagattacttacaactcatacaacttcttaatatctgagaactatttaaaatattctaaatgcataaaaataaagattttggcttttgatatatataatatttattctgttactcaaaatggaagctcaacttctcccccaaaatatagctctgctgggcagttgctgatatgccctcctgggaattctggcagcatagcgtgcctctctgttccccagcctgagcacaaaccactcttcttgatctctaatacaggccactactgacaggaggcaggtgaatggcctgaaaaacaaagggagattgctttgcttcctgttgtgttttacatttcagtaaatgtgcttggaatatagattcttgttcagatactttgcctctctgttgccagagatttgtaagggggtaagggaagagggagtacagaaagcaacatttccttgacttctttagcctaattgcaaggcagcttttctctaggaatgctttttcccatgtctttcaaaatcacccctcacagtactctgggcctggacttgttccttgggacctttgggattagtgaaaagagtactaatcaggagacaaagtctgttttgctcctttgaccgctaccccctgctccctgtctggtatggacaagatacatagccataatgattgcttaaagttcaatttcaaacgtcttctgtaagtcactggagaaagggttggtaggggagggattagtacgctgcttggacttgttttctaatgcagcccactgggcttcaaaaggatccactgggcaggtgcctgtaggaacctctgtatgcctgtctgctgaggccaacctgccatcatctacaccattgaaagctgcagaaccgttgaggtgctgagcaggaggcttaaagaagggactggtggtagcactgcttgcctcgtagtgagggaatgtctgctgcctgaccaggctgggtgactgatggggatgggcagcctgagggtggcctgcagtgccaaatacgttggccaccatctgggagggagtgatgcccaccacaggcacattaggggctggatagggcattccattggccacaggataggactgggcagggacaaaggctggttgcagggctgggaccacacccactggcacaggctgagaggtgaggaatgcattcccttggaaaggtgatgctggctgggagatggcagtgggtggaggaggctggagaactggctgcagaggagcagctgaggcctggggctgctgagcccggacgctcttagacacctcttctaaccatcggtcggcctcagagggagtacgtctatgaccggcctggaagagacctggagaggcagcaccagaagattgaccccactcggtccctggaaccaacaagatgagagacaaaagaatcagttaggggcatctttcctcaccttataatcttggttatttgaatgatcctaacatgtacaacatgtccccccctaatgggacattttgtggttttgataggtaggagtaaagtctctattaccaactgggattttgtggtaggatgaagaaaacttgtcaagaccatgctgctgtgtcagccacactgaagcactgtctagatatggctcaaatgcattaaaccacggcagctgactgatgtcagaaacccctcgctgttgctatggctcatccacaatacagaaactagctggttgtggtagctcacacctgtaatcccagctacttgtgaggctgaggcaggaggactacttgagcccaagagctggaggctgcagtgagctatgactgtgccactgcactctggcctgggcaacacagtgagaattctgtcttaaaaaaaaaaaaggccacgtgcagtggcttatgcctgtaatcccagcactttgggaggccgaggtgggcagatcacctgaggtcaagagatcgagactatcctggccaacatggtgaaaccccgtctctactaaaaatacaaaaattagctgggcgtggtggtatgcatctgtagtcccagctactcgggaggctgaggcaagagagttgcttgaacctgagaggcagagggtgcagtgaaccaagatactccagcctagtgacacagcgagactccgtctcaaaaaaaaaaaaaaaaaaaaaaaaacacctagcttgcacatcctctaaagggcccaaggcaattcatcttctgctctaacagagcaaaaagaaaataaccagtgacctggccatatcttgctggcctctgcctggcttccagaaatatgttgtctttttggtgaactgcctttattactatgttaaaaccttttgaggccgggtgtggtggctcacacctgtaatcccggcacttttggaggccaaggcgggtggatcacgaggtcaggagttcgaaaacagcctggccaacatggtgacaccccatttctactaaaaatacaaaaattggttgggcatggtggcatgcacctgtagtcccagctactcgggaggctgaggcaggagagttgcttgaacctgagagatggaggttgcagtgagccaagatcatgccactgcattccagcctgggtgacagaacaatactccacctccaaaaaaaaaaaactttttggttttataattaatagatgttttttatacaaaactagaaagtacaaaaaagcaaaaatgaagtgctttttctagcactttttgtaggcctcctattgtaggaggcagggccccctctttctacaggaatgtctgcacatcaccaaatccggtgatggattctctgaggtggggccctggaatcttttttttttttttttttttttttgagacagagtattgctctgttgcccaggctggagtgcagtggcgcaatcttggctcacggcaaactctgtctcccaggttcaagcgattctcctgcctcggcctcctgagtagctgggactatatgcgcatgccaccgcgcctggctaatttttgtatttttagtagagatggtttcaccatgttggccaggatggtctccatctcctgacctcgtgatccacccacctcagcctcccaaagtgctgggattacaggcatgtgccaacacacccagccggaatctgtattttataaaagctctatgggtggggctctgttccacagtcctgttccacagtcctaatgactatcagtctgatctcttttgttctccttcaccatcctttcttatgtaagcaacttatttctaggagggaacatagttttcctgaaaggattcctccctagttcccactcagctaactggctgagttttagaaccagggtcacttatctgatcccagaatcctcaacaccatctgtggccaccttacccgaacatgtggctgcaatttccttgttagcagcatcaggggcatgggcccaagggttggtttcacgcacaggcattgctacgggtgctagagcagtatgggctggcttagcaagcacatggaaggctgagtcagtgccattagctacaacgggagcagacaacatcaatggagttaattcatgcagggtgtacaagtgaccccttggagctgtgtcagtcaggtgaatgtacaatactggtggaatggataagagagaagagttgatgtttgggaaaaccatgatatcttgcattggatgtacataccattaggcaaagaaggaatcagagattgtaatttttaaatggttgtatagataaagtcaaataactgttctaggaaaatatgtgcatggggagtggggaaatgaaacctacgaaaacaatttcaaattaaggtgaacagagctgctgcgtcttaggagcagcaaaaaatatctaactattctagatatagcttagccttcggcataatgaagtaggtatagcatttccctcttcttcacttttccaaaaggtcagattatgttaacaataatactggttaaaaataggccaggcgtggtggctcacgcctgtaatcccagcactttgggaggccgaggtgggtggatcacctgaggtcaggagttcgagaccagcctggccaacgtggcgaaaccccgtctctactaaaaatacaaaaattagctgggtgtggcagtgtgcacttgtaaacctagctactagggaggctgaggcaggagaatcacttgaacccgggaggcggaggttgcaatgagcctagatcacaccactgcactccagcctgggcaacagagtaagactccatctcaaacaaaaaaaaattactctttgtttcctcctcaaaagttaaaatgtatatatgattcgttattatgtgctagtcattaagctaatattttacatgcatcatttcatttaattatctcaaaaaccctacgagtctggtattatccccctattacagatgagaaatcgaagttggtatgttttcatttgcttgatagatttctaatttgctacacaattaatttcaactttttttgaaggtttttttttttttaactctcctggtaactcacagaacattttttaacaaagatttttttccccctctatgatgtttacaatatcacaacatacctactattctttcctcatctccccttgttaaaatctgctaacccttgttccttttactccagatacctatattagtttcttctccttagcccagctctcaataacattcagtttggtgtagacaagcaccctcccctgacctacaatataattatatcctttttaggactggacagccatgcctatggtgttggtactatttttttttttttttttttttttgagatggggtctcgctcttgtcacccaggctggagtgcaatggtgtgatctcggctcactgcaacctccggctcccaggttcaagcaattctcctgcctcagcctcccgagtagctgagattataggtgcctgccaccatgcccggctaacttttgtatttttagtagagacgaggtttcaccatgttggctaggctggtctcgaactcctgacctctggtgatccgcctgcctcagcctccctgttgggattacagatgtgagccaccgcacccagccggtgttggtactgtttacctagagtttgtctaaaagactgcctttgcttttttggtggcaaaaaaattttttttttcacctagaaactgggagccctctaaaggcagggaaaggaaactgaaatattcaattttgcacacttagtgccttgtaggctggcagaatcagcagaatgtaacgggtactatattcaggaggacctgagtttaaatcctgtctgtaagatttgggcaatttacttatcctctctgagcctcttttttttttttcatctgtaacacctacctcacaggcttgttgtggggattaaatgaaataatgcatgaatacctaccacaatgtggcaagcaatgtgtaagtgctcaataaatggtgcctattattaccggtattataaatgtttgttagatgacatgaaaagtcatttggtacacatgactatgaaggtttattaaaaagaaaaagaaaaagacccttggagaaaaagtgtgtagttcttccagtagaagcagggcactatctctggagtaaaacttccgctgagctctctttcaaaagaaatggagaaacagcaattatagcagctcaaattctacaagtctgtaacttaagttacataaattctttgctgacctctgagtcaatatccactatttagtcagtatctctgaaaacaacttttaactcttcaatgccacaaaggcaaattttaagacacttgttatagaagatgaactaaagagctcaaaggagtgcctttttctttattagcctctttgacagggcagagactaggtgagtccagggcttctcaacattggcaccactgacattttgggctggataatcctttgttgtgggtgctgtcgtctacactgaaggatgtttagtggcattcttggcatctaaccacaagccagtaacacccccaacccccaacttgtaaagccccaaaatgtctccagacagtgaaagacaaactttgccccagttgagaaccactacactaaagaaagcataacctttgaaccaattctgatgactactgcttttgggaaactggatgggtatgctgatccttaacagtcaagtgggaaataaggcagtaggttgggactacagaaattccttatagaatggggtgaaagatgggcacatgcagaatgacaaacacagacatcttagaaaacaggaagggcacaaagacatcgtcgaatggagaaatcaatgaatctaagacatcaaatagagaaattaatgggtctgaccaggccttgggaagctcaggatgccaacttacagttagtgagcagtgtactaaaagtactggttgtaaagagaacagctgagcaggtcagagggcaccaaccttggaaggtaggagattgtggtgccaccactgtcactggtttggtcatcggagcagatgagaaggggtcctcaggtgtgctgaaggcattggtgatctgtgagcacagggagctgatgctctctgcctccccttctacttctggcactgcaaggcaaacagaaaatggctccagacagaaaaatggaataatcctgaaatttgacagtatgatgcaagctggcactttatactgtatctcctgcttatgtaagaaaaggctcaattaactgtatggcagggctacaaaaccagtttcaaaaaatttactggccacaatttcattggcttttcagatgggaaagtataaaatgtcaacaattaatgtactaaggcacatcttcctcccttacaaatccccaaatttcttcatttcttcttcttataacactgttgaggatctgtcctttttgtgccaagatgttcagctagccagatctttgtagaagacatttgcaacctgtatgccttccaacgtgttctcaagactgtgatctgaattaggttctggagcctttagtaattctgtcaggaaaatgggttcaagtctgggcactagtggatgcttagtgcttttctctgtaacaaactatgacaatgtcatcaatctcatttttctccaaagtctccagtactaagcatatgatctatgataacatgaaaaagtgagcagaggtgtaggacgctagggcctttattcttaatactgactctaggatacttctgtatcactgaggaagctaattatgtgtgctaaagctctgtttgctcatctgtaaagagaataatagtttttattccctgtctgccctagaaggagactgaactgaaatgaggtacctcagctgagaactgaaaagaccctccgtaatcatctagtccaactattctttaggtctagtttcatctgtcagatgaacttaactctctgtacttttataccatcagtaggaatggcctattgagacagtttcctcatattttgttatagcaatggcttgacatgtctcagagggaagtaaaatagagcccaacaaaagcactgaccagatctaatactttagctacagattttatgacgaggatagacctatagaggctggcatagctgtacagaggccacacaaaggcctgtgagacggttctgaaaggtaatgaatacttgtgaacaagtccactgtctgtgatgaacaacagatcttagatgtacacgaaagacctgtctagagtttcctccttatggagccaaccagccagaaggacaatgagcacatatccatttcttctgctggtaatgctatgtgtttctaaggcctctttaattaattccctgctgggtcccaatggcagaataagaatagaaacttgagacccttgatgtttgggagcaggttggctgaaaggcagtgaatgcacttacatcaggacaaaccacaaatcttatggcttaggctagaaattccacaatggctctgctgcctgtttgttgaagagaaattatggattcacatccccctccacggaccttagttttcccactatgggaaatgacaaaagatacaactatcaacgaacctcagggaaagaggaatgcctagtttaatgggattagtgtcttcatgggaagtgatgagaatgcttcagtgctcgagtacccagtgagtcaggtagatgctacattacctgcatttttaatggggaaatcagtcttcctctgcatagtggaaggcaactcattgatgcgtagggatagttggcgtttaaagggtgacatcttctggctaagagcaggaaaacctcggaaagagccttggcgagcaagctgttcaattggagcatgccggcgtgggatggcatgaggattgttcatctccagagaggtcgtggcatcagaagtaggagaggtgggagaggatggggatggggcagtgttgccaggggcaactgatgaaccaacgactatcttatctgtttcagctcaagaaaataaagagaatgaagaccttagcaatgtcttcaaataatttgcgtttagagagctgacaaattcgaaagccctctaggtccttttacccatttccttcccagtgtctcttaaaacataagttagaagcagggttcggatccatttttcagacagataaaaggcttagtaatgtactatatgtcacaaagcatatctactaagacagaaatgttagatcttttattctcattcagtgatttataaattaagactgtgaaaaagatcttaaaaactcagttcctatgaattcctaatatgtagtcttttaaagaatgattcatgattttcaatgcttgtgtgttaggggaggagaactttgggaactgtagcattagaaaggtctaaataagcataagcttaaccatatatctttgattaggtgtcaaagaatgtcatatataacagtctttatttatttatttatttatttatttattgtttgagatgcagttttgctctttttgtccaggctggagtgcaatggcaccatcttggctcactgcaacctccacctcccaggttcaagtgattctcctgcctcagactcccaagtagctgggattacaggtgcacaccaccacgcccaactcatttggtatttttaatacacacgaggttttaccattgttggccaggctggtcatgaactcctgacctcaggtgatccacctgcctccgcctctcaaggtgctgggattacaggtatgagccaccacgcccgacctaaagcagtctttaaatcatgcatttgtggttcatttgaataaaagcatgcagtagtaaaattttgaactggattaaatttgagtaaatgtaagactgtgggtaccagttgagtcccattctgattgtgacaaatctcaaccaccaactctcacaatcctttgtagatcttgggactcaatctctttgcagttgttgtgcataacaatgaatattatttggtggtattaaagaacatgcttaattagtgaatagtctgaagaccactaaagcatattagataacagtaatacaggttaaattttctagtacagatagcatgatttttcccccctttggcttcctggtgcaaatatttacaagaaatgaaaaaaaatcactatcaataatttcatttcaaataaaaatatgtatgctttttttttggagggggcttaagaattagagctgtttgggtcagtattagtcaatgatgctaaccaaaagggctggtttaaggtcaggtgcggtggctcacacctgtaatcccagcactttgggaggccaaggcaggcagatcacctgaggtcaggagttcaagaccagcctggccaacatggcgaaagtccatctctactaaaaatacaaacattagctgggtgtggttgcattcacctgtaatcccagctactcaggaggctgaggcaggagaatcgcttgagcccaggaggtgaaggcggcagtcagcggagactgcgccactacattccagcctgggcaacagaactacactctgtctcaaaaaaaaaaaaaacaccgaaatcaaaccaaaacaacaacaacaaaaatgactagtttagaactaaaaggttatagtaaaaaaaattatcatatatatatatttgtttgtttttaagagacagggttttgctgttacccaggctggaggagtgcagtggtatgatcacagctcactgtaaccttgtactcctgggctccagcaatcctctggtctcagcctcccaagcagctaggattacggatgtgcaccaccaaatatggcaatttttttttttttttttttttttttttttagggatagagtctatgttgcacagtctggtcacaaactcctggcctcaagtgatgtttcctcctcagcctcctaaagtattgagattacagctgtaagccactatacctggcctcaaaattatattaatgtctattagttaacttgaattgtttgtgcttgtcttgttggttttaaccctacttatatacaagaattcaaaagtattttcaagccctatcatttagttgtaaaatatacccaactcacatttatagactgccaactaacttgaatgtttgtacaggcatttctgctgtgatgccatgtgtacctaaataaaactcacactctataaaatcacacactaaattaaattaacagggctatagaaaaaagagttataggcttacctctcaaaatctatagacttttgtgactagaaagcactaaaaaacagcaataatatcatataaacagtattactgttaaatctctctgctagcatcatagtccgtggatgctttgcagccttaagccctgggacctctgctgcttcctttaagatgcaggtacttgattcatttgcttctcaaagagatcagatgcatcagaattaaaaaggtatttcaggatgggaggaagggggtaagagatgtctctgcagcttcttcaactgcactctgattcctcagatagcttactataatggagtaaatatttttgaagccattaaactagccactctaaaggaagcggtttttaagattttcaactttgttataaggttttatattgctaagggttctctttgattatgagaaaatttacccctggtagcttcaaaataataccttgttgggaaaaactgcattccataaatacacactgtagaacagattgtacctttcttggcatcttgcatttgtttcatgatctcctctctttctgcttgttcagtggctgttgtgacacggaatgatccttctcttgtaaaagtggtccgactagcatcaaaagtagcagtcactccacattccttctcccgcttctgcttgcgctctaaacaggctgcaaaagcacagcctactgcatggctcaacctttcaccctgtaagagcagattttaaaagcttttcagaattacactactaacaattacatacaaataagtcttttgttttgttttgtttttgagacagagtcttactgttacccaggctggagtgcagtggcgcagtctctgctcactgcaacctctgcctccgggctcaaatacttctcgtgcctcagcctcctgagtagctgggactacaatcacgcaccaccacacctggctaatttttgtatttttagtagagatggggttttgctatgttgggcaggctggtctccaactcctggcctcaagtggtctacccaattcagcctcccaaagtgctgggattacaggcatgagccaccacactcggcccaaatgtctgtttttatgaaagcaagatgttgcaaattccagcttaaaattgttttaatagattagtatgccatattaatttaaatgaataaattttctaaggtagtgcttatgatggttcaattcactgttacaagccttggggtaaagtgataaccagcaacctgtgcttttgtaagcagccatggagaactctttatcacttaggctctgtcatgtcagccctggccaacagcttagaagactctatgcaaggtttcaagccttgacatgcaagcttctagttgccctttggggaagcagtgggaatatttaccagccacttctaagaaactactggaaaggcaaggcaaatttcaggagcttaatgcactgttaatatgtctaggaaaaaaaggtgcaaacttaaaacttctgataaacaaatataattccagtgattaaaaaggaatgaggctgggcatggtggctcacatctgtaatcccagcactttgggaggctgagatgggcaaattgcttgagcccaggagtttgagaccagcctggataacacagtgagactctgtctctaccaaaataataaaaaaaattaggccaggtgcgatggctcacacctgtaatcccagcactttgggaggctgagatgggtggatcatgatgtcaggagctcgagaccagcctgcccaacgtggcgaaaccccgtctctactaaaaatacaaaaattagccggatgtggtggcgggtgcctgtaatcccagctacttgagaggctgagacaggagaattgcttgaagtcgggaagtagaggttgctgtgagctgagatggcgccattgcactccagcctgggcaacaagagcaaaactccgtctcaaaaaataaataaaaatcaaaataaaggccgggcacagtggctcatgcctataatcccagcactttgggaggctgaggtgggcggatcacctgaggtcaggagttcaagaccagcctgaccaacatggagaaaccctgtctctactaaaaatacaaaattagccaggcatgatggcgcatgcctgtaatcccagctactcgggaggctgaggcaggagaatcacttgaacccaggaggtggaggttgcagtaagccacgatcgtgccattgcactccagcctgggcaacaagagcaaaactccgtctcaaaaaaaataataattaaaaaaaaagaaaaagaaaaaattagtcgagtgtggtggtggtgtgtgtctgtggtcctacttgggaggtgggaggatcacttaagcctacagtaagctctaattgtgccactgcactccagcctgggtgacataatgagaccctgtctcaaaaaacaaacaaacaaacaaaactaacaatgagacaaaagctttgctgtctcccctttctgaatcccccctctaagcaaccctcctcatttatggccctccgtgcttttaggttttcccccataccctatcttcctctagctctaattcccaactctacctcccaaccaaacacaggcaaaagtgaaagcatgttttcatccacactgtctacttataaaagaattaagcagataaaactggtttgtgtatgggaggagtggaggacgtatataaacaaaacactgctttatatagatacactggattacccagagtcaatttaataaattcaatggatgatttttagcagggttatctgtattttagaccattttgctaattgtggaataaaaaagctagagatggtacaataattgttggcatcattcacagtgagaagagatatttgggaacaggaagtcttttgtggtgttctcaaaatcacaccacgtaggcagctgctcctacacacggctctgaacaagtcgtctcactggattttgcatgacagtattagttatcataaggacaggtaaggtttaaaatgctttatgtccctaagattttactacctttgactactttttaaaaatttttaaactttttaaaaaaacttttgactacttatttaaagactgatagaattactctatgaatccacatgagtttccatctaacttcccagtaggatgacattaggccagatgttaaagcatgaaacaggagtactgaaagattcttagaatgtgtttgcatttgaacgcaggtctattataaggacagagctacaggtcaaggaagcttgcttattctttctcctaggcctagggcagaagttgttgaagagtgacctcatccccaaccaacagcatcatctgggaacatttaagtgcaaattcttaagtaccaaccccaaactcactgaatgaaaaacgctggagatggggcccagcaatctatgttttaaaacaagtcctccaggtgattttgatacagtagaactattggcctaggagattcaaacaggctgccgggccactatttgacaacaaaatggtttttaagttattatctggaaactcttgaactccagatttttaaagtgtagtgatagcaaaatataccaagtttgtggtttacttagggtctgagaaacagaagacaaaagcacagttttgttacttcaactcatttcaaagcacctgtgtcaaaccaatgaaggacagcttacacaatattcgctaaaatttttggagtaatgtggcccagaacctatgctaagtgtgcttataatctttatccaatttagtattcacaaccactttctccatttatagaagtgtataccaagacagagaatgttaagtaacttgccccaaatcccacagctagtaagaaccagaatcagaactgaaacccatatctgactcagagcctgagctcttagcatttgtttacaccaatgtctcaaagatctttaaacaattttggtcaatttttagaccatggccactacttatcttccagattaaacgttggcaagagctttactgacctgtaaccttcacgaatggctatactgcctattctgtctcgacacttgctgtacatacagtttgagtatctcttttctgaaatgcttgggaccagaagtgtttctgattttagatttttttcagattttggaatatttgcattatacttaacaagctgacatcccaaatccgaaaagccaaaatccaaaatgctccaatgagtatttctgttgagtgtcatgtcggtgctcaaaaagtttagaattttggagcatttcagattttcggatttgaaatgctcaacttatagtaaaatcattgtcatttaaaagagacttgtctttcatgttaaaattctgggtaatttacataaagaatgaaattattctctattttaaaacaaaacttctatcatgcaacaatttctagcattgttcattctaccgtaacttagtatttctgtttagtttttgttttttgttttttttttttgagatggagtcttgctttgtcacctaggctgcagtgcagtggtgcaatcttgactcactgcaacctctgcctcctgggttcaagcgattcttgtgcctcagcctcctgaataactgggattacaagcacccgccaccacagccggctaatttttgtatttttagtagagacagggtttcatcatgttggccaggctggtctccaactcctgacctcaagtgatctgcccacctcaacctcccaaagtgctaggattacaggcgtgagccaccgtgcctggcctatttttgttttatttttgagacggagtcttactgtcgtccaggctggagtgcagtggtgcaatcttggctcactgcaacctctgcctccgagttcaagcgattctcctgagtcagtctcccaagtagctgggatcacaggcatgcgccaccacacctggctaacttttgcatttttagtagagacagggtttcaccatgttggccagactggtcttgaactcttgacctcaggtgatctgcctacctcggcctcccaaagtgctgggattacaggtgtgagccaccatgcccggccagtatttcttttttcttttttttttggccagagtcttgctctgtcacccaggatggagtcagtggcacaaatctcagctcactgcaacctctacctcctgggttcaagcgattcttctgcctcagcctcccgagtagctgggactacaggcatgcaccaccacgcccagctaatttttttgtatttttagtagagacggggtttcaccatattggccaggctggtcttgaactcctgacctcgtgatccgcctgcctcggcctcctaaagtgctgggattacaggtgtgaaccaccgtgcctggccggtatttctgtttttataatagttgaaagtatactccaactcagttttgtttttttgttttgttctgtttttggagacaaggtctcactctgtcacccaggctggagtgtaatggcacgatgactcactgtagcctccaacacctacgctcaagtgttctgctcgcctcagcctcccaaggcatgtagaatgtagctaggactacatgcatgtgccaccatgcctggctaattttttctttaactttgtaaagatgaggtcttgccatgtaacccaggttagtttccaacttgtggtctcaagtgatcttcctgccctggccaaagtgctgggattataggggtgagccatcaggcccagccaacttctttcatttgtagtagtctctatgcaaatacatttttaataccatactcatatatgttagccaacaaatacatttaagaaccctgaaaatacttccaataattaaaagtttcaaataaagtttagcaaccactatcaccagaccatttttaccttcctttaatgatctttggtttcagccaatcattttgttcagtgagttgcaactcctggggttacatcaagagtgtgaactatttgaataaaaggagctgaaagtaggctagtttaggcacttccaagtacttgttaaaaatgtagtagaaaccgcttggctgagcaaacccagaaagagcccagctaactgagaatactcatcatgaaatacatatttgctggactcactgtgtccttgacagccatgaagcagtgacagatccagcgacgagtggtgccatcacggcatatgtaagaaaaggctctatcaaagttcctgtctggggcacagaaagaaactttctctatcgtctggtcaactatgaggtcctagaaaatacgacacacaaagaaagagaagacttatgaggttatctgagcttctcagaacacaggatgttcatttcatgatgcacaatccatacatctgatacaactaggctatggaatacctagatctgtgtccagcagtttaaatactgagaattggactcagcagacatcccaagaggcactttgcccagatacctctctcaactacatgttctaaagcatatgcttgttgattctagttttacatctctttcatggtagattccacattcaacaatatatgtaaatcagtatctttaatcctttggataaaaaaaaaatcctttgggtttatttccaaatataagcaaatacatataatagtcatgtttatgctaacttcgttacacaatgaacactacacacacatacacacagttctgcaccttgcttttttacattatatatacccgatccagtgaagttacttcagatactgtatttttcaggtgtggaatttccactcgtttctttttcttttttttttttttttttggacagtctcactctgtcacccaggctggagtgcagtggcgcgatcttggctcactgcaacctctgcctcccgggttcaagcaattctcctgcctcagcctcccaagcagctgggactacaggcgtgtgccaccacgcccggctaatttttttgtatttttagtagagacaggtttcactgtgttagccaggacggtctcaatctcctgacctcatgatccacctgccttggcctcccaaagtgctgggattacaggcacgagccaccgtgcccagccatttgtttctttttcatagtttctattctctgccaagatttctgtctcttcattcaacatgaacatatttcctttctgtcactgagtatagttataatgccttctatacactgttttcatttctgttaaggtagcagtctacttcagtgtaccattttctgtactagttgtggtgatgctataaacacaaaacaatacaatgactcaaatacaagagacatttatttcttggtcaaatagtgaaggcgggcatttaaaatctgtctgctaattccaacatctgagtcatcttgaagttaggtctttattgattgttattttgatgagaataagtcagacttgtctgttttgttgtatgctgagtaactgcattgtagtcattgtgaatgttgtatgtggaaagaatggattccgttacattccttggaagtgtcatatttttggttttatcaggtagctaatttgattatactcaaatggaaaactcttatcttttgaacagcacctcagacatcagggcgtttttgttctttttttgagactgtcttgctccgtcatccaggctggagtgcagtggcgcaatcactgctcactgtaacctcaactccagggctcaagcatcctcccgcctcagcctcccgaggagctaggactacaggtgcatgtcaccatacgtaggtaatcaaatatcagtttttatatccttagttgggctatttggagtctgccttgaatctacatggctaaaagggtcagagatttgggcagaatttatgaacagaatttgggactactcctttttggcttactcatttccaggattctctttttactttctttttttgagacagtcttgctctgtcgcccaggctgctggagtgcaatgatgcaatctcagcttactgcaacctctgcctcctaggttcaagtgactctcatgcctcagcctcccaagtagctggaaccataggcacgcaccaccatgcccagcgaattttttgtatttttaggagagacagggtttcagcatgttggccaggatggtctcaaactactggactcaagtgatccacccgccttggcctcccaaagtgctgggattacaggtgtgagccaccacgcccagcctctctttttaccttctagtggctactgttgcctcaaattctgtcttctgcactttaggaggctgaggtgggtggatcacttgaggtcaggagttcaagaccagcctggccaacatggtgaaactctgtctctactaaaaatacaaaaattcgctgggtgtggtggcggatgcctgtaatcccagctactcaggaggctgaggcaggagaattgcttgaacccaggaggcggatgttgcagtgagccgagattgcaccattgcactccagcctaggcgacagagccagactccatttaaaaaaaaaaaaaaaacacaaaaaaattctgtcttttagtttttaagaccaaaagactaagtgtttctcactgaagttagagctaccctatatggtacagactagggcctatccttaggctagaagctgtgaaatgggaaatcactcaatacaatttccttcttctaagtgtcagcttttctctagaatctatctgctttgggttattttctagtgccttcgaataattgggttattttgtttagaatttacagttgtttgctagagggtcagtccaacagacgctctatttagctattgctgcaagtgaaacacactgaagagtcattttaaaacttgtttttctaatttttttctttgtaacataaatttcatttccattcacatttccatctactagttcaattacatttccatttgcaattcatttagctcttctttttttttgatacagagtcttgctctgtcgcccaggctggagtgcagtggcgcgatctcggctcactgcaagctcagcctcccgggttcacgccattctccagcctcagcctcccaagtagctgggactacaggctcccgccaccacgcccagctaattttttgtatttttagtagagatggggtttcaccgtgttagccaggatggtctcgatctcctaacctcgtgatctgcccgcctcggcctcccaaagtgctgggattacaggtgtgagccactgcacctggccattcatttatctctttttctaagaaactaagagttactatactcaagtaggaacactaggccaagtgcagtggctcacacctgtaatcccagcactttgggacgccgaggtggaaggactgcttgagcccaggggttcgaaaccagcttgggcaacatagtgagaacccatctctaaaaaaaaaaaaaaaaaaaaaattatctcagcctaggaggctgaggctgcagtgaactatgtctgtgccactgtactccagcctgggtgacagtataaggcactgtctcaaaaaaaaaaaaaaaaaaaaaaggtaggaacactatcagaatcaagatagacatgagttgagaggtgggatagcaaggcaatctgacagagcttcttgctcaaaggttaagggcttcagatttcagcttctgtttcataaaaatttgtgcagatcatggcatggtgttatcaccaatactgatcccaacatggtattagttcccgcttatagtgaaatacaaggtgggaagatggtcccaatggtgacaagccaccaatgactactaattactactattcagtgtggaaaaaactaaactaatgaatgccagtggtgtaagtagccacaagggggcaatatcactttccaactattgtataaaacaattaaatacatagctttcaagtataacaaatttcatccaaacactaatgaaaactacacaagttccaaaaaataattaaaatgatcactgtttccaacagtaatgtactaaaagtgaagactattgcttctcttgaacttaaaaaaaagtatgcaatgtaataaggtcaaataactaaaatgcagctatattaaaccacttgaaatttaccaggcaagttgcctatcaaaactgctttttacctgccagactttctcccctttcagtggcatttgaattttttttttttaattatcttcttgttaaatttcttcctgactttaggtattctaggaaattttaattaataattaaatgtacttatataacaccctatgctttctaggggtagagctgtgtgtctattcttatttaggcatttaggatcactgtctctcaaatgcaaaatggtacctatgatttgagatattatttggattctaagtaaatgttaaccaaagagccattcactagtccttaagatgtcacttaaattgagttttgagtcaaaagccaggttaattagttcaaatatcattttcttaaaatagtgttttcttcagagcaagaagaaatttcagatgtggagtccatctttttttaattttaaaacatggtaaaaggatagtctatcatctattgtatcaaatttgtgagagtggaaacttattaaaaaatatataagaacaaaaataggccacgagcggtggctcatgcctgtaatcccagcactttgggaggccaaggcgggtggatcacttgaggtcggaagttcaagaccagcctgaccaacatggtgaaacctcatctgtaccaaaaatacaaaaattagcggggcatggtggtctgtgtttgtaatcagctacttgggaggttaaggcaggagaatcgtttgaacccaggaggtggaggttgcagtgagctgggatcgtgccactgcactccagcctgggcaacaagagtgaaactccatctcaaaaaaaaaaaaaagaactcagatcttaacactaaatgctaatgcttagtaccttagacatgctatgtcatgtagaacaatatgttgagagaatactatttctcataaagtaaatgagtaactaaagtggtttcctgaacgttaaatagtctctcaggagattgtactttggactaagtggaaggataaagcttcaacaatataatacccttcaacagcttaagggtattatatttgatcattagagattttaaaaaacatatgagcagtcccatttaagcttataagaatcttaccttaggccaggcgtggtggctcactcctgtaatcccagcactttaggaggctgccggtggatcacctgaggtcaggagttcgagatcagcctggccaacatggtgaaaccccgtatctactaataatacaaaaattagccaggcgaggccgggcgcagtggctcacacctgtaatcccagcactttgggaggccgaggtgggcggatcacctgaggtcaggagttcgagaccagcctgaccaacatggagaaaccccatttctactaaaaatacaaaattagctgggcatggtggcacatgcctgtaatcccagctactagggaggctgaggcaggagaatcgcttgaacctgggaggtggaggttgcggtgggccgagatcgtgccattgcactccagcctgggtgacaagagtgaaactccatctccaaaaaaaataaaataaatcaaaataaaaataaagaatcttaccttagttttttcatccacaactctgagtccatctgctgagacccacagaactgctttaactgctttctttccagtcttttaagagaaaccaaaaaggggagggggagatacacatatataatattaaaaaaatgtcatcttccacagaaaacactgactctgccttccaaaagtcacaagtacagatggagtccaagttcaggagtggtgcccaaacccagatactcaaaccaaactgcagaaacattcaggaaaaaacaagccaaagccattattttagaaacacaacgcaaaacaataagataaaattaagtaaaagggaagtaacagatggaataaaaaccaagatatcacattccataaagggcaaagaattc

SEQ ID NO: 23005 - DNA, 1255 bp, Homo Sapiens
aaccaacgcttccatgtctctactctgtcgtaacaaaggctgtgggcagcactttgaccctaataccaaccttcctgattcctgttgccatcaccctggggtcccaatcttccatgatgcacttaagggttggtcctgctgccgaaagcgaactgtagatttctctgagttcttaaacatcaagggctgtactatgggaccacactgtgctgagaagcttcctgaggcccctcaacctgaaggccctgctacaagcagttcacttcaggagcaaaaacctctgaatgtgattccaaagtcagcagagaccttgcgccgggagaggcccaagtcagagttgcctctgaagctgctgccgctaaatatatcccaagccctggaaatggcattggaacagaaggaattagaccaggaacctggggcaggacttgacagtctgatccggactggttccagctgccagaacccaggatgtgatgctgtttaccaaggccctgagagtgatgctactccatgtacctaccacccaggagcaccccgattccatgaggggatgaagtcttggagctgttgtggcatccagaccctggattttggggcattcttggcacaaccagggtgcagagtcggtagacatgactgggggaagcagctcccagcatcttgccgccatgattggcaccagacagattccttagtagtggtgactgtatatggccagattccacttcctgcgtttaactgggtgaaggccagtcaaactgagcttcatgtccacattgtctttgatggtaaccgtgtgttccaagcacagatgaagctctggggggtcataaacgtggagcagagctctgtcttcttgatgccatctcgggttgaaatctccctggtcaaggctgacccaggatcctgggcccagctggagcaccctgatgcactagctaagaaggctagggcaggggttgtgttagagatggatgaggaagaatctgacgattcagatgatgatctgagctggacagaggaggaggaagaggaggaagcaatgggggaatagtgacaccagacagttgatgtctagataggacctcaatgattcccttagaatcttagataccaggatattgttggccatgtggcatcattgagcagcaggaggctgaaggaggggagaacaaaattgtccaaaccatgctgtttttttcccttaaataaatcttgtattcttcagtttcaaaaaaaaaaaaaaaaaaaa

SEQ ID NO: 23006 - DNA, 12603 bp, Homo Sapiens
cgagggctcggctgggggtcgccggggtcgcgggccgggcctgcaggagccgggccgccgaggtcggggctggttgaactcatggacctgatacttttctcttgagaagcaaaccagcccaaaagaaaaatggcgtttgttgcaacacagggggccacggtggttgaccagaccactttgatgaaaaagtaccttcagtttgtggcagctctcacagatgtgaatacacctgatgaaacaaagttgaaaatgatgcaagaagttagtgaaaattttgagaatgtcacgtcatctcctcagtattctacattcctagaacatatcatccctcgattccttacatttctccaagatggagaagttcagtttcttcaggagaaaccagcacagcaactgcggaagctcgtacttgaaataattcatagaataccaaccaacgaacatcttcgtcctcacacaaaaaatgttttgtctgtgatgtttcgctttttagagacggaaaatgaagaaaatgttcttatttgtctaagaataattattgagctacacaaacagttcaggccaccgatcacacaagaaattcatcattttctggattttgtgaaacagatttacaaggagcttccaaaagtagtgaaccgctactttgagaaccctcaagtgatccccgagaacacagtgcctcccccagaaatggttggtatgataacaacgattgctgtgaaagtcaacccggagcgtgaggacagtgagactcgaacacattccatcattccgaggggatcactttctctgaaagtgttggcagaattgcccattattgttgttttaatgtatcagctctacaaactgaacatccacaatgttgttgctgagtttgtgcccttgatcatgaacaccattgccattcaggtgtctgcacaagcgaggcaacataagctttacaacaaggagttgtatgctgacttcattgctgctcagattaaaacattgtcatttttagcttacattatcaggatttaccaggagttggtgactaagtattctcagcagatggtgaaaggaatgctccagttactttcaaattgtccagcagagactgcacacctcagaaaggagcttctgattgctgccaaacacatcctcaccacagagctgagaaaccagttcattccttgcatggacaagctgtttgatgaatccatactaattggctcaggatatactgccagagagactctaaggcccctcgcctacagcacgctggccgacctcgtgcaccatgtccgccagcacctgcccctcagcgacctctccctcgccgtccagctcttcgccaagaacatcgacgatgagtccctgcccagcagcatccagaccatgtcctgcaagctcctgctgaacctggtggactgcatccgttccaagagcgagcaggagagtggcaatgggagagacgtcctgatgcggatgctggaggttttcgttctcaaattccacacaattgctcggtaccagctctctgccatttttaagaagtgtaagcctcagtcagaacttggagccgtggaagcagctctgcctggggtgcccactgcccctgcagctcctggccctgctccctccccagcccctgtccctgccccacctccacccccgcccccacccccacctgccacccctgtgaccccggcccccgtgcctcccttcgagaagcaaggagaaaaggacaaggaagacaagcagacattccaagtcacagactgtcgaagtttggtcaaaaccttggtgtgtggtgtcaagacaatcacgtggggcataacatcatgcaaagcacctggtgaagctcagttcattcccaacaagcagttacaacccaaagagacacagatttacatcaaacttgtgaaatatgcaatgcaagctttagatatttatcaggtccagatagcaggaaatggacagacatacatccgtgtggccaactgccagactgtgagaatgaaagaggagaaggaggtattggagcatttcgctggtgtgttcacaatgatgaaccccttaacgttcaaagaaatcttccaaactacggtcccttatatggtggacagaatctcaaaaaattatgctcttcagattgttgccaattccttcttggcaaatcctactacctctgctctgtttgctacgattctggtggaatatctccttgatcgcctgccagaaatgggctccaacgtggagctctccaacctgtacctcaagctgttcaagctggtctttggctctgtctccctctttgcagctgaaaatgaacaaatgctgaagcctcacttgcacaagattgtgaacagctctatggagctcgcgcagactgccaaggaaccctacaactacttcttgctgctacgggcgctgtttcgctctattggtggaggtagccacgatctcttgtatcaggagttcttgcctctccttccaaacctcctgcaagggctgaacatgcttcagagtggcctgcacaagcagcacatgaaggacctctttgtggagctgtgtctcaccgtccctgtgcggctgagctcgcttttgccgtacctgcccatgcttatggatcccttggtgtctgcactcaatgggtctcagacattggtcagccaaggcctcaggacgctggagctgtgtgtggacaacctgcagcccgacttcctctacgaccacatccagccggtgcgcgcagagctcatgcaggctctgtggcgcaccttacgcaaccctgctgacagcatctcccacgtggcctaccgtgtgctcggtaagtttggcggcagtaacaggaagatgctgaaggagtcgcagaagctgcactacgttgtgaccgaggttcagggccccagcatcactgtggagttttccgactgcaaagcttctctccagctccccatggagaaggccattgaaactgctctggactgcctgaaaagcgccaacactgagccctactaccggaggcaggcgtgggaagtgatcaaatgcttcctggtggccatgatgagcctggaggacaacaagcacgcactctaccagctcctggcacaccccaactttacagaaaagaccatccccaatgttatcatctcacatcgctacaaagcccaggacactccagcccggaagacttttgagcaggccctgacaggcgccttcatgtctgctgtcattaaggacctgcggcccagcgccctgccctttgtcgccagcttgatccgccactatacgatggtggcagtcgcccagcagtgtggccctttcttgctgccttgctaccaggtgggcagccagcccagcacagccatgtttcacagtgaagaaaatggctcgaaaggaatggatcctttggttctcattgatgcaattgctatttgtatggcatatgaagaaaaggagctttgcaaaatcggggaggtggccctagctgtgatatttgatgttgcaagtatcatcctgggctccaaggagagggcctgccagctgcccctgttttcttacatcgtggagcgcctgtgtgcatgttgttatgaacaggcgtggtatgcaaagctggggggtgtggtgtctattaagtttctcatggagcggctgcctctcacttgggttctccagaaccagcagacattcctgaaagcacttctctttgtcatgatggacttaactggagaggtttccaatggggcagtcgctatggcaaagaccacgctggagcagcttctgatgcggtgcgcaacgcctttaaaagacgaggagagagccgaagagatcgtggccgcccaggaaaagtctttccaccatgtgacacacgacttggttcgagaagtcacctctccaaactccactgtgaggaagcaggccatgcattcgctgcaggtgttggcccaggtcactgggaagagtgtcacggtgatcatggaaccccacaaagaggtcctgcaggatatggtcccccctaagaagcacctgctccgacaccagcctgccaacgcacagattggcctgatggaggggaacacgttctgtaccacgttgcagcccaggctcttcacaatggaccttaacgtggtggagcataaggtgttctacacagagctgttgaatttgtgtgaggctgaagattcagctttaacaaagctgccctgttataaaagccttccgtcactcgtacctttacgaattgcggcattaaatgcacttgctgcctgcaattaccttcctcagtccagggagaaaatcatcgctgcactcttcaaagccctgaattccaccaatagtgagctccaagaggccggagaagcctgtatgagaaagtttttagaaggtgctaccatagaagtcgatcaaatccacacacatatgcgacctttgctgatgatgctgggagattaccggagcttgacgctgaatgttgtgaatcgcctgacttcggtcacgaggctcttcccaaattccttcaatgataaattttgtgatcagatgatgcaacatctgcgcaagtggatggaagtggtggtgatcacccacaaagggggccagaggagcgacggaaacgaaagcatttccgagtgcgggagatgtcccttgtctccattctgtcagtttgaggaaatgaagatttgctcagcaattataaacctttttcatctgatcccggctgctcctcagacactggtgaagcctttgctagaggttgtcatgaaaacggagcgggcgatgctgatcgaggcggggagtccattccgagagcccctgatcaagttcctgactcgacatccctcgcagacagtggagctgttcatgatggaagccacactgaacgatccccagtggagcagaatgtttatgagttttttaaaacacaaagacgccagacctctgcgggatgtgctggctgccaaccccaacaggttcatcaccctgctgctgccggggggtgcccagacggctgtgcgccccggttcgcccagcaccagcaccatgcgcctggacctccagttccaggccatcaagatcataagcattatagtgaaaaacgatgactcctggctggccagccagcactctctggtgagccagttgcgacgtgtgtgggtgagtgagaacttccaagagaggcaccgcaaggagaacatggcagccaccaactggaaggagcccaagctgctggcctactgcctgctgaactactgcaaaaggaattacggagatatagaattgctgttccagctgctccgagcctttactggtcgttttctctgcaacatgacattcttaaaagagtatatggaggaagagattcccaaaaattacagcatcgctcagaaacgtgccctgttctttcgctttgtagacttcaacgaccccaacttcggagatgaattaaaagctaaagttctgcagcatatcttgaatcctgctttcttgtacagctttgagaagggggaaggagagcagctcttgggacctcccaatccagaaggagataacccagaaagcatcaccagtgtgtttattaccaaggtcctggaccccgagaagcaggcggacatgctggactcgctgcggatctacctgctgcagtacgccacgctgctggtggagcacgccccccaccacatccatgacaacaacaagaaccgcaacagcaagctgcgccgcctcatgaccttcgcctggccctgcctgctctccaaggcctgcgtggacccagcctgcaagtacagcggacacttgctcctggcgcacattatcgccaaattcgccatacacaagaagatcgtcctgcaggtttttcatagtctcctcaaggctcacgcaatggaagctcgagcgatcgtcagacaggcgatggccattctgaccccggcggtgccggccaggatggaggacgggcaccagatgctgacccactggacccggaagatcattgtggaggaggggcacaccgtcccgcagctggtccacattctgcacctgatagtgcaacacttcaaggtgtactacccggtacggcaccacttggtgcagcacatggtgagcgccatgcagaggctgggcttcacgcccagtgtcaccatcgagcagaggcggctggccgtggacctgtctgaagtcgtcatcaagtgggagctgcagaggatcaaggaccagcagccggattcagatatggacccaaattccagtggagaaggagtcaattctgtctcatcctccattaagagaggcctgtccgtggattctgcccaggaagtgaaacgctttaggacggccaccggagccatcagtgcagtctttgggaggagccagtcgctacctggagcagactctctcctcgccaagcccattgacaagcagcacacagacactgtggtgaacttccttatccgcgtggcctgtcaggttaatgacaacaccaacacagcggggtcccctggggaggtgctctctcgccggtgtgtgaaccttctgaagactgcgttgcggccagacatgtggcccaagtccgaactcaagctgcagtggttcgacaagctgctgatgactgtggagcagccaaaccaagtgaactatgggaatatctgcacgggcctagaagtgctgagcttcctgctaactgtcctccagtccccagccatcctcagtagcttcaaacctctgcagcgtggaattgccgcctgcatgacatgtggaaacaccaaggtgttgcgagccgtccacagccttctctcgcgcctgatgagcattttcccaacagagccgagtacttccagtgtggcctccaaatatgaagagctggagtgcctctacgcagccgtcggaaaggtcatctatgaagggctcaccaactacgagaaggccaccaatgccaatccctcccagctcttcgggacccttatgatcctcaagtctgcctgcagcaacaaccccagctacatagacaggctgatctccgtctttatgcgctccctgcagaagatggtccgggagcatttaaaccctcaggcagcgtcaggaagcaccgaagccacctcaggtacaagcgagctggtgatgctgagtctggagctggtgaagacgcgcctggcagtgatgagcatggagatgcggaagaacttcatccaggccatcctgacatccctcatcgaaaaatcaccagatgccaaaatcctccgggctgtggtcaaaatcgtggaagaatgggtcaagaataactccccaatggcagccaatcagacacctacactccgggagaagtccattttgcttgtgaagatgatgacttacatagaaaaacgctttccggaagaccttgaattaaatgcccagtttttagatcttgttaactatgtctacagggatgagaccctctctggcagcgagctgacggcgaaacttgagcctgcctttctctctgggctgcgctgtgcccagccactcatcagggcaaagtttttcgaggtttttgacaactccatgaaacgtcgtgtctacgagcgcttgctctatgtgacctgttcgcagaactgggaagccatggggaaccacttctggatcaagcagtgcattgagctgcttctggccgtgtgtgagaagagcacccccattggcaccagctgccaaggagccatgctcccgtccatcaccaacgtcatcaacctggccgatagccacgaccgtgccgccttcgccatggtcacacatgtcaagcaggagccccgggagcgggagaacagcgagtccaaagaggaggatgtagagatagacatcgaactagctcctggggatcagaccagcacgcccaaaaccaaagaactttcagaaaaggacattggaaaccagctgcacatgctaaccaacaggcacgacaagtttctggacactctccgagaggtgaagactggagcgctgctcagcgctttcgttcagctgtgccacatttccacgacgctggcagagaagacgtgggtccagcttttccccagattgtggaagatcctctctgacagacagcagcatgcactcgcgggtgagataagtccatttctgtgcagcggcagtcaccaggtgcagcgggactgccagcccagcgcgctgaactgctttgtggaagccatgtcccagtgcgtgccgccaatccccatccgaccctgcgtcctgaagtacctggggaagacacacaacctctggttccggtccacgctgatgttggagcaccaggcttttgaaaagggtctgagtcttcagattaagccgaagcaaacaacggagttttatgagcaggagagcatcaccccgccgcagcaggagatactggattcccttgcggagctttactccctgttacaagaggaagatatgtgggctggtctgtggcagaagcggtgcaagtactcggagacagcgactgcgattgcttacgagcagcacgggttctttgagcaggcacaagaatcctatgaaaaggcaatggataaagccaaaaaagaacatgagaggagtaacgcctcccctgctattttccctgaataccagctctgggaagaccactggattcgatgctccaaggaattgaaccagtgggaagccctgacggagtacggtcagtccaaaggccacatcaacccctacctcgtcctggagtgcgcctggcgggtgtccaactggactgccatgaaggaggcgctggtgcaggtggaagtgagctgtccgaaggagatggcctggaaggtgaacatgtaccgcggatacctggccatctgccaccccgaggagcagcagctcagcttcatcgagcgcctggtggagatggccagcagcctggccatccgcgagtggcggcggctgccccacgtagtgtcccacgtgcacacgcctctcctacaggcagcccagcaaatcatcgaactccaggaagctgcacaaatcaacgcaggcttacagccaaccaacctgggaaggaacaacagcctgcacgacatgaagacggtggtgaagacctggaggaaccgactgcccatcgtgtctgacgacttgtcccactggagcagcatcttcatgtggaggcagcatcattaccagggtaaaccgacctggtccggcatgcattcatcatcgattgtaactgcctatgagaatagctctcagcatgatcccagttcaaataacgctatgcttggggttcatgcatcagcttcagcgatcatccagtatggaaaaatcgcccggaaacaaggactggtcaatgtagctctggatatattaagtcggattcatactattccaactgttcctatcgtggattgcttccagaagattcgacagcaagttaaatgctacctccagctggcaggcgtcatgggcaaaaacgagtgcatgcagggccttgaagttattgaatctacaaatttaaaatacttcacaaaagagatgacagccgaattttatgcactgaagggaatgttcttggctcagatcaacaagtccgaggaggcaaacaaagccttctctgcagctgtgcagatgcacgatgtgctggtgaaagcctgggccatgtggggcgactacctggagaacatctttgtgaaggagcggcagctgcacctgggcgtgtctgccatcacctgctacctgcacgcctgccggcatcagaacgagagcaaatcgaggaaatacttagccaaggtgctgtggcttttgagttttgatgatgacaaaaacactttggcagatgccgtcgacaagtactgcattggtgtgccacccatccagtggctggcctggatcccacagctgctcacctgcctggttggctcggagggaaagctgctcttgaacctcattagccaggttggacgcgtgtatccccaagcggtctactttcccatccggaccctgtacctgaccctgaaaatagaacagcgggaacgctacaagagcgatccagggcccataagagcaacagcacccatgtggcgctgcagccgaatcatgcacatgcagcgagagctccaccccacccttctgtcttccctggaaggcatcgtcgatcagatggtctggttcagagaaaattggcatgaagaggttctcaggcagctccaacagggcctggcgaaatgttactccgtggcgtttgagaaaagtggagcggtgtccgatgctaaaatcaccccccacactctcaattttgtgaagaagttggtgagcacgtttggggtgggcctggagaatgtgtccaacgtctcgaccatgttctccagcgcagcctctgagtctctggcccggcgggcgcaggccactgcacaagaccctgtctttcagaagctgaaaggccagttcacgacggattttgacttcagcgttccaggatccatgaagcttcataatcttatttctaagttgaaaaagtggatcaaaatcttggaggccaagaccaagcaactccccaaattcttcctcatagaggaaaagtgccggttcttgagcaatttctcggcacagacagctgaagtggaaattcctggggagtttctgatgccaaagccaacgcattattacatcaagattgcacggttcatgccccgggtagagattgtgcagaagcacaacaccgcagcccggcggctgtacatccggggacacaatggcaagatctacccatacctcgtcatgaacgacgcctgcctcacagagtcacggcgagaggagcgtgtgttgcagctgctgcgtctgctgaacccctgtttggagaagagaaaggagaccaccaagaggcacttgtttttcacagtgccccgggttgtggcagtttccccacagatgcgcctcgtggaggacaacccctcttcactttcccttgtggagatctacaagcagcgctgcgccaagaagggcatcgagcatgacaaccccatctcccgttactatgaccggctggctacggtgcaggcgcggggaacccaagccagccaccaggtcctccgcgacatcctcaaggaggttcagagtaacatggtgccgcgcagcatgctcaaggagtgggcgctgcacaccttccccaatgccacggactactggacgttccggaagatgttcaccatccagctggctctgataggcttcgcggaattcgtcctgcatttaaatagactcaaccccgagatgttacagatcgctcaggacactggcaaactgaatgttgcctactttcgatttgacataaacgacgcgactggagacctggatgccaaccgtcctgtcccatttcgactcacgcccaacatttctgagtttctgaccaccatcggggtctccggcccgttgacagcgtccatgattgcggtcgcccggtgcttcgcccagccaaactttaaggtggatggcattctgaaaacggttctccgggacgagatcattgcttggcacaaaaaaacacaagaggacacgtcctctcctctctcggccgccgggcagccagagaacatggacagccagcaactggtgtccctggttcagaaagccgtcaccgccatcatgacccgcctgcacaacctcgcccagttcgaaggcggggaaagcaaggtgaacaccctggtggccgcggcaaacagcctggacaatctgtgccgcatggaccccgcctggcacccctggctgtgactgtggccaccacggccacccggaatgtgaagggcgctccgggctctgagcccgcagcttttacgacttctccctgcctcgttccttatattcacagaagccccatagtttcactgggttgcggttattttcctggtagtttgcgtgtaagaaagggagaatatagttttagaggaagctgaactatgacgatgctgggcgaagcggttggaaatggcagagctgaaacttattccaagctttcaaaataatcttttaagaagccaggattctccggtctggaatttctgagtgagtcctttttttatggtgtcctccctctgtgaatgtacaggcggaactgtacgaacagctcccttccatccatttttaactctttcggaaataacacctcacagcagcttcgtgcttttgtacagacctttgtaacaagtgtacagaaaactcattttgtttgagaaacaggagttgatgaacccatcatgctggtttttctctgagcacaaagttttaggctgtacacagccagccttgggaatctcgttgagcgttcggcgtggatccacggggccaggccaccctgcgggagcgccacacgcatccacttcggattcagtgggtgaagacagaactctgagagtctgcaggcggctcctgtgctttttatttctggctcttcggatgtcttctagacatttactatcactgcacctgaagaaaaaatcacttttaccttcctaatttaaaaagacaaaacagaaatgtacgttccttcgctagctttagtctttctgttcccatttttataaatctgagcattgataatgttctatctaaatttgtacagtgtgatttttttttttagaataaatattttataaaagggaaaaaaaa

SEQ ID NO: 23007 - DNA, 1349 bp, Homo Sapiens
cctgatcgaacagcctcacttgtgttgctgtcagtgccagtagggcaggcaggaatgcagcagagaggactcgccatcgtggccttggctgtctgtgcggccctacatgcctcagaagccatacttcccattgcctccagctgttgcacggaggtttcacatcatatttccagaaggctcctggaaagagtgaatatgtgtcgcatccagagagctgatggggattgtgacttggctgctgtcatccttcatgtcaagcgcagaagaatctgtgtcagcccgcacaaccatactgttaagcagtggatgaaagtgcaagctgccaagaaaaatggtaaaggaaatgtttgccacaggaagaaacaccatggcaagaggaacagtaacagggcacatcaggggaaacacgaaacatacggccataaaactccttattagagagtctacagataaatctacagagacaattcctcaagtggacttggccatgattggttagtctcactctgtcacacaggctggagggcagtggcgggatctcggttcaccccaacctttgcctcacgggttcaagggattctcgtgcctcagccttccaagtggctgggattgcaggtgtgcgccagtgcgcctggctggttttggtattttttgttacagacggggtttcaccgtgttggctgggctggtctcgaacttctgatctcaagtgatccatctgccttggcctcccagggtgctgggattacaggcatgagccactgcacctggcctacgtattaggctttatgtaagatgtacatagtactccatactcctttccttttcctcctattgaaactgttcctataaactttataaaattaatcagagaagaagagagggtgagaaacataaataatccaagcttgcaccacattcagcattaatcactaggtcactttgcttgctgaccccttcctcatagttgtttggctattgcttcagaattatgtggagtctgttacaagattatagttccccttaactgctctatagataacagcttgaacattatgaaatgctaagttttcccttcgagacattctttcaggtcctgcatactgatgaaactactgatgtcagctggtctgaaggaccctaccagaagctaaatcatcaaagaatgcaatttccatatcctaatgattcaatctcccttaccctgaccaatcagtggcccaaattttccagccccttgcctcccagaaccccagcccagaactcttcagagatttaagaatctcctcctacctcctgactcagcaccatgtaatcattaaactctctgctgcaaaaaaaaaaaaaaa

SEQ ID NO: 23008 - DNA, 1771 bp, Homo Sapiens
gtcagctccctcagcgtccggccgaggcgcggtgtatgctgagccgctgccgcagcggtgctccacgtcctgggccttagcttcctgctgcagacccgccggccgattctcctctgctctccacgtctcatgaagccgctggtcgtgttcgtcctcggcggccccggcgcaggcaaggggacccagtgcgcccgcatcgtcgagaaatatggctacacacacctttctgcaggagagctgcttcgtgatgaaaggaagaacccagattcacagtatggtgaacttattgaaaagtacattaaagaaggaaagattgtaccagttgagataaccatcagtttattaaagagggaaatggatcagacaatggctgccaatgctcagaagaataaattcttgattgatgggtttccaagaaatcaagacaaccttcaaggatggaacaagaccatggatgggaaggcagatgtatctttcgttctcttttttgactgtaataatgagatttgtattgaacgatgtcttgagaggggaaagagtagtggtaggagtgatgacaacagagagagcttggaaaagagaattcagacctaccttcagtcaacaaagccaattattgacttatatgaagaaatggggaaagtcaagaaaatagatgcttctaaatctgttgatgaagtttttgatgaagttgtgcagatttttgacaaggaaggctaattctaaacctgaaagcatccttgaaatcatgcttgaatattgctttgatagctgctatcatgacccctttttaaggcaattctaatctttcataactacatctcaattagtggctggaaagtacatggtaaaacaaagtaaatttttttatgttcttttttttggtcacaggagtagacagtgaattcaggtttaacttcaccttagttatggtgctcaccaaacgaagggtatcagctatttttttttaaattcaaaaagaatatcccttttatagtttgtgccttctgtgagcaaaactttttagtacgcgtatatatccctctagtaatcacaacattttaggatttagggatacccgcttcctctttttcttgcaagttttaaatttccaaccttaagtgaatttgtggaccaaatttcaaaggaactttttgtgtagtcagttcttgcacaatgtgtttggtaaacaaactcaaaatggattcttaggagcattttagtgtttattaaataactgaccatttgctgtagaaagatgagaaaacttaagctttgttttactacaacttgtacaaagttgtatgacagggcatattctttgcttccaagatttgggttgggggcactaggggttcagagcctggcagaattgtcagctttagtctgacataatctaagggtatggggcaaggatcacatctaatgcttgtgttccttatactctattatatagtgttattcatgattcagctgatcttaacaaaattcgtagcagtggaaccttgaaatgcatgtggctagatttatgctaaaatgattctcagttagcattttagtaacacttcaaaggtttttttttgtttgttttctagacttaataaaagcttaggattaattagaagaagcaatctagttaaatttcccatttgtattttattttcttgaatacttttttcatagttatttgtttaaaaagatttaaaaatcattgcactttggtcagaaaaataataaatatatcttataaaaaaaaaaaaaaaaaaaaaaa

SEQ ID NO: 23009 - DNA, 3061 bp, Homo Sapiens
cctttgcccgcttggcggccggctctacgttccctgttctcgcctgcagctccgccatggctcctaaaggcagctccaaacagcagtctgaggaggacctgctcctgcaggatttcagccgcaatctctcggccaagtcctccgcgctcttcttcggaaacgcgttcatcgtgtctgccatccccatctggttatactggcgaatatggcatatggatcttattcagtctgctgttttgtatagtgtgatgaccctagtaagcacatatttggtagcctttgcatacaagaatgtgaaatttgttctcaagcacaaagtagcacagaagagggaggatgctgtttccaaagaagtgactcgaaaactttctgaagctgataatagaaagatgtctcggaaggagaaagatgaaagaatcttgtggaagaagaatgaagttgctgattatgaagctacaacattttccatcttctataacaacactctgttcctggtcgtggtcattgttgcttccttcttcatattgaagaacttcaaccccacagtgaactacatattgtccataagtgcttcatcaggactcatcgccctcctgtctactggctccaaatagaccatgtcagcttcaccccctggctttgtgtctatgggtggcctgtggtatatggaaaagtagcagggtggtcagggtgggagacacaagatgtttttatagtctagagcctttaaaaaacccagcagaatgtaattcagtatttgtttattggctgttttttgacagattgttgaaattaaatgaattgaaagggaaactcagagtactaggacgtttattaaaaggaaaaaaatgtcttgcaatgtgctgtaatcacaagaggagaaaataacttgtttccttgatctgtcagaggtcacagtaacctgggccgagctgttattatttattatataatagtagtaggaagttaataactggttctctgtgttccaagcacaatattacaacttcttttgaaccgtaaatatcagaatgaatcctcttcccaggggattgaacagaagcttaatgtttacaagtgtttgaatttgtgatctgaaataacacaaaattaaaaacatgatttctctaattttccaactagaggagagagacttgtggaaaagttctttttttctcttttttttttcttaaagaagggcagccaaggtagtaacctaaaaatagtgcccaggcatatgagagttgtcctacgaggttaaagaacacactgttccactgtatggctttggcctgagtggccagggaggtcaacttgaccctgccatgttggtttgacttactaagacacaggaatcattgttttccttgaccagggtctcacaccctggaggaatgttaagtaagagaaagaacctctttcctgaatattgacatgtaaaagaccaaagtaatttttctgaacttctgcaattctgagaactctccaaggaatttacagtgattttagtgcttgtcagcatttttccatgaggactttcatacatttgactctttagttcacaggttcccattgattgtgagcaagatatttatctctttagcccttgggatccagctgagagcaatctcttgcatttttttacccgtgtatgtacagatatcatttcttgtgtatgccatgacttgaaaaagtttgggaagctctttagcaatatcagctaaaaggatatgaaatcacaggtgatagcagttgtcattcagtaatttcctacaagcagcaccccaaaggaaatatagtcctaatctttactatccacttctaaatttaatgtgaatttcatacatgttattagttgttttctttataattttataaaaattattcatcgggagtttaacttccacttccatgctatcggatgtgttgggctccatgcaagaacttggaagaaaaacaggcaggaatgcatttgcataatgacccagatcatcattttctgcaactgagaattatatttcatcattgcttctagaagtctgcaattctttacttttctttggtgcattattatctaggtgccatcactggataatgtggagtgactagagaagtcatatatcactgtaaggtacagttagggtaacactttagaggtttattatttttaaaaaacttttcttgaactcctggccaacatggtgaaaccccgtctctactaaaaataccaaaattagccaggcgtgatggtgggtgcctgtaatctcagctacttgggaggctgaagcaggagaactgcctgaacccaggaggcagaggttgcagtgagtcgagatcgtgctactactgcctgggtggcaagggtgagactccatctcaaaaaagaaacaaaaaaacccaaaaagttttctttactgttggttaaaaaaaaaagccagaccatagtttgactggtggcatggaatttgtgtatcaaataaatgcatttgcttatttgacaaaccatcagtgtccactatttgttaccagagttgggccactatcttttaaaattgctggtgaaaacttgccactagatggagtgctgtatagatggggaaaaaattgccaccattcttggtataatacagtgtagcttagatgaggtggtgaaataggggtatcagccgaatattcctaatatagtttctcttgaattaataaactgaagatttgtaggaaaatgagtgagcaaaatttgtttactgttgtgaatttttcctacagcactgtttttaatcttggtgttttccaactttctgtactaatagatacatttctgtgcataagattataaagcatatactcacagttcagtagttttcgttaaggatttactgtgtgagtactttactgtgaggaattgcagaaccttttcccctctactcttgtctaaaagttctgtgtggcacacagagatgcgacctactcaatctgacttagtaaaaccatgctgtagaatttttgtcttaaaaagaccacatacccagcacccatgaaataaaagattcatctgtaaaaa

SEQ ID NO: 23010 - DNA, 3630 bp, Homo Sapiens
gccagaggggctaggatgagagacagagggtgtgatggtgggtgctgggagatgtagccgaccttggggctggtggctgggggagtgggtagcctgggaaaggccaggatgtggacggactggtatggcattgagcctgaagtggtccaacttggggttccccagtgcctaggaaagttgtccccttgaatgtcagtgtgaaggtgaaggaggaagcagatgcctgttcatatggaaacaaagacctggctgtgaagaggggaggcggacaccaaagtcctgacacttgggcgggacagaattgatctgtgagagactcatctagttcataccctaggtgaccctgggggtggcatgggggtagattagagatcccagtctggtatcctctggagagtaggagtcccaggagctgaaggtttctggccactgaactttggctaaagcagaggtgtcacagctgctcaagattccctggttaaaaagtgaaagtgaaatagagggtcggggcagtgctttcccagaaggattgctcggcatcctgcccttcccagaagcagctctggtgctgaagagagcactgcctccctgtgtgactgggtgagtccatattctctctttgggtctcaattttgccttccctaatgaaggggtaagattggactaggtaagcatcttacaaccatttgtggtcatgagagctggggtggggaaggattgtcacttgacccccccagctctgtttctaagtgctgaaagagctccaggctatgctacgggaggagaagccagctactgaggaaaagccagctactgagaaaaagcgggagtggtttaccattctcctcccccacctttcaccagagaagaggacgttgtcacacataaagagccaggctcaccagctcctgacgcatgcatcatgaccatgagacacaactggacaccagacctcagccctttgtgggtcctgctcctgtgtgcccacgtcgtcactctcctggtcagagccacacctgtctcgcagaccaccacagctgccactgcctcagttagaagcacaaaggacccctgcccctcccagcccccagtgttcccagcagctaagcagtgtccagcattggaagtgacctggccagaggtggaagtgccactgaatggaacgctgagcttatcctgtgtggcctgcagccgcttccccaacttcagcatcctctactggctgggcaatggttccttcattgagcacctcccaggccgactgtgggaggggagcaccagccgggaacgtgggagcacaggtacgcagctgtgcaaggccttggtgctggagcagctgacccctgccctgcacagcaccaacttctcctgtgtgctcgtggaccctgaacaggttgtccagcgtcacgtcgtcctggcccagctctgggtgaggagcccaaggagaggcctccaggaacaggaggagctctgcttccatatgtggggaggaaagggtgggctctgccagagcagcctgtgaactaatgcccagcattcctcaaggtcagccagacaaaaaggaacttaggtcttgggcagaggaggtgtagcctggggcaaagtgatgagatgtccctcctttccttggcctgatccttgtctgccttcacttccctaggctgggctgagggcaaccttgccccccacccaagaagccctgccctccagccacagcagtccacagcagcagggttaagactcagcacagggccagcagcagcacaaccttgaccagagcttgggtcctacctgtctacctggagtgaacagtccctgactgcctgtaggctgcgtggatgcgcaacacaccccctccttctctgctttgggtcccttctctcaccaaattcaaactccattcccacctacctagaaaatcacagcctccttataatgcctcctcctcctgccattctctctccacctatccattagccttcctaacgtcctactcctcacactgctctactgctcagaaaccaccaagactgttgatgccttagccttgcactccagggccctacctgcatttcccacatgactttctggaagcctcccaactattcttgcttttcccagacagctcccactcccatgtctctgctcatttagtcccgtcttcctcaccgccccagcaggggaacgctcaagcctggttgaaatgctgcctcttcagtgaagtcatcctctttcagctctggccgcattctgcagacttcctatcttcgtgctgtatgttttttttttcccccttcactctaatggactgttccagggaagggatgggggcagcagctgcttcggatccacactgtatctgtgtcatccccacatgggtcctcataaaggattattcaatggaggcatcctgacatctgttcatttaggcttcagttccactcccaggaactttgcctgtcccacgagggagtatgggagagatggactgccacacagaagctgaagacaacacctgcttcaggggaacacaggcgcttgaaaaagaaaagagagaacagcccataatgctccccgggagcagaggccactaatggagagtgggaagagcctggaaagatgtggcctcaggaaaagggatgagagaaaggaggtggtatggaagactcagcaggaacaaggtaggcttcaaagagcctatattcctctttttcccacaccgatcaagtcaactcagtactcacgggagaaaaatagactttatttacaagtaataacatttagaaaagatccatccccggcccttaaaaaccttcccatcactccaaatcccaccccagtgcaagtctggggaaggtagggtgtgagctgctgctgaaggctgtcccccaaccccactcctgagacacagggcccatccgtcctgggaaagagcatcctctggcaggtgctcccaccaggtcagacccagtcctggacttcaagagtgagggcccctgctgggcccagccaccaggacagcaggaaccagggcctactcctcttatggtcccttctagatccagaggctaagaggaagactggccaggcccaaggacccagccatcaaaaccagcctcaaatctggttgtgatggagaagtgactttgctttaagaaaaaaggaggcaaggtagggagagcgcccacactgtccatgctccaggccccctgggccagctccgagaaggcgccagtgaaggaccagggaccaggccagggtgcgggcaggcatcactgtctctaggggtttggctactgttggcctgggagctgagagaaggcactgagagggacagtaggcggaggaccaggtgacggcagcatcggggacacaggtggggccactcactggtactggccctttagtgctttgcctgaaagagacacagtcacatggccagatgagaacttgcgatactagcctgcacccactggctgggaagatctcttcctgctcccacgcccctgtctggatcccctcccttgtgagccccagggttatcagttgctggctgtgcctgagcagctctgggtgctctccatgagaatggggccatctgtcttctctccttggagaggagctaccagg

SEQ ID NO: 23011 - DNA, 923 bp, Homo Sapiens
cggacgcgtgggcggacgcgtgggcgagccaccgccgcctgccgcgcgttccagagctgggcgctgcagctgcactgccgatcgccgtgtttggtcgatagaatccccagtgtgcccagagagtgcgacccctcgcccggcccggcgagccccgggcgtgaaccgagctgagggaggatggcagcctctggggtggagaagagcagcaagaagaagaccgagaagaaacttgctgctcgggaagaagctaaattgttggcgggtttcatgggcgtcatgaataacatgcggaaacagaaaacgttgtgtgacgtgatcctcatggtccaggaaagaaagatacctgctcatcgtgttgttcttgctgcagccagtcatttttttaacttaatgttcacaactaacatgcttgaatcaaagtcctttgaagtagaactcaaagatgctgaacctgatattattgaacaactggtggaatttgcttatactgctagaatttccgtgaatagcaacaatgttcagtctttgctggatgcagcaaaccaatatcagattgaacctgtgaagaaaatgtgtgttgattttttgaaagaacaagttgatgcttcaaattgtcttggagaagcagaaaaagttgatcagagccttccagagtgtggtatgcttttcactgtgtgatgatccttagtggcacatgaatgaacgtccagatgtttgtgcagtagcccacccttatctgcaggatacgttccaagacccccagtgaatgcctgaaactgcagatagtactgaatcctatatatactgtgttttttatgatacatacatgcctatgatgaagtttaatttctaaattagacagtaaaagattaacaacaataataataaaatagaacaactttaaaaaaaaaaaaaaaaaaaaa

SEQ ID NO: 23012 - DNA, 1405 bp, Homo Sapiens
atgtcggccctgaggcgctcgggctacggccccagtgacggtccgtcctacggccgctactacgggcctgggggtggagatgtgccggtacacccacctccacccttatatcctcttcgccctgaacctccccagcctcccatttcctggcgggtgcgcgggggcggcccggcggagaccacctggctgggagaaggcggaggaggcgatggctactatccctcgggaggcgcctggccagagcctggtcgagccggaggaagccaccaggagcagccaccatatcctagctacaattctaactattggaattctactgcgagatctagggctccttacccaagtacatatcctgtaagaccagaattgcaaggccagagtttgaattcttatacaaatggagcgtatggtccaacataccccccaggccctggggcaaatactgcctcatactcaggggcttattatgcacctggttatactcagaccagttactccacagaagttccaagtacttaccgttcatctggcaacagcccaactccagtctctcgttggatctatccccagcaggactgtcagactgaagcaccccctcttagggggcaggttccaggatatccgccttcacagaaccctggaatgaccctgccccattatccttatggagatggtaatcgtagtgttccacaatcaggaccgactgtacgaccacaagaagatgcgtgggcttctcctggtgcttatggaatgggtggccgttatccctggccttcatcagcgccctcagcaccacccggcaatctctacatgactgaaagtacttcaccatggcctagcagtggctctccccagtcacccccttcacccccagtccagcagcccaaggattcttcatacccctatagccaatcagatcaaagcatgaaccggcacaactttccttgcagtgtccatcagtacgaatcctcggggacagtgaacaatgatgattcagatcttttggattcccaagtccagtatagtgctgagcctcagctgtatggtaatgccaccagtgaccatcccaacaatcaagatcaaagtagcagtcttcctgaagaatgtgtaccttcagatgaaagtactcctccgagtattaaaaaaatcatacatgtgctggagaaggtccagtatcttgaacaagaagtagaagaatttgtaggaaaaaagacagacaaagcatactggcttctggaagaaatgctaaccaaggaacttttggaactggattcagttgaaactgggggccaggactctgtacggcaggccagaaaagaggctgtttgtaagattcaggccatactggaaaaattagaaaaaaaaggattatgaaaggatttagaacaaaggtcgacgcggccgc

SEQ ID NO: 23013 - DNA, 2644 bp, Homo Sapiens
agcggccgctgaattctagccaggatttctctcttcctatttcaggaggactctcacaggctcccacagcctgtgttaagctgaggtttcccctagatctcgtatatccccaacacatacctccacgcacacacatccccaagaacctcgagctcacaccaacagacacacgcgcgcatacacactcgctctcgcttgtccatctccctcccgggggagccggcgcgcgctcccacctttgccgcacactccggcgagccgagcccgcagcgctccaggattctgcggctcggaactcggattgcagctctgaacccccatggtggttttttaaacacttcttttccttctcttcctcgttttgattgcaccgtttccatctgggggctagaggagcaaggcagcagccttcccagccagcccttgttggcttgccatcgtccatctggcttataaaagtttgctgagcgcagtccagagggctgcgctgctcgtcccctcggctggcagaagggggtgacgctgggcagcggcgaggagcgcgccgctgcctctggcgggctttcggcttgaggggcaaggtgaagagcgcaccggccgtggggtttaccgagctggatttgtatgttgcaccatgccttcttggatcggggctgtgattcttcccctcttggggctgctgctctccctccccgccggggcggatgtgaaggctcggagctgcggagaggtccgccaggcgtacggtgccaagggattcagcctggcggacatcccctaccaggagatcgcaggggaacacttaagaatctgtcctcaggaatatacatgctgcaccacagaaatggaagacaagttaagccaacaaagcaaactcgaatttgaaaaccttgtggaagagacaagccattttgtgcgcaccacttttgtgtccaggcataagaaatttgacgaatttttccgagagctcctggagaatgcagaaaagtcactaaatgatatgtttgtacggacctatggcatgctgtacatgcagaattcagaagtcttccaggacctcttcacagagctgaaaaggtactacactgggggtaatgtgaatctggaggaaatgctcaatgacttttgggctcggctcctggaacggatgtttcagctgataaaccctcagtatcacttcagtgaagactacctggaatgtgtgagcaaatacactgaccagctcaagccatttggagacgtgccccggaaactgaagattcaggttacccgcgccttcattgctgccaggacctttgtccaggggctgactgtgggcagagaagttgcaaaccgagtttccaaggtcagcccaaccccagggtgtatccgtgccctcatgaagatgctgtactgcccatactgtcgggggcttcccactgtgaggccctgcaacaactactgtctcaacgtcatgaagggctgcttggcaaatcaggctgacctcgacacagagtggaatctgtttatagatgcaatgctcttggtggcagagcgactggaggggccattcaacattgagtcggtcatggacccgatagatgtcaagatttctgaagccattatgaacatgcaagaaaacagcatgcaggtgtctgcaaaggtctttcagggatgtggtcagcccaaacctgctccagccctcagatctgcccgctcagctcctgaaaattttaatacacgtttcaggccctacaatcctgaggaaagaccaacaactgctgcaggcacaagcttggaccggctggtcacagacataaaagagaaattgaagctctctaaaaaggtctggtcagcattaccctacactatctgcaaggacgagagcgtgacagcgggcacgtccaacgaggaggaatgctggaacgggcacagcaaagccagatacttgcctgagatcatgaatgatgggctcaccaaccagatcaataatcccgaggtggatgtggacatcactcggcctgacactttcatcagacagcagattatggctctccgtgtgatgaccaacaaactaaaaaacgcctacaatggcaatgatgtcaatttccaggacacaagtgatgaatccagtggctcagggagtggcagtgggtgcatggatgacgtgtgtcccacggagtttgagtttgtcaccacagaggcccccgcagtggatcccgaccggagagaggtggactcttctgcagcccagcgtggccactccctgctctcctggtctctcacctgcattgtcctggcactgcagagactgtgcagataatcttgggtttttggtcagatgaaactgcattttagctatctgaatggccaactcacttcttttcttacactcttggacaatggaccatgccacaaaaacttaccgttttctatgagaagagagcagtaatgcaatctgcctccctttttgttttcccaaagagtaccgggtgccagactgaactgcttcctctttccttcagctatctgtggggaccttgtttattctagagagaattcttactcaaatttttcgtaccaggagattttcttaccttcatttgcttttatgctgcagaagtaaaggaatctcacgttgtgagggtttttttttttctcattt

SEQ ID NO: 23014 - DNA, 2872 bp, Homo Sapiens
tggaggtgtggctgcccgaggcggtagagcggagaaagcctattttcttttcgtttagatacattgccttttgcctaggctggcgtcgagacttgaggccgttgcagactttggcgcggctcgcgcctcctgcttcaagagcccagcggtgagagctggcctgcggcacgcggcctaatgccagacagtaacagtttggaggatcaagatgttgaccaacttgaggatatttgcaatgagtcatcagacaatacccagtgtgtatattaataatatatgctgctataaaataagagcaagtttaaaaagattaaagccacatgtgccgcttggaagaaattgcagttctctaccaggcttaataggaaatgatatcaaatcccttcattccatcatcaatcctcccatagctaaaatccgtaatattggaattatggctcatattgatgcaggcaaaactaccaccacagaaagaatattgtactattccggatatacaagatcactgggagatgttgatgatggagacacagtgacagatttcatggcccaagagcgagaaagaggcattactattcaatcagctgctgttacatttgattggaaaggttatagagtcaatctaattgatacaccaggtcatgtggactttaccttggaggttgagcggtgcctaagagtgttggatggtgcagtggctgtatttgatgcctctgctggtgtagaggcccagactctcacagtatggaggcaagctgataaacacaatatacctcgaatctgttttttaaacaagatggacaaaactggagcaagctttaagtatgcagttgaaagcatcagagagaagttaaaggcaaagcctttgcttttacagttaccaattggtgaagccaaaactttcaaaggagtggtggatgtagtaatgaaagaaaaacttctttggaattgcaattcaaatgatggaaaagactttgagagaaagcccctcttggaaatgaatgatcctgaattgctgaaggaaacaactgaagcaaggaatgccttaattgaacaagttgcagatttggatgatgaatttgctgacttggttttagaagaatttagtgagaattttgatttgttaccagctgaaaagctacagactgcaatacatagagtgacactagctcagacagcagtgcctgtgctttgtggaagtgccctgaaaaacaaagggatacagcccttgttagatgctgttactatgtacttaccttcacctgaagagcgtaactatgaatttctggagagaataagtcgtctgcttttgccgtttgctgaccaacatgtagaaatcccttcattgactgctggtaacattgctttgactgttgggcttaaacatactgccactggagacaccattgtctcatccaagtccagtgcattagctgcagctcgtagagccgaacgggagggagaaaagaagcacagacaaaacaatgaagcagagagacttttattggctggagtggagattccagaacctgttttcttctgtaccatagaacccccatcactgtctaagcagccagatttggaacatgcgttgaaatgtcttcagcgtgaagatcccagtttgaaagtgaggctagatcctgactctggacaaactgttctgtgtggtatgggggagttacatatagagattattcatgatcgaatcaagagggaatatggactggagacctatctcgggcctctccaggtggcatatcgagagaccatcctaaactcagttcgtgccacagataccttagatagaactttaggagacaaaaggcatcttgtgactgtagaagtggaagcaaggccaattgaaacatcatctgttatgcctgtgattgagtttgagtatgctgaaagtatcaatgaaggccttttgaaggtctcccaagaggccattgaaaatggaattcacagcgcatgtctccaaggaccattgcttggatccccaattcaggatgtagcaattactttacattccctgacaattcatcctggcacctccacaactatgatttctgcctgtgtctcaagatgcgtgcaaaaggctctgaagaaagctgataagcaagttttggagcctctgatgaatcttgaggttacagtagctagagattatctcagccctgtcctggcagatctggcacaaagaagaggaaacattcaggaaattcagactcgccaggacaacaaagttgttattggatttgttcccttagcagaaattatgggttattcaactgtgcttcgaacgctaacatcaggctcagctacttttgccttagaactatctacttatcaagccatgaatcctcaagatcaaaatacactgctcaaccggagaagtggtttgacctaaatgttttagtttttggagagaaattcaggagcacctagctacttcattttcagtaagaacaatttttattgctttatttattggacgaataaagtactgtttcagtacattcagagaactagataaaagatataacttaagctttgatagtggcactggagccacccgttttaatttatataatgagaaatgtgctttgatgtttaaagccactgtacctgaatcatgctgttcatctatgaagttattactataagtagccttcagaagagtggtatcacaaagttgtgtttcttttgtgtccttaagcttgtctcacaagaaagatgccaggcctctaaatgtaataagatagagggtcaaaggttcaatcaataaaaatattttattcaaaaaagtctaatatcttattttacatgatttcaaaataaagttgattgtagtacaaaaaaaaaaaaaaaaaaa

SEQ ID NO: 23015 - DNA, 3115 bp, Homo Sapiens
  misc_feature (10)..(10): n is a, c, g, or t
cgcttttttnttttttttttttttttttgagacggagtcttgcactgttgcccaggctggagacagtggtgtgatcttggctcactgcagtctccacctctcaaattcaagtgattctcctgcctcagcctcccaagtagctgggattataggtgcccgccaccctgcctggctaatttttgtatttttagtaaagatggggttttgtaacattggccaggctggtctcaaactcctgacctcaactgaactgcccccatcgggcttccaaagtgttgggattagaggtctgagctactgggcccgggcaaacttggaaacatttttttccttcctagtgcctcagttttctcaaatgtaaaatgggaataaaatatctaccttgtaagacttttgtgagggtctaataactgttatatacattatctcatttaatcttcacaacaacctttaaaatagggatacgatcattctcaatttacagttgagtgaaagtgaggcagttcagatggcttgactaaggttacctggcatttgagtggcagagccaagatttaaacccagctctgtctgatgctagaccctttgcttcaaccatattctgtaatgtctcatttctaggaatgaatgaaggaatgttcacacatgtatcatccagcctctgaggtgcctctgacaaccataattgcctcctcatgaaaccgagcccagttcctcctgtggctcttcctgctgcagccgtgggccttgctctcctggctggaagcgctgttttcatcttatctggggattctcattgctgacggtgctggaggctgtggggcacagtggtttcaagcacaggctttggagtcaggcaaacctgggtttcaatatggctcaggaagctgttgggcaggaggacttttggtgagcaggcactgtctgataatggtgtttcccaggatcccaggtttcttgggggcacacaagtaggccaaagatgatctgggaacctcccagagaattgcctcatactgtactctccccaagaggctgcagccaagagaataggggccacgtcacgggggctcatgatggagtctgggctttgtgggaaaggaagtggggagggtctcagaaatgtttttacaatgtaaaatcttccagttagaactttatatgcaggatttaatcagaaggaaatttggacaggactcatttttctcattgctgctctaagtggctgctctaagcagtctggactgtctcccctgtggctttgttgagttcagtaaacatttattgtgcacatactgtgtgcaggcactttgctggggatacagggatgaaatagggacagtgcccatgcctgagggcattgccctgaagctggatgctaaggccatctgtgtgtgtgtctgtgtgtctgcatgtatctctgtgtctgcgtgtgtctctgtgtctgtgcttctgtgtctatgtgtatgtctgtgtgagtgtctgtgggtctctttttttgtgtttgtgtgtgtatctgtgtgtgtgttctctgtgtgcctgtatgtgtctttgatgtgtgtttctgtatgtgtctctgtgtgtgtctatatgtgtgtatctgtgtctatgtatgtgtgtgtcattttgtttgtttctgggtgtgtctacctctgcgtgtctctgtatacctgtatctccgtgtgtgtgtctgtgtgtgtgtatttgtgtgtctctgtatgtgcgtccgtgggtgtgtgtctgtgtgtgtgtgtgtgtgtattgagagggagggagaaagaaagggagcgacagatgggtcagcatggaaggtgtatcctcattcacagccctgggaggaatcagtcaatccacctactggtcaagaccaactctggtggtgcctggctgacagtgggaatgtgacttttcatttaagaatgggtttgcatttcctaggaaaagaatgtaggagttggagtctcaaggagtgttttttttttccttttgtgattgagagagcacagccttgtgtgcattggctgacagttaccaatctgcgtgttggggatagccacagagaagagacagagggaaccgcagacagtgagcaggagtctggtggaaccagtctgcctttaggcccaaacccccaactatgaatacctcaccttagggagctcagtcttttgtttgttcataaaaaaccaatctgggaaccagaggtggacaggaaagaggaggctgacctgctgctcccaggttaatgtgatcttggctggtgttgacaagtgtattatggttcatagcatagcacaaacccttagagattccccttgccctcaccggggtcaccacaccaaaccaggtatcttcaggagtgaggaccacaaaaaattggagatctcaccagggtgggcagagatttctttgttaaagtctgaaggagagaagactcaggggcatctctctggctccaaatctctgaagggccaaaggcagaagtgctgggggagtgtcaagttttcatttacaacagggacagcctgacagtggctgccttatgtggcagtgagtttcagtcaacagtcaacagaggcccaacgactactcaccaatgggaccaggtggccatagagggctggggagggcagagcaaggacaaccccaccaccacccagtatgccagcctcatgcacagcttcatcctgaaggcacggagcaccgtgcgtgacatcgacccccagaacgatctcaccttccttcgaattcgctccaagaaaaatgaaattatggttgcaccagataaagactatttcctgattgtgattcagaatccaaccgaataagccactctcttggctccctgtgtcattccttaatttaatgccccccaagaatgttaatgtcaatcatgtcagtggactagcacatggcagtcgcttggaacccactcacaccaatccagtgaccgtgtgtgggctggcggctcttctcccccaccaacggaacccctgtgtgcaccaacctatcacctagcagataaaactatggggaaaacttaaatctgtgcatacatttctggatgcatttacttatcttcaaaaaaaaaaaaaaaaaaaaaaaaaaaaaaaaa

SEQ ID NO: 23016 - DNA, 2011 bp, Homo Sapiens
tacctgtgcggccctcaacgtctccttggtgcgggacccgttcactttcggctcccggagtctccctccactgctcagacctctggacctgacaggagacgcctacttggctctgacgcggcgccccagcccggcatgtgtccccggcgccccggaccaccctccctgccggctttgggtgcgttgtggggtcccgaggattcgcgagatttgttgaaagacattcaagattacgaagtttagatgaccaaaatggatatccgaggtgctgtggatgctgctgtccccaccaatattattgctgccaaggctgcagaagttcgtgcaaacaaagtcaactggcaatcctatcttcagggacagatgatttctgctgaagattgtgagtttattcagaggtttgaaatgaaacgaagccctgaagagaagcaagagatgcttcaaactgaaggcagccagtgtgctaaaacatttataaatctgatgactcatatctgcaaagaacagaccgttcagtatatactaactatggtggatgatatgctgcaggaaaatcatcagcgtgttagcattttctttgactatgcaagatgtagcaagaacactgcgtggccctactttctgccaatgttgaatcgccaggatcccttcactgttcatatggcagcaagaattattgccaagttagcagcttggggaaaagaactgatggaaggcagtgacttaaattactatttcaattggataaaaactcagctgagttcacagaaactgcgtggtagcggtgttgctgttgaaacaggaacagtctcttcaagtgatagttcgcagtatgtgcagtgcgtggccgggtgtttgcagctgatgctccgggtcaatgagtaccgctttgcttgggtggaagcagatggggtaaattgcataatgggagtgttgagtaacaagtgtggctttcagctccagtatcaaatgattttttcaatatggctcctggcattcagtcctcaaatgtgtgaacacctgcggcgctataatatcattccagttctgtctgatatccttcaggagtctgtcaaagagaaagtaacaagaatcattcttgcagcatttcgtaactttttagaaaaatcaactgaaagagaaactcgccaagaatatgccctggctatgattcagtgcaaagttctgaaacagttggagaacttggaacagcagaagtacgatgatgaagatatcagcgaagatatcaaatttcttttggaaaaacttggagagagtgtccaggaccttagttcatttgatgaatacagttcagaacttaaatctggaaggttggaatggagtcctgtgcacaaatctgagaaattttggagagagaatgctgtgaggttaaatgagaagaattatgaactcttgaaaatcttgacaaaacttttggaagtgtcagatgatccccaagtcttagctgttgctgctcacgatgttggagaatatgtgcggcattatccacgaggcaaacgggtcatcgagcagctcggtgggaagcagctggtcatgaaccacatgcatcatgaagaccagcaggtccgctataatgctctgctggccgtgcagaagctcatggtgcacaactgggaataccttggcaagcagctccagtccgagcagccccagaccgctgccgcccgaagctaagcctcgcctctggccttcccctccgcctcaatgcagaaccagtagtgggagcactgtgtttagagttaagagtgaacactgtttgattttacttggaatttcctctgttatatagcttttcccaatgctaatttccaaacaacaacaacaaaataacatgtttgcctgttaagttgtataaaagtaggtgattctgtatttaaagaaaatattactgttacatatactgcttgcaatttctgtatttattgttctctggaaataaatatagttattaaaggattctcactccaaaaaaaaaaaaaaaaaaaaaaaa

SEQ ID NO: 23017 - DNA, 650 bp, Homo Sapiens
gcggccgcgtcgactacggctgcgagaagacgacagaaggggagcgaggcaagatggagttagtgcaggtcctgaaacgcgggctgcagcagatcaccggccacggcggtctccgaggctatctacgggtttttttcaggacaaatgatgcgaaggttggtacattagtgggggaagacaaatatggaaacaaatactatgaagacaacaagcaattttttggccgtcaccgatgggttgtatatactactgaaatgaatggcaaaaacacattctgggatgtggatggaagcatggtgcctcctgaatggcatcgttggcttcacagtatgactgatgatcctccaacaacaaaaccacttactgctcgtaaattcatttggacgaaccataaattcaacgtgactggcaccccagaacaatatgtaccttattctaccactagaaagaagattcaggagtggatcccaccttcaacaccttacaagtaaagacaatgaagaacagttgaaacatgcaaaatatggagcttttcatgtaattactcttttactggttaccattcactataattcacaattaaaattgtgtgactaaaaaaaaaaaaaaaaaaaaaaaaaaaaaaaaaaaaaaaaaaaaaaaaaaaaaaa

SEQ ID NO: 23018 - DNA, 1902 bp, Homo Sapiens
ctcccgtcccgcggtggttgctgctgctgccgctgctgctgggcctgaacgcaggagctgtcattgactggcccacagaggagggcaaggaagtatgggattatgtgacggtccgcaaggatgcctacatgttctggtggctctattatgccaccaactcctgcaagaacttctcagaactgcccctggtcatgtggcttcagggcggtccaggcggttctagcactggatttggaaactttgaggaaattgggccccttgacagtgatctcaaaccacggaaaaccacctggctccaggctgccagtctcctatttgtggataatcccgtgggcactgggttcagttatgtgaatggtagtggtgcctatgccaaggacctggctatggtggcttcagacatgatggttctcctgaagaccttcttcagttgccacaaagaattccagacagttccattctacattttctcagagtcctatggaggaaaaatggcagctggcattggtctagagctttataaggccattcagcgagggaccatcaagtgcaactttgcgggggttgccttgggtgattcctggatctcccctgttgattcggtgctctcctggggaccttacctgtacagcatgtctcttctcgaagacaaaggtctggcagaggtgtctaaggttgcagagcaagtactgaatgccgtaaataaggggctctacagagaggccacagagctgtgggggaaagcagaaatgatcattgaacagaacacagatggggtgaacttctataacatcttaactaaaagcactcccacgtctacaatggagtcgagtctagaattcacacagagccacctagtttgtctttgtcagcgccacgtgagacacctacaacgagatgccttaagccagctcatgaatggccccatcagaaagaagctcaaaattattcctgaggatcaatcctggggaggccaggctaccaacgtctttgtgaacatggaggaggacttcatgaagccagtcattagcattgtggacgagttgctggaggcagggatcaacgtgacggtgtataatggacagctggatctcatcgtagataccatgggtcaggaggcctgggtgcggaaactgaagtggccagaactgcctaaattcagtcagctgaagtggaaggccctgtacagtgaccctaaatctttggaaacatctgcttttgtcaagtcctacaagaaccttgctttctactggattctgaaagctggtcatatggttccttctgaccaaggggacatggctctgaagatgatgagactggtgactcagcaagaataggatggatggggctggagatgagctggtttggccttggggcacagagctgagctgaggccgctgaagctgtaggaagcgccattcttccctgtatctaactggggctgtgatcaagaaggttctgaccagcttctgcagaggataaaatcattgtctctggaggcaatttggaaattatttctgcttcttaaaaaaacctaagattttttaaaaaattgatttgttttgatcaaaataaaggatgataatagatattattttttcttatgacagaagcaaatgatgtgatttatagaaaaactgggaaatacaggtacccaaagagtaaatcaacatctgtatacccccttcccaggggtaagcactgttaccaatttagcatatgtccttgcagaatttttttttctatatatacatatatattttttaccaaaatgaatcattactctatgtggtttactattggtttgacatatcagtatatctgaaacaccttttcatgtcaataaatgtcttctctacatttttaaatggctgtggagcatctaaaaaaaaaaaaaaaaaa

SEQ ID NO: 23019 - DNA, 2128 bp, Homo Sapiens
ggcaagatggcggcgcggacagcgttcggtgctgtgtgccggcgcctctggcagggattggggaatttttctgtaaacacttctaagggcaatacagccaaaaatggtggcttgcttctcagtaccaatatgaagtgggtacagttttcaaacctacacgttgatgttccaaaggatttgaccaaacctgtggtaacaatctctgatgaaccagacatattatataagcgcctctcggttttggtgaaaggtcacgataaggctgtattggacagttatgaatattttgctgtgcttgctgctaaagaacttggtatctctattaaagtacatgaacctccaaggaaaatagagcgatttactcttctccaatcagtgcatatttacaagaagcacagagttcagtatgaaatgagaacactttacagatgtttagagttagaacatctaactggaagcacagcagatgtctacttggaatatattcagcgaaacttacctgaaggggttgccatggaagtaacaaagacacaattagaacagttaccagaacacatcaaggagccaatctgggaaacactatcagaagaaaaagaagaaagcaagtcataaagcctcagggaggccatttttgcctaaatttgaaatgagggtgggccagatgagtatgtttaagtggagagtgcttccagctgagatgatttgagtctgtcctaactgctccattgagttctcgtgccctcatcagctgagggcagggaatggaactttaatggaagaaccacttttatctattctttttattcattgtttcagttctgatttcagcaaacatgagcaaaccactttgactgaaagcagaaagagtgaaaattctattttgttacgctactggtgttcaattattagtttgtaccatttttaatttatgtcagttgatgcatctgaaaataagtgcttggagtgttcgtacccttatttttttttaagattcctagaaggaatctttggttaattcagattgagcagttaaagtttttgctatttacctttgtgcaggctggcatatgctaatttgggggtggtaaccaaccgattttatctcatgtaagcattacattttgaagactgaatatacttcacagcagatcaaacacatttatggcatgcactgacctcttcttggagcccagaactttatagagttgcctaccagggttactgtaatggaatttatgatcttaagaaattactagttgtattatttatcctatgattcattcattcaataagcttttactgcataaactttacatccagcactgtagttaagtacccaaaattgaatagaaataatggcttttgaaaattgcacaaagcaggccaggcacggtggctcacgcctgtaatcccagcactttgggaggccgaggcaggcggatcacgaggtcaagagatccagaccatcctggctaacacggtgaaaccccgtctctaataaaaatacaaaaattagctggacatggtggcacgtgcctgtaatcccagctactcaggaggctgaggcaggagaatcgcgtgaacccgggcccggtggaggctgcagtgagacgagatcgcgccactgcactccagcctggcgacagagcgagacaccgtctcaaaaaaaaaaaaaagaaaattgtgcaaagcataggtaaatatttttctttattaagcttctcactgagaagccctctttattttggtaaatgtcactctgtttgttaggagatgtctgcttttccatgaaatgaaatagtggctaaagccctgaaagaggcaagactacaatgggctgaaacagttggtatagcaaccccagagaagtgcttcattttctttttatagtagaagcaggtccatgtcttttgtggtttcctgcacatctttggagtagttatgacttctcagtttttccccccttaaactgcattgcctattcttttttcctgacatgctatcaggtatcagtgtgttgaatacataatgcttgtgtatcagacttacgttactgtcatcaccattaaaagaattgcagccttgtgccccatgaccttcaaaaaaaaaaaaaaaaaaaaaaaaaaaa

SEQ ID NO: 23020 - DNA, 3466 bp, Homo Sapiens
ctagatcacagtcaagcaggtagagtgccgtggaagcctctggcgctgccgtcatgccgttcccatttggaaagtctcacaaatctccagcagacattgtgaagaatctgaaggagagcatggctgttctggaaaagcaagacatttctgataaaaaagcagaaaaggctacagaagaagtttccaaaaatctggttgccatgaaagaaattctgtatggcacaaatgaaaaagagcctcagacagaagcagtagctcaacttgctcaagaactctataatagtgggctccttagcaccctggtagctgatttacagctcattgactttgagggcaaaaaagacgtggctcaaattttcaacaatattctcagaagacaaattggtacgagaactcctactgttgaatacatctgcacccaacagaatattttgttcatgttattgaaagggtatgaatctccagaaatagctctaaattgtggaataatgttaagagaatgcatcagacatgaaccacttgcaaaaatcattttgtggtcggaacagttttatgatttcttcagatatgtcgaaatgtcaacatttgacatagcttcagatgcatttgccacattcaaggatttacttacaagacataaattgctcagtgcagaatttttggaacagcattatgatagatttttcagtgaatatgagaagttacttcattcagaaaattatgtgacaaaaagacagtcactgaagcttctcggtgaactactactagatagacacaacttcacaattatgacaaaatacatcagtaaacctgagaacctcaaattaatgatgaacctgctgcgagacaaaagtcgcaacatccagtttgaggcctttcacgtttttaaggtgtttgtagccaatcctaacaagacgcagcccatcctagacatcctcctcaagaaccaggccaaactcatagagttcctcagcaagtttcagaacgacaggacggaggatgagcagtttaacgacgagaagacctatttagttaaacagatcagggatttgaagagaccagctcagcaagaagcttaatctccaataaacatctatgttaaatccaaattcagcatttgctgttagctattcagcatcaggcactcttattgattcatgaggaacattactgctaatctgctgttaagtgaacggtttttcattttacccttttgtttttcagtccaggttggagatcgtagctgctgctgcttgcacactagggcacatgtgggctttctcttgatctttgtgtcatttcagaattcaaagactgtgctacgggagtactgaacatggctgggttcatgaaggcaaatgtatggatgagagtatggtttaggaaagagggcactgatatcagattagacctatgtgtttgcacccatctttgttggcgatctgagtgcagtgtggcaagtgcacacctggcatccctgcgtcagatcgcgcaccttcaggtcgcgcaccttcgctgaaggaagatgacgcagagctttatctgaaatcagaggggagctatccaaaatgggagtttgggggcagctaaagttgacatgcgaataaattgatactgaaacttagcaacttcttaaaagtgtaaagaagcctcataagatcataaggaaaatgtatatatgcttttcacagctttctagaattttttgacatttgattttcttgagacttgtaaacctggatatgttgaagggtatttgttaattttacttttcaaagatactttaaaacagtagagctagcaatgacaccttgcatttcatttcaacactgcttcaaggtttcttttgtatataattcttagaatgctcatttcttttaaatggtttaatttgtacagcagaggaatgttattgtagtagtatgtaactattacctaatactgagtttttgcaaaaaacaatgaatgctcatatgtaattgaaatacttcagatcacatgaaaatgctgatttaacatttaagtatcacagcattaaaagaaaaagaaagtaaaccagtcctttgtattcagttacctaatggggtgccatcaataagctgcgatacagccctggagctcagtcagccacaccttcctgcatcctattggccttattcattttaaatgagttaatgaatctgccagatctgtgaatgatagagattatgctaaattaatgctgattctttgtgtgtgtgggaaatctctgtagagcaccttttctttcttagactaagtaacccagtacaatagtgtgaactgaataattaaaactttggcttctcttaggaaaagacgacttcctagtcataggtgtcctatggggaaatttattttttttaatgtcctgttccttaatgctgcaaattatcagtatttataaagtaactgattttgcaccacttttttgttactgtgaccacggcagaacaatgtcttctagactatatctatgtaaagttattagaatggtatctgttcattttagtgatatgaagatcacaactaacaactgacaaatcagagtttgccagttcaaattcagcatggctgcagctgattaagaaattgatatgattattctttgctagcctctcttactaatggaattatatactggccagtaaaatgggcctcccaattgctgtttcagcaggttttaaaccttcaggaacaccagttaggaaaatagctccagaaaatatagatatattttatttttattaaaatggcagtctacatcataattggcatttctcaagactgtctttaccagaatctgtgtgaaataaggcaatctagtctccttgaaaaaaaaatctcttggatgtttaggaaggaagacttggccgtgatgtggtgtcctggctttgtggtgtagtgctgtgtgtatggagttagtgtaaaaacatggattacaccaagtggaagaaacgtcttcttgccaagctcattcttagaacttacacatctagaacagcttccactttggcagtgaggtcgtagccttttaggtggaagaagtgagggtgcagcgtgtcagacacaacattcatgttactcttacattggaatctgaaggtagttcagacttcgtgggttttgtttttaagcaaaacaatgtgaaaacatttaagtttgaaatgttgcatttgaagttatgatcatttaatatattcatattaccaagactattatactggaagtggtttttgtgttataaaggtttaattttacataaggcagttacttaatgtgatttttaacccttaaaaaagtggagatgtatacatttgttaacaatgccatgaaagcattttctttctcctaaggaaaagtgaatttcttatcagaatatctggctggccctgtaatttaaattaaaataaaattttggagaaacagcaaaaaaaaaaaaaaaaaa

SEQ ID NO: 23021 - DNA, 4390 bp, Homo Sapiens
ctctagctctcagcggctgcgaagtctgtaaacctggtggccaagtgattgtaagtcaggagactttccttcggtttctgcctttgatggcaatttccttcggtttctgcctttgatggcaagaggtggagattgtggcggcgattacagagaacgtctgggaagacaagttgctgtttttatgggaatcgcaggcttggaagagacagaagcaattccagaaataaattggaaattgaagatttaaacaatgttgttttaaaatattctaacttcaaagaatgatgccagaaacttaaaaaggggctgcgcagagtagcaggggccctggagggcgcggcctgaatcctgattgcccttctgctgagaggacacacgcagctgaagatgaatttgggaaaagtagccgcttgctactttaactatggaagagcagggccacagtgagatggaaataatcccatcagagtctcacccccacattcaattactgaaaagcaatcgggaacttctggtcactcacatccgcaatactcagtgtctggtggacaacttgctgaagaatgactacttctcggccgaagatgcggagattgtgtgtgcctgccccacccagcctgacaaggtccgcaaaattctggacctggtacagagcaagggcgaggaggtgtccgagttcttcctctacttgctccagcaactcgcagatgcctacgtggacctcaggccttggctgctggagatcggcttctccccttccctgctcactcagagcaaagtcgtggtcaacactgacccagtgagcaggtatacccagcagctgcgacaccatctgggccgtgactccaagttcgtgctgtgctatgcccagaaggaggagctgctgctggaggagatctacatggacaccatcatggagctggttggcttcagcaatgagagcctgggcagcctgaacagcctggcctgcctcctggaccacaccaccggcatcctcaatgagcagggtgagaccatcttcatcctgggtgatgctggggtgggcaagtccatgctgctacagcggctgcagagcctctgggccacgggccggctagacgcaggggtcaaattcttcttccactttcgctgccgcatgttcagctgcttcaaggaaagtgacaggctgtgtctgcaggacctgctcttcaagcactactgctacccagagcgggaccccgaggaggtgtttgccttcctgctgcgcttcccccacgtggccctcttcaccttcgatggcctggacgagctgcactcggacttggacctgagccgcgtgcctgacagctcctgcccctgggagcctgcccaccccctggtcttgctggccaacctgctcagtgggaagctgctcaagggggctagcaagctgctcacagcccgcacaggcatcgaggtcccgcgccagttcctgcggaagaaggtgcttctccggggcttctcccccagccacctgcgcgcctatgccaggaggatgttccccgagcgggccctgcaggaccgcctgctgagccagctggaggccaaccccaacctctgcagcctgtgctctgtgcccctcttctgctggatcatcttccggtgcttccagcacttccgtgctgcctttgaaggctcaccacagctgcccgactgcacgatgaccctgacagatgtcttcctcctggtcactgaggtccatctgaacaggatgcagcccagcagcctggtgcagcggaacacacgcagcccagtggagaccctccacgccggccgggacactctgtgctcgctggggcaggtggcccaccggggcatggagaagagcctctttgtcttcacccaggaggaggtgcaggcctccgggctgcaggagagagacatgcagctgggcttcctgcgggctttgccggagctgggccccgggggtgaccagcagtcctatgagtttttccacctcaccctccaggccttctttacagccttcttcctcgtgctggacgacagggtgggcactcaggagctgctcaggttcttccaggagtggatgccccctgcgggggcagcgaccacgtcctgctatcctcccttcctcccgttccagtgcctgcagggcagtggtccggcgcgggaagacctcttcaagaacaaggatcacttccagttcaccaacctcttcctgtgcgggctgttgtccaaagccaaacagaaactcctgcggcatctggtgcccgcggcagccctgaggagaaagcgcaaggccctgtgggcacacctgttttccagcctgcggggctacctgaagagcctgccccgcgttcaggtcgaaagcttcaaccaggtgcaggccatgcccacgttcatctggatgctgcgctgcatctacgagacacagagccagaaggtggggcagctggcggccaggggcatctgcgccaactacctcaagctgacctactgcaacgcctgctcggccgactgcagcgccctctccttcgtcctgcatcacttccccaagcggctggccctagacctagacaacaacaatctcaacgactacggcgtgcgggagctgcagccctgcttcagccgcctcactgttctcagactcagcgtaaaccagatcactgacggtggggtaaaggtgctaagcgaagagctgaccaaatacaaaattgtgacctatttgggtttatacaacaaccagatcaccgatgtcggagccaggtacgtcaccaaaatcctggatgaatgcaaaggcctcacgcatcttaaactgggaaaaaacaaaataacaagtgaaggagggaagtatctcgccctggctgtgaagaacagcaaatcaatctctgaggttgggatgtggggcaatcaagttggggatgaaggagcaaaagccttcgcagaggctctgcggaaccaccccagcttgaccaccctgagtcttgcgtccaacggcatctccacagaaggaggaaagagccttgcgagggccctgcagcagaacacgtctctagaaatactgtggctgacccaaaatgaactcaacgatgaagtggcagagagtttggcagaaatgttgaaagtcaaccagacgttaaagcatttatggcttatccagaatcagatcacagctaaggggactgcccagctggcagatgcgttacagagcaacactggcataacagagatttgcctaaatggaaacctgataaaaccagaggaggccaaagtctatgaagatgagaagcggattatctgtttctgagaggatgctttcctgttcatggggtttttgccctggagcctcagcagcaaatgccactctgggcagtcttttgtgtcagtgtcttaaaggggcctgcgcaggcgggactatcaggagtccactgcctccatgatgcaagccagcttcctgtgcagaaggtctggtcggcaaactccctaagtacccgctacaattctgcagaaaaagaatgtgtcttgcgagctgttgtagttacagtaaatacactgtgaagagactttattgcctattataattatttttatctgaagctagaggaataaagctgtgagcaaacagaggaggccagcctcacctcattccaacacctgccatagggaccaacgggagcgagttggtcaccgctcttttcattgaagagttgaggatgtggcacaaagttggtgccaagcttcttgaataaaacgtgtttgatggattagtattatacctgaaatattttcttccttctcagcactttcccatgtattgatactggtcccacttcacagctggagacaccggagtatgtgcagtgtgggatttgactcctccaaggttttgtggaaagttaatgtcaaggaaaggatgcaccacgggcttttaattttaatcctggagtctcactgtctgctggcaaagatagagaatgccctcagctcttagctggtctaagaatgacgatgccttcaaaatgctgcttccactcagggcttctcctctgctaggctaccctcctctagaaggctgagtaccatgggctacagtgtctggccttgggaagaagtgattctgtccctccaaagaaatagggcatggcttgcccctgtggccctggcatccaaatggctgcttttgtctcccttacctcgtgaagaggggaagtctcttcctgcctcccaagcagctgaagggtgactaaacgggcgccaagactcaggggatcggctgggaactgggccagcagagcatgttggacaccccccaccatggtgggcttgtggtggctgctccatgagggtgggggtgatactactagatcacttgtcctcttgcccgctcatttgttaataaaatactgaaaac

SEQ ID NO: 23022 - DNA, 2382 bp, Homo Sapiens
gtagcagcaccgtgcgtgcgtgcgcagatgtgggccccgcgggagcagctactgggctgggctgcggaagctctgcctgccaaggattctgcctggccctgggaagagaagcctagatatctggttccagtggcagatggggcactggccagaggggttaggaggatttggactctccttgggagtcgctgtgatacggccttcaattatagttgtctttccttcttggatttccaccacttccctgaaaccacgagctggaagctgagaccagctggtcactgctgggcctgctaggagcccacacggaagctgcccacagccagacaccagagcctcaaaggccgccatcttgaaaaaccaaccctgacctccacaatgattgattttcaaatgttgaaccagctttgcagaactataataaacccaagtgtgataccctgtctcaagtattgcggtgatcaaataggaccagtgactttcgaggatgtggctgtgcttttcactgaggcagagtggaagagactgagccttgagcagaggaacctatacaaagaagtgatgctggaaaatctcaggaatctggtctcattggaatcaaagccagaagtccatacctgcccttcttgccctctggcctttggcagtcagcagttcctcagccaagatgagctacacaatcatcctattccaggtttccatgcaggaaatcaactccacccaggaaatccctgcccagaggatcagccacagtcacaacatccttctgataaaaatcacaggggggctgaagcagaagatcaacgagtggaaggaggcgtcagacccttgttttggagtacaaatgaaaggggggctttagtgggtttctctagcctgttccagagaccaccaataagctcttggggaggcaacagaatattagagatacagctcagtccagcccagaatgcaagctctgaggaagtagacagaatttccaagagggcagaaaccccagggtttggagcagtcaggtttggggagtgtgcactagcttttaaccagaagtcaaacctgttcagacagaaggcagtcacagcagaaaaatcttcagacaaaaggcagtcacaggtgtgcagggagtgtgggcgaggctttagcaggaagtcacagctcatcatacaccagaggacacacacaggagaaaagccttatgtctgcggagagtgtgggcgaggctttatagttgagtcagtcctccgcaaccacctgagtacacactccggggagaaaccttatgtgtgcagccattgtgggcgaggctttagctgcaagccatacctcatcagacatcagaggacacacacaagggagaaatcgtttatgtgcacagtgtgtgggcgaggctttcgtgaaaagtcagagctcattaagcaccagaggtgtcaagtgacggtccccttggaggaatggtctttgcatctgactacttccttctgcaactgtgttcttccattagcttccatgacactctcctgctttatttttttctacatctctagcctttgctgtttcctctcctaccccacctttagattttactcagagttcagtctccagccctacaatctgagggacacctttaccaggtccccttcctaaccctccagtcccaaatccaagattctttaaccacactctaaaagttcttcagactcaggacttaaacatagccacgccaccttggccttcaatgacagggatctagcaatgctgcatcatcagccttccaataccaggtttaagggtattttaaacacagctcctcttaaatcctccaatctcagtacccagtgttttagccatgctcgggtggctaaattacatccaggaatggtgccagggcctttagccatttgtctctcctcacactccagcccatatggcccaggttctgacagtttgccttactcccttgggctggggctagccctacctgataccctgtgtcaatgagtgtaccttggagagctatccactcaggccccagtgcctctatttgctaagggactctgccacagaaaagaaggggagagatgttcatgtaacctcaaaatacttaggcttggttttgatgctagagaggaaaaaggacttggagagagagaaggaatggctggtccagaggcttttgtccactccctctcactggaagtggttgatctccagggaatccccaaggttagcctgcttaggggaagggctaggggtacctggaatgtaggatctcccccatgcctggcctaccaccctaatgtgtctggaattggtgggttcttggtcttgctgacttcaagaatgaagccgtggaccctcacggtgagtgttacaattcttaaa

SEQ ID NO: 23023 - DNA, 1058 bp, Homo Sapiens
cagccgcttgctccggccggcaccctaggccgcagtccgccaggctgtcgccgacatggaacccttggccagcaacatccaggtcctgctgcaggcggccgagttcctggagcgccgtgagagagaggccgagcatggttatgcgtccctgtgcccgcatcgcagtccaggccccatccacaggaggaagaagcgacccccccaggctcctggcgcgcaggacagcgggcggtcagtgcacaatgaactggagaagcgcaggagggcccagttgaagcggtgcctggagcggctgaagcagcagatgcccctgggcggcgactgtgcccggtacaccacgctgagcctgctgcgccgtgccaggatgcacatccagaagctggaggatcaggagcagcgggcccgacagctcaaggagaggctgcgcagcaagcagcagagcctgcagcggcagtggatgcagctccgggggctggcaggagcggccgagcgggagcggctgcgggcggacagtctgaactcctcaggcctctcctctgagcgctcagactcagaccaagaggagctggaggtggatgtggagagcctggtttttgggggtgaagccgagctgctgcggggcttcgtcgccggccaggagcacagctactcgcacggcggcggcgcctggctatgatgttcctcacccaggggcggcctctgccctctactcgtgccaggcccacttgccaaggcaggagccctccccaagccttcagggctgctcggagtcacctgttggaatggactaaaaggacccttgtgtgggaacaggtgctccccaaacaccctgctgctggctgccaggcaggccctctggaagggaaggggcaggactcatcaggacctccctggaccctgcagggcaggcgagttggcccgagcccaagcatttggctctgctgccccaaggggacaggaagcctcttgggcctcttcccttcctggacaaggccccctgcctttgcctcacataaactgtacagtattttcattaaaagcctctttcataacttaaa

SEQ ID NO: 23024 - DNA, 2388 bp, Homo Sapiens
ggaggccgagcctggggcggagtttgggctgactggggctggaccgggcaagacgccgccgctgcccggatgttgcgatggctgatcgggggaggccgagaaccgcagggactggccgagaaatctcctttacagacaataggtgaagaacaaacccagaatccctacactgaactgctagtactgaaggctcatcatgatattgtacgatttctggtacagttagatgactacagatttgcatctgctggtgatgatggaattgtagttgtgtggaatgcccagacaggggaaaaacttttagaactgaatggacacactcaaaagataacagctattattacatttccttccttggaatcttgtgaagagaaaaatcaactcatcttgacagcctctgctgatagaacagttattgtgtgggatggtgatactaccagacaagttcagagaatatcatgcttccagtctactgtaaagtgtttaactgttcttcagagactagatgtttggctttctggtgggaatgacctgtgtgtgtggaaccgaaaattagatctcctgtgtaagactagccacctttctgatacaggtattagtgctttggttgaaatacctaagaactgtgtttggcagcagttggcaaagaactgataattttcaggttggtagcacccacagaaggatcactagaatgggatattcttgaagttaagcgcctccttgatcaccaggataatattctctcattgattaatgtcaatgatttgagttttgtcaccggctcccacgtcggagagctgatcatctgggatgccctggactggaccatgcaggcctatgaacgcaacttctgggacccatctccacaactggacacccaacaagaaataaaactctgtcaaaaatcaaatgacatttctattcatcatttcacatgtgatgaagagaatgtatttgctgcagttggaaggggtttatacgtgtatagccttcaaatgaagcgtgtgattgcctgccagaaaactgcacatgactccaatgtcctgcacgttgccagacttccaaacaggcagttaatctcatgctcagaagatggcagtgtacgcatttgggagttaagagaaaaacagcagcttgcagctgagcctgtaccaacaggtttttttaacatgtggggatttggaagagtcagcaaacaagccagccaacctgttaaaaagcagcaagaaaatgctacttcatgttcactggagcttattggagatttgattggacactcatcatctgtggagatgtttctatactttgaagatcatggactagtgacgtgctccgctgatcatctcattattttgtggaaaaatggagagcgagaatctggattgcgcagtttaagattatttcaaaaattagaggagaatggtgacttataccttgctgtctagtttaaggaattaaaaatacacatgcatgaaccttgaacatcaaatatcgggtactactctgaaaaccattaatatattgatcacttaaattggtaatttttttgtcagtccataaaattctacatgtttaaattttttgtggacctaccaaccaggaacatgttgcttctcaggtcctagtatatcctccaaagaatataccacaagtttttccatttgactttgagctgctgttgaagtggtgagtgctgtgttttgagcttattttgaacctagatccttgtgaaaggtacaaatagaggtaatagttaagttatggcatttattagaagttttattatttggcttcctttagaattattgtgaagtttaaaaatagcctttctcctgcaaattttcctagtctttagtaactgttagtgttctatatagcacaaacttgaatctctcagccaaaaaagggaacatatatactgtttaagtatggcaagttttctttggtaccaatttgtttagataattgtaaaaatgttttttagttctagctactaaaacctgtatgaactcaaatggataggcatcttgtgagggtgtgtttttcccagtgtgaattggcttgaagagccatgggctaaatgggtactagaacaacaactgcccctcatgtacgccaaggatgagctctagatcatttgagaggcacagtgtttccggagtcagggactgcagctgagcgcaactgccccatctgaccactgactcaaatacgaactgcttgagacagacttcttttatgtagttctttgcagtgtccattgagacactataaccagccttgtaacaatatgttttctccttttggtgctaaaaaataaaaatattagaaagtaaaaaaaaaaaaaaaaaaaaaaaaaaaaaaaaaaaaaaaaaaaaaaaaaaa

SEQ ID NO: 23025 - DNA, 1734 bp, Homo Sapiens
ctaagccgccgcgcagcctgcgttttctccggtacaggttgaggctactaaggtatttggctattataaataaaatagtgatgaacacgtgtacaggtgtttgtacggacataagttgtcatttctcttgagtaaatacctaaaagtgggcttgctggagttttactacccttggatgctgctgttgacatggaaaagattgaggaacaatttgctaatctgcacattgttaaatgttccttaggaaccaaagagcccacttaccttcttggtatagacacatcaaagactgtccaagcaggaaaggaaaacttggttgctgttttatgttctaatggatcaatcagaatatatgataaagaaaggttaaatgtactacgagaatttagtggatatcctggacttcttaatggagtcagatttgcaaattcctgtgacagtgtatattcagcatgtactgatggcactgtgaaatgctgggatgctcgagtagccagagaaaaacctgttcagctcttcaagggttacccttccaatatttttatcagttttgatattaattgtaatgatcatattatttgtgctggtacagaaaaagttgatgatgatgcattgttggtgttttgggatgcaaggatgaattctcagaatttatctacaactaaagactcacttggtgcatattcagagacacatagtgatgatgtcactcaagtacgtttccatcccagcaatcccaacatggtagtctcaggttcatctgatggcctggtaaatgtatttgatattaatattgataatgaggaggatgcactggttacaacctgtaactcaatttcatcagtaagctgtattggttggtctgggaaaggttataaacagatttactgcatgacacatgatgaaggattttattggtgggatcttaatcatctggacactgatgaaccagttacacgtttgaacatccaggatgtcagagaagtagttaacatgaaagaagatgctttggactatttgattggtggcctatatcatgaaaagacagacacattgcatgttattggaggaacaaacaaaggaaggattcatttgatgaactgcagcatgtcaggactgacccatgtgactagccttcagggagggcatgctgctacagtccgttctttctgttggaatgtgcaagatgattctttgttgactggaggagaagatgcacagttgttactttggaaacctggagctatagagaagacctttacaaagaaagagagtatgaaaatagcatcctctgtgcaccaacgagtacgagttcatagtaatgattcttataaaagaaggaaaaagcagtgataatgcatttggcactttgtttggtaggttttatagtttcaaatagtccttcttgtttactacccatggtagacatgtttaaagctttatgtaaaaacaagccagttagcaaacagtcctggaaaaatatggtgagaatggtttaattccggtcttcacatattctaaaaaattttaaagcctctaagtataaaatcagtgagttgaaagtaaaatttcttatttaaagaacccatctgttaatgtagtaaatgttggctttaaagaaatagctccgataaggactttttagaaggaaatacttggtaaaacttaataaaacaggtggttggctgcaaaaaaaaaaaaaaaaaaaaaaaaaaaaaaaaaaaaaaaaaaaaa

SEQ ID NO: 23026 - DNA, 1652 bp, Homo Sapiens
ctctgagcttctctgagccttgtttgctcatctggaaaaaggggattaaaccatttacctcatggagttgtgaaagaatagctgcaaagcacctaacacatagtaaggttcccagtgcagctacttctgctgggttgagtctagctgtgtaggccccttgttcctcacctggagaaactggggtggcaggccggtcccccacaaaagataactcatctcttaatttgcaagctgcctcaacaggagggtgggggaacagctcaacaatggctgatgggcgctcctggtgttgatagagatggaacttggacttggaggcctctccacgctgtcccactgcccctggcctaggcggcaggtgagtggttctcccagtgactcctacctggtactgaggaaaggcggcttgactggtgagggagagcagggcttggcttgggcagcggttaggtgtgggagggaaaatggtcagggagggaccaggtgaatgggaggaggagcgggacttctctgaatggtcggtgcactcaggtgattcctcccctgggctcccagaggcagcaaacccattatactggaacctaggcccttcctgagtttcccctccacacagctaggagcccatgcccggcctgatctcagcccgaggacagcccctccttgaggtccttcctccccaagcccacctgggtgccctctttctccctgaggctccacttggtctctccgcgcagcctgccctgtggcccaccctggccgctctggctctgctgagcagcgtcgcagaggcctccctgggctccgcgccccgcagccctgccccccgcgaaggccccccgcctgtcctggcgtcccccgccggccacctgccgggtaggtgagagggcgagggggcggggcggggctggcccgggacaccgcgcgtgactgggtctcattccagggggacgcacggcccgctggtgcagtggaagagcccggcggccgccgccgcagccttctcggcccgcgcccccgccgcctgcacccccatctgctcttccccgcgggggccgcgcggcgcgggctgggggcccgggcagccgcgctcgggcagcgggggcgcggggctgccgcctgcgctcgcagctggtgccggtgcgcgcgctcggcctgggccaccgctccgacgagctggtgcgtttccgcttctgcagcggctcctgccgccgcgcgcgctctccacacgacctcagcctggccagcctactgggcgccggggccctgcgaccgcccccgggctcccggcccgtcagccagccctgctgccgacccacgcgctacgaagcggtctccttcatggacgtcaacagcacctggagaaccgtggaccgcctctccgccaccgcctgcggctgcctgggctgagggctcgctccagggctttgcagactggacccttaccggtggctcttcctgcctgggaccctcccgcagagtcccactagccagcggcctcagccagggacgaaggcctcaaagctgagaggcccctgccggtgggtgatggatatcatccccgaacaggtgaagggacaactgactagcagccccagagccctcaccctgcggatcccagcctaaaagacaccagagacctcagctatggagcc

SEQ ID NO: 23027 - DNA, 1652 bp, Homo Sapiens; identical to SEQ ID NO: 23026

SEQ ID NO: 23028 - DNA, 1188 bp, Homo Sapiens
ctgatgggcgctcctggtgttgatagagatggaacttggacttggaggcctctccacgctgtcccactgcccctggcctaggcggcaggtgagtggttctcccagtgactcctacctggtactgaggaaaggcggcttgactggtgagggagagcagggcttggcttgggcagcggttaggtgtgggagggaaaatggtcagggagggaccaggtgaatgggaggaggagcgggacttctctgaatggtcggtgcactcaggtgattcctcccctgggctcccagaggcagcaaacccattatactggaacctaggcccttcctgagtttcccctccacacagctaggagcccatgcccggcctgatctcagcccgaggacagcccctccttgaggtccttcctccccaagcccacctgggtgccctctttctccctgaggctccacttggtctctccgcgcagcctgccctgtggcccaccctggccgctctggctctgctgagcagcgtcgcagaggcctccctgggctccgcgccccgcagccctgccccccgcgaaggccccccgcctgtcctggcgtcccccgccggccacctgccgggtaggtgagagggcgagggggcggggcggggctggcccgggacaccgcgcgtgactgggtctcattccagggggacgcacggcccgctggtgcagtggaagagcccggcggccgccgccgcagccttctcggcccgcgcccccgccgcctgcacccccatctgctcttccccgcgggggccgcgcggcgcgggctgggggcccgggcagccgcgctcgggcagcgggggcgcggggctgccgcctgcgctcgcagctggtgccggtgcgcgcgctcggcctgggccaccgctccgacgagctggtgcgtttccgcttctgcagcggctcctgccgccgcgcgcgctctccacacgacctcagcctggccagcctactgggcgccggggccctgcgaccgcccccgggctcccggcccgtcagccagccctgctgccgacccacgcgctacgaagcggtctccttcatggacgtcaacagcacctggagaaccgtggaccgcctctccgccaccgcctgcggctgcctgggctgagggctcgctccagggctttgcagactggacccttaccggtggctcttcctg

SEQ ID NO: 23029 - DNA, 2513 bp, Homo Sapiens
ttcaagccggcgcgccgcggggtgagcggcgccgggcctgaggtcgcccagacgccgtcggggcggagccgggtcgcgaggctgcatcccggccggcggttccggagcctcgcggctggggaggcgcggcccgggaagctcgagcttagggagatctgccttctggagactgcgccgtcctcccgggagagccagaaagaggacatggctgctgggcagcgggaagcgaggccccaggtgtcactgacgtttgaggatgtggctgtgctgtttacccgagatgagtggagaaagctggccccttctcagagaaacttgtaccgggatgtgatgctggagaactataggaacctggtctcactggggctcccatttaccaaaccaaaagtgatctccctgttgcagcaaggagaagatccctgggaggtggagaaagacggttctggcgtctcctctctaggatcgaagagcagtcataaaaccacaaagtcaacgcaaacacaagactcttcatttcagggactgatactgaaaagatccaacaggaatgtaccttgggatttgaaattagaaaagccttacatatatgaaggcagattagagaaaaagcaggataaaaagggaagttttcagatagtttcagccacccacaaaaaaatccccactatagaaagaagccataaaaatactgaattgagccaaaacttcagcccaaagtcagtgcttattaggcaacagatacttcccagagaaaaaacaccaccaaaatgtgaaatacaaggaaacagcctcaaacagaattcacaattacttaatcaaccaaaaattacagcagataaacgctataaatgtagtctgtgtgaaaaaaccttcattaacacttcatcccttcgtaaacatgagaaaaaccatagtggagagaaactatttaagtgtaaagaatgttcaaaagcctttagccaaagttcagctcttattcaacatcaaataacgcatactggagagaaaccctacatatgtaaagaatgtgggaaagcctttactctcagtacatccctttataaacatctaagaacccatactgtggagaaatcctacagatgtaaagaatgtggtaaatccttcagccgaaggtcaggcctttttatacatcaaaaaattcatgctgaagaaaacccttgtaagtataatccgggtaggaaggcatctagttgcagcacatccctttctggatgtcaaagaattcattctagaaagaagtcctacttatgtaatgaatgtggcaacacctttaagtctagctcatcccttcgttatcatcagagaattcacactggagagaagccttttaaatgtagtgaatgtgggagagccttcagccagagtgcctctcttattcaacatgaaagaattcacaccggagaaaagccctatagatgcaatgaatgtgggaaaggctttacttctatttcacgacttaatagacaccgaatcattcatactggagagaagttttataattgtaatgaatgtggtaaagccttaagctcccactcaacacttattattcacgagcgaattcatactggagaaaaaccatgtaaatgtaaagtatgtggaaaagccttcagacagagttcagctctcattcaacatcagagaatgcatactggagaaagaccctataaatgtaacgagtgtgggaaaacattcaggtgtaactcatcacttagtaatcaccagagaattcatactggagagaaaccatatcgatgtgaggaatgtgggatatcttttggccaaagttcagctcttattcagcatcgaaggattcatacaggagaaaaaccctttaaatgtaatacatgtggaaaaacttttagacaaagctcatcacgtattgcacatcagagaattcatactggagagaaaccctatgaatgtaatacatgtgggaaacttttcaaccataggtcatcccttactaatcattataaaattcatatcgaagaggacccctagaaagtagatttgtatgtgtgaaagccttaaaccaaagctcatcgaagaatacatccttgagagagatgtaataaatgtaatggatgtgaaaaaaactgtaataatttagccctcattaggtatttaattccatggataaacctcagctatataatagataatgaggaaagtgtttgtgcctgtcagacacttaaaaaaataacctgagatgaagaatttacaattgaagacattgactttagccatttgtgaaatgggtttgctttttcccttttcctacagacgtatatgctagatgtcacgtgatcatcagaaacagatatccgagtgggtggggaggtgtgctttagatttctcattagaagaccaccaaactggtaatatttttatagcattttaatagcatacaaatgaattgatcaaattgtacctttttagagaaaaggaccaaaataaaagaaaaatgaattatgaactaaaaaaaaaaaaaa

SEQ ID NO: 23030 - DNA, 15012 bp, Homo Sapiens
tcactattcgaacttatttattatgctttctgcagagacttctcaatctgacagccctagtttggcgcggtgtaaaacgaccgcaggtacgtaaagaactcatcaagcattacaaaagtacagccctaccaccgcacgatatatggcgttcgtgcgtagagagattacacaagaggcagaggacccgtctgtagaaagaacttaaagttattctaaaattaaggggcgaaatcaagtttcacaggtctttgaaagtcggcaggactggggcgccgaaggcctgcacgacgtgagtacttgggaacaggacctggctgggcagggtcgggaagcgtcagggacgaaatcagaaccgcaggcccgccgaggagaagggggagccgctggcgagcgcgacgcacggctggccagcgaccctgcttcagcccgacctcaaacttgcttctgtacctcgggtagcgccagagccctttccacgcccagagcgaggagcagggcggcagcccagggcaccagggtcgtaagactacccgggccgtgaggcgccattttccgttcccttggtgctccgctgctcgcgcgacccggccccgcggccccgccccgcagcgcgtcaggccctcttccccgggcgtggcctaagcggcccggtccagtcgccctggggctgcttgggggcttttcctgctcgtggagctctgcgctggtcttcatgcgccctagccctctttcggggatactggccgaccccctcttccttttcccctttagtgaaggcctcccccgtcgccgcgcggcttcccggagccgactgcagactccctcagcccggtgttccccgcgtccggacgccgaggtcgcggcttcgcagaaactcgggcccctccatccgccctcagtaaacatggcggcacggcgagcggggcgggcaaggggcgggcagggggcgggcagggggcggggcccccgcgggctcccggccagggctctcggccgggctctggctacccacgtgtggagaccgggcaggtgggcctggagagcgtgagccggtgccgagaggcaccggggagcggcgtctgagccggggcggggacaagggggcggggaggggcggagcgagccggcctccggcgtgggtctgagatcttaagtgcgagcggtaaggtggtggtctccgccgcgtagagggaagcgggaaaccgagaaagaacgagggtgagggtgatgagggaagggcaaacctcaaactccagcgggaggacacgagcctggatcgccccgggcacctagtcctcttcacctcaatgctgatagcgcatagcgtcccggagcctggcgaggaggtaggagcgggatagacgcttccctaactcattttctttgccttcccaggaaaagggagcgatgttgatctcaggaagcacaaagggaccttcctagctctgactgaaccacggaggtaagggagtgcgttgctgccccagggtgggccagcgccctgactgaagggcgccaggggatccctgctcccggcgcgacagtgttggttagggccagccagaaagctccttaaagccgacccaagtgatcatctcgagtagccgagccaggcttcccttccacattacccccatggtgtctgcctggaagttcctgaaaggtttacgtttagctggctggcaaattttctaaggtgttagtagctattagcattttaaggagggcccccaaagcctttcacaccttgaggaattataggccccaggacagattttgagggaatctttttggaacagttagtcctgcagtggtctcattgccttttgtaggagtcaatgcgatccactgcagtgtgtgaccaaagtgagttcaggtttttatttttatttttatttttattttgagacggagtctcgctctgtcgcccaggctggagtgcagtggcgcgatctcggctcactgcaagctccgcctcgcgggttcacgccattctcctgcctcaacctcccgagtagctgggactacaggcgcctgccaccacgcctggctaattttttgtattttttagtagagacggggtttcaccgtgttagccaggatggtctcgatctcctgacctcgtgatctgcccgcctcggcctcccaaagtgctgggattacaggcagtgatgtgggaccccttttaaaaacctgaacttggcctggcgcggtggccaggccaccgatccgccaaggcaggtggatcgtcatgtcaggagttttgagaccagcctggccaatatggtgaaatctcgtctctactaaaaatacaaaaaaaaaaaaaaaaaattagctgggcgcggtagcacatgcctgtagtcccagctactcaggaggctgaggcagaagaatcacttgaacccaggaggtggaggttgcagtgagccgagatcgtgtcactgcactccagcctgggcgacagagcgagactccgtctccaaaaaaaaaggggggggggtcccacaatctgctgtttgtgccttggcatgttatagttgtagtgaaacaacagctagctcttgcttttggccgccctctttctggagagatgcgagaccatagcgtttggatcaatgtagggtgtttagaaaactacagatctgttctcagaatctggtctgttgctaggtcaggtttttcctgtcttccctggggctctctcaggccatccaggggaattctccatacatcacgcaaatagaattttatcaggaagtcccatcagcagagtgtctttatttctgtacctccgtgtcccatactgggactttccttcctgtctctggccacctacctctctaaaccactaaccctatagttagttctttgttctgtgttctttgcacacaggagacttcttctttcctctaactccccagtagttcccatcatctctatcatagcagtaaaaacttgccaaagacgaatgagaaaactcagggtgttgcaatgtgcaaaggcccagggcatgtttaggttaaaccagagtttaagcctgttgggaatccttgtagaacatgtgatccaagagttgccaggtctgattttccctctttattggccccaagaggttcagagttcaggtttagtctgcatgaggccatatcttgccagccagccagtgtctgcccaagaacacactgtgggagagcggaaagacagcctaatctttctcctagtgggcaaaagcagaagacatagtttatgttagtctgtctcttgattagttgaaatctaaactatgtcctgtgaatgcctgactgcaacactctgctcctgtcctggttctgggaatagtgaggacagggcccttgctgaacacctgtcatagctgcagacagcactgtttctctctctcttgttttgtatcatgctgcataaccttgagcaagttatttaatctctcagttttcttgtgttaactggagagtattcgtgtcttaatctgagacatgctgttttgaaaatgttagcttcattatgtattattactaatgtttataaagcacctcacacactgctgggttacatagcaggtgttcagcaaatgttaactgtcgtcatgttaggctgtgtaactacatggcattctctggtgttttttcctcataccaataagtaccccagaggattgcctttgaagacaatatgatacgcttggagaacagacagggtggatggtgaatccctagacctgggttctaatttatgctctgacaatagtcggctctgtgcttttggaaaggtcacttgaaccatctgagccttagcgtgtttatctgtgaaatcgtcagtggtggggggttggttgtaatagtggtgtccaaagatttaagattttaaatattatgatcccttccctctttctctgaggattgtggtgtattcttgggggattaacatttcttgtgcaggagttagaaaatcaactttcaactttcccatgttttcagttccttctttccaactccctcccgcacagagtgccaagagtactttaggctgaaaggctaatccatctaggaatgctgttgaatatgagctccctcttccctgttctggagcctctagggctgagttggagtttgggggccatagggtgatagggccatttggaacacagccattggttccctgaaggggccagaacaaatgactgctgagcttcaccccacccccaattcctgatctctcacctcagctactcatagagccagatcctcagctctgcagctccaggcaactctgcctcagaacagggattgcttctccaggtaggtgtctgtccccagcaggatacgaccactctctttggctggtccctttgcctctcagctccgtggctgggttgcttctctccagaatggagaatcgtcattctgaaaccctgactccagcatggtgccctctcacctttcccctcttcacttttgaatccagccgctcttcctgcgtctgctgttgactgtgatgttgcaggtagaggggctgagaggtgggtggcagcacttatctagtggtgttggggagaaccttaagaaaggggttggcctggggacgcgtgaaatggagtctgtggctgccacagaggcagtctcactgatgatcagttagaagggtgacactggggatcacaggaggcgagggccgaggccaggggcagtaggggaagccctgctgccattagtctccatgctgtgtttcctgctgggctgtggcgccaggctgggctctgctggcttagtgtattgtagtgactgggtctgtgccttcaagtggggctgggaaattctgctaagaaacttaggctagagtttatttttcttttggtactcgggtggagacctaagaaggttgttgaatttcacagctgtgcatactcaaaggtcctggccaagttatattgtctcctggctgtcgcactctgatgcttctccctcacttatgtcccctaccaaacccataccagggcctctagaccttgaagggctaccactatgctggctggtccacttctgatggcatgcgatgtacaaggcccaagggtgaatggctaccaaggccagataggcctcactaagagctaattcctttgcagctcaccctggacagtatcactccgtggaggaagactgtgagactgtggctggaagccagattgtagccacacatccgcccctgcctaccccagagccctggagcagcaactggctgcagatcacagacacagtgaggatatgagtgtaggggtgagcacctcagcccctctttccccaacctcgggcacaagcgtgggcatgtctaccttctccatcatggactatgtggtgttcgtcctgctgctggttctctctcttgccattgggctctaccatgcttgtcgtggctggggccggcatactgttggtgagctgctgatggcggaccgcaaaatgggctgccttccggtggcactgtccctgctggccaccttccagtcagccgtggccatcctgggtgtgccgtcagagatctaccgatttgggacccaatattggttcctgggctgctgctactttctggggctgctgatacctgcacacatcttcatccccgttttctaccgcctgcatctcaccagtgcctatgaggtgagcagggacagaagggagaagtgcgtgggacacgggttggggtggagaggagggacaggcacataggaaggacctgggaccctagacctcctccacctaatgagagggacagaaaactcattgtgtgtttataattctttctcagtgatgttaggtataggggcaggattggagaggagggtgctatgcccgagtaggactcagagtgggtatgggttggatattccctcatgttcctgagcatcttgagggaatttgtctgtgagttgtcggggtgaagtcaggagaaaaatctttttttctgtatacccagtacctggagcttcgattcaataaaactgtgcgagtgtgtggaactgtgaccttcatctttcagatggtaagcagaatgaggatagaaaccgagcctagggcatgttgggggacctgaacgcaagcatgctgagggaattggagtctcccctgctctcagattggcaggattgaaattcctgctagaggttagcatctgtgaggaccccagaggcatcctgctgcccatgccttccaattccagcacagatactgtggtggcagcaagccagaatttgagaggagaaggaagagggaagtgagcctaggtgaggggaagccatgggcatattggcgctgaggcccatctttcttcctctctcttcccaccattctccggcccccatcacattttttccacatgcaacaggtgatctacatgggagttgtgctctatgctccgtcattggctctcaatgcaggtgaggagtcacacagcccctggctttcagccgtggtaggttaggaaagcacctttgggagaggcagatggaggagcgtatgtggaaaagaacctgaccttgaatggggaattaattcaccgcttgggcccttgggtgggtctctaccagaggaaggcttggtccacctcaattgacagctagtaacatgttaccatgccctatctgaactggttagtcaatatcttttggtggagctctgcaaacatttttctccgttgtggtgaatgatttatttcattgttaatgaccaatgctttatctctgtggcatgacgtgattgccctaccagggcttctcccctggggaacccttttccagggataagaatgtggcttctatgcttacagtgactggctttgatctgtggctgtccgtgctggccctgggcattgtctgtaccgtctatacagctctggtaagtgcagtaagccctggtgtggggaggggaagggatgaagtaaggaggggacatgggaagagaaggaaaagaagacataagctgagaatatagatgaggagaataggtgaaattctggggtggtaagatttatgataggatttagcagtggggatggtatatgaaggtagaggatgggatgggaatgaggtcaacagggtcacagcaattacatgcctaatggcaggagagtcccctcactggtagtatgttcttagggtggatggtttcaggagtgtccaagggagagaatatagtcatgggttcttagtttctgtttctggttgggtcagtaaagccccttcgtcatccctcttttatacatatcaccagagacagaaactaaaaactggcttcaggctgcaaaaagcctaaaacaaaacaaaacaaaacaaaatggagcaacaacaaaataaggcaggttggacaagctgggtttagaaggcctctgtggcaggtttgctgtgctttccttgcagggtgggctgaaggccgtcatctggacagatgtgttccagacactggtcatgttcctcgggcagctggcagttatcatcgtggggtcagccaaggtgggcggcttggggcgtgtgtgggccgtggcttcccagcacggccgcatctctgggtttgagtaagtatacccctactcctggctggggtctgcagtgcctgggcgctgagcccatcctagaggctggtctcggctatagtaagcagaaggtaaactgggaagcctgaggtgtaacagcagacagtgggaaactggtcctgcagagatggagggtgattacaggtgcccggctagtgtttatagagagtcaggacattacctgggatgagtacctggaatgagcctggggtggaagaatggagcctccctctaactggctgtgctgtctctcgagtgcacccagcttcttgctttcagtgtccccgcttggccctagcagtggtgtctctcctttcctgtccactgactcctgttgccaagagggcaggaaggctgtgtctctcagctttgcacaatgactgggtggtgtctgttacaggctggatccagacccctttgtgcggcacaccttctggaccttggccttcgggggtgtcttcatgatgctctccttatacggggtgaaccaggctcaggtgcagcggtacctcagttcccgcacggagaaggctgctgtgctgtgagtgcagggacaggaagggagtggagcaaggtctaggggaaggggttccccagagataattggggtggggcaggatgccagagtgcatacacatccactgtggtcaggatgtgggtctcctttctggaggtcaggggcacacacctgagggtgtctgttaacgccggctctccttctggcactgacctctttttgcagctcctgttatgcagtgttccccttccagcaggtgtccctctgcgtgggctgcctcattggcctggtcatgttcgcgtattaccaggagtatcccatgagcattcagcaggctcaggcagccccagaccaggtgagaaggcgctgttctgttcccatgaaggcaagccttggccccacaacaggagtgtctaggtaggaaaggactgactgcagaaaggactcccaccctgggtgggagacggttgtaaaatcctttcccactctgagatgctaggaatctagcatgtgaggatcgcggtccctagcatcacctaaccacagtgctcatcctactggggtgaggacctacccttactgactccccattgggctccatgtgctctgctgggagctatcacatacctggtctcacctaagcctctaacagcctcatttcacagaggagaaaacagactcaatgaggtagccagtaagcagaagtcacactagtagccagaaacagagctgcgggcgaattgtgtcattccctctgtagagctcattttctctccacttaatgtgtagacacttgggtcagcagaaggtgccccaggccctggcttcccttgtaatgcacccagtctcggtagactcgctggggcacatgtaaagggagcttccctgcagagccggccctgggaagacccctctctgaggactgctgtgtacctccgctctgcttgcagttcgtcctgtactttgtgatggatctcctgaagggcctgccaggcctgccagggctcttcattgcctgcctcttcagcggctctctcaggtacccactttaacgatttccctcaggcctggtgcacctgacccctatttggtacaaggtgatgggtggagcggggtgatagtgggtggggaatccctctaagtttctcactgtgcctgccccatctgtgtggatgacaagggatagctcatctttgtaggccacagcacaacagagatacccctgttttggttaagagttcttttatggtaccagaaattgatctactcgaatgaaacccatatccacattcaaaaaaggactgtgtccttgccttccaggcctgctctgaggtggcatcaagtccaactatgaggaggtttcttggtggtacctgtcatctccccgctttaggacaccatttcctccatagagtcccatagagctgacaattttgcctcgctcaactcctcatcctcttcctctttttcagcactatatcctctgcttttaattcattggcaactgttacgatggaagacctgattcgaccttggttccctgagttctctgaagcccgggccatcatgctttccagaggccttggtggggttatgcttcctcatctcttcagtctgggtctttctaagcttcatcctgaccattgtcatcagtttgctgtaaaacacccactttatccggggctcagcacttgcctaatgaagcacacaaccttccctgcatgcatggttgtttccatctcagggcatgtcctagggaggtctctgagtcacataggagtgaggacttggtgggaggaagctggggcgtgatgtaatatgccttttgtttccagagagacagaggtggtagtttggctgggcagggagccttgctttaccccattgcttgtgttaactcacaccttcttgtttcctctcctgtccttttcccccagcctttggctatgggctgctttgtctaggaatggcctatatttcctcccagatgggacctgtgctgcaggtaataactatagagggtaggaagcaattttaagggagagaaggaattgattgaaacaggaagttgagaagggcagctatattgaggggaatgaccggggggcaggcgtaagagattcccctttgatggaccgtctttactgtgaacagacttgcaagcagccagaggacgcagggtcattcctgggatgttgtaggctgagagagagctaaggatcagcctcagagaactcaaaacacatccctctccatcagccccctagcagcctttcctgccctctggagttctttttttttttttttttttttttttttgagacagagtctcattctggtgctcaggctggaagtgcagtggcgcgatctcagttgactgcaacctccacctcccacattcaagtgattctcctgtctcagcctcctaagtagctgagggactacaggcatgtgccaccgtgtctggctaatttttggatttgtagtagagacggggttttaccatgttggccaggctagtctggagctcctgacctcaggtgatcctcccgcctcggcctcccaaactgctggaattacaggcatgagccaccgctcggccacctctggagttctgattgttcccacagaagagacagatctgacaagtggggctccaaggtcatggctggtggctatgctttatggtgagtctgggcatctctgagtctgtgttctttttccttttcttctcaccctgtcctcctaggcagcaatcagcatctttggcatggttgggggaccgctgctgggactcttctgccttggaatgttctttccatgtgctaaccctcctgtgagtgatgcatctggatccacagtcatgtgtagcaggatggacctgggggttggcagggctgtcaccaggagagctgaggactgccgtgagggctggcaggactggccttgtgacaggcctgcactgtgtctcggcagggtgctgttgtgggcctgttggctgggctcgtcatggccttctggattggcatcgggagcatcgtgaccagcatgggcttcagcatgccaccctctccctctaatgggtccagcttctccctgcccaccaatctaaccgttgccactgtgaccacactgatgcccttgactaccttctccaagtaaggcagggcttgctatcttcttgttttctcaaagtcctcctttgagggctttcacaggggtcttgctaagggatgggccaccagaggccccagggaaatgttgggtattgggtcccaagaccctgggaccatgcgggcaagtagagattggtgcccaaggaatgccctgccaacgaattgctaattgttctcacctctgctcttcccaggcccacagggctgcagcggttctattccttgtcttacttatggtacagtgctcacaactccaccacagtgattgtggtgggcctgattgtcagtctactcactggtaagggtgtgggattgcggtgcagatgagcaccgaggggttaacagagggccctaagggactctagggagaaaggctcctgccctctgagctcttgggtgtccgtagctgtcaggcttttctgctgggatgtaggaggtgggtgggggctggggtctttgggggccaagggaggacatggggcccgctgctgtgaatggttccacccagagactcagaagcacatttccattcagggagaatgcgaggccggtccctgaaccctgcaaccatttacccagtgttgccaaagctcctgtccctccttccgttgtcctgtcagaagcggctccactgcaggagctacggccaggtagtacctgctgtccaagtgacccctccctgcccttctccacagatgccactgactcttcaggttcccttctaccccttttctctccccctgccccgggtgcctctctcaggatcagctaagcctaggctgtcccacacggctgtctcaggttctacccacaggactgcactggcttggtgggcagaaggatctcagggctcagaggagctcagccccggcctgggccagtcagctcccctccccagcccaccctgtgctccctgctgtgctatgccctccctcttttccccctgctctccctcccgaacccagccttgctgggctcccttctggcggggaccttttttgtgtgaatcctgtcaagcacccgtcatccgtcttcaccagttccacccctttggctctgtgtttgcaggaccacctcgacactggcctgtttcctgagaagccgaggaatggtgtgctgggggacagcagagacaaggaggccatggccctggatggcacagcctatcaggggagcagctccacctgcatcctccaggagacctccctgtgatgttgactcaggaccccgcctctgtcctcactgtgccaggccatagccagaggccaccctgtagtacagggatgagtcttggtgtgttctgcagggacaggcctggatgatctagctcataccaaaggaccttgttctgagaggttcttgcctgcaggagaagctgtcacatctcaagcatgtgaggcaccgtttttctcgtcgcttgccaatctgttttttaaaggatcaggctcgtagggagcaggatcatgccagaaatagggatggaagtgcatcctctgggaaaaagataatggcttctgattcaacatagccatagtcctttgaagtaagtggctagaaacagcactctggttataattgccccagggcctgattcaggactgactctccaccataaaactggaagctgcttcccctgtagtccccatttcagtaccagttctgccagccacagtgagcccctattattactttcagattgtctgtgacactcaagcccctctcatttttatctgtctacctccattctgaagagggaggttttggtgtccctggtcctctgggaatagaagatccatttgtctttgtgtagagcaagcacgttttccacctcactgtctccatcctccacctctgagatggacacttaagagacggggcaaatgtggatccaagaaaccagggccatgaccaggtccactgtggagcagccatctatctacctgactcctgagccaggctgccgtggtgtcatttctgtcatccgtgctctgtttccttttggagtttcttctccacattatctttgttcctggggaataaaaactaccattggacctagaatttgggctcctgtactgtcttcacctgctcttgtccaccctactgcatcctctggtgaggataaggagtcctatcctatgtacaggtcaccttcctgtgctgagaaggggggctgtggcttcaagtccctgctgtccctgtgtctgcaggggacagtgttgtgctcaccatggtagaagatgcacaccctctcctagggcttctcatcccctggggcttacttagtctgtcccttctccggccccactttccctttgccagaccttttgctctcagatttttacttttggaactggaggaagaatgttcccatctgattttagaaacggaacattctagctggacttttatggtcttgtgaagaacactgtgctcacaccctcccacacctggcctctgcccctgcctggccctgttcagctgcccacatcagctctgcaccagctctccggggtctcttaacagagaccgggtcccaggcatatctgaattcagcctcaactgaggccttctcccagggcttctagagcacattccagctgttctctcatactccatgtagcttaggcctgggatgttctgtgtccctttttctacctctaccccagctcactcggtcacaccccagcccctttcacctctgccctggccagccctgtggaggaacagggcctggttgtgccagagccaagacactagctactcccaacctgcctaggcctcatttatattcatgacgacaatattgtctcctaatgggtcttaaacctgttgccctggatttttttttccattccacaaggctctggtcttgaacataaacattccttccagtatggacttcaggtgtctggtcatgatctattctcagtctgggaaggtactttgacaggccaaaggtgtgtccactgaatctaccatatttcagacatgcctgagtggtactccagggagaactggggagaatgatccccagggtttaatttgctgaattaggtagggtggaagtgagtctatgtaagaggacatggaaacattttacgaagggcccttggactcaaggctattttgttttgtcctgtgaattaaaacttcaatgatgggaagataagaagcctataattattatttagaaaagattcctttgggagaccgaggcaagacggttgcttgaggccaggagttccagaccagactgggcaacataaccagatcctgtctctacaaacacaaactagccagcatggtggcatgagcctgtagttccagccacttgggaggctgaggtgggaggattgcttgagcccaggaggctgaggttgcagtgagccaagattgtaccactgcactccagcctgggcaacagagcaagaccttgtctctaaaagaaaacagaacacaacaaaatcccttttccttcatagattgtttttggggaatgtaatcgaatctatcatgccagactcccaaattcaagccttatttgtttcctggttcaggtgtcctggtagagctgcttctaggacaaggtcttaccaatggaggcaatagaaactgagaatgtctgtaaaaactagaagtggacgatttatatctcaagccctacaagaaggagagactggtgattgtcaccaagaactgttgagggaatgggatcga

SEQ ID NO: 23031 - DNA, 2619 bp, Homo Sapiens
gcttggggacgcacggagaggtgcagctgggccgtccagcatcaaacactagcctccacacgtggaaaagaccctgactcccacagtagactagtcttatgggagtcctggctcttgggccaggctgcattaggaaaatggaaaccagactgtcttcaaattcttctgcctagccttagccattagagagaggtcctgctaaagatggactgcaaatgcgcttgatggaaggagatgtcaattccactgaagtcctcatttctgctgagctacctgtgcaccctgcctccggctctcctgagcagagagatcctgatggctgactcagaagcactcccctcccttgctggggacccagtggctgtggaagccttgctccgggccgtgtttggggttgttgtggatgaggccattcagaaaggaaccagtgtctcccagaaggtctgtgagtggaaggagcctgaggagctgaagcagctgctggatttggagctgcggagccagggcgagtcacagaagcagatcctggagcggtgtcgggctgtgattcgctacagtgtcaagactggtcaccctcggttcttcaaccagctcttctctgggttggatccccatgctctggccgggcgcattatcactgagagcctcaacaccagccagtacacatatgaaatcgcccccgtgtttgtgctcatggaagaggaggtgctgaggaaactgcgggccctggtgggctggagctctggggacggaatcttctgccctggtggctccatctccaacatgtatgctgtaaatctggcccgctatcagcgctacccggattgcaagcagaggggcctccgcacactgccgcccctggccctattcacatcgaaggagtgtcactactccatccagaagggagctgcgtttctgggacttggcaccgacagtgtccgagtggtcaaggctgatgagagagggaaaatggtccccgaggatctggagaggcagattggtatggccgaggctgagggtgctgtgccgttcctggtcagtgccacctctggcaccactgtgctaggggcctttgaccccctggaggcaattgctgatgtgtgccagcgtcatgggctatggctgcatgtggatgctgcctggggtgggagcgtcctgctgtcacagacacacaggcatctcctggatgggatccagagggctgactctgtggcctggaatccccacaagctcctcgcagcaggcctgcaatgctctgcacttcttctccaggatacctcgaacctgctcaagcgctgccatgggtcccaggccagctaccttttccagcaggacaagttctacgatgtggctctggacacgggagacaaggtggtgcagtgtggccgccgtgtggactgtctgaagctgtggctcatgtggaaggcacagggcgatcaagggccggagcggcgcatcgaccaggcctttgtccttgcccggtacctggtggaggaaatgaagaagcgggaagggtttgagctagtcatggagcctgagtttgtcaatgtgtgtttctggttcgtaccccccagcctgcgagggaagcaggagagtccagattaccacgaaaggctgtcaaaggtggcccccgtgctcaaggagcgcatggtgaaggagggctccatgatgattggctaccagccccacgggacccggggcaacttcttccgtgtggttgtggccaactctgcactgacctgtgctgatatggacttcctcctcaacgagctggagcggctaggccaggacctgtgagccttctctgtcttgctgccggccttgataccacccctcacccgcagagtcactgcattccctcccagcctttgaggccgggtgcagtggctcacgcctgtaatcccagcactttgggaggccgaggcgggtggatcacttgaggtcaggagttcgagaccagcctggccaataaggtgaaaccctgtctctactaaaaatacaaaaattagccgagcatggtggcctgtgcctgtaaacccagctactcaggaggttggggcagaattgcttgaacccagggggcagaggttgcagtgagccgagattgcacccctgcactccaggctgggcaacagtacgagactctgttccaaaaaaaataaaaaagaacagcctttttaggccacagtgacctgcgcaatgtttatatgctttgacctactaactttctcctaactaaatatttgattttaggagagtgtttaaataaattacagtatgtctatatgatgaaatgttattttgccattaaaattttgtttacaaagataatttttattgacataaaaataactttaatgtaatttatgttgaaaaagctgaatacaagtctttatatagagtaatatttgagctgtgttcaaaaatacataggaaaagactgataaaatgaaatatggcaaaatgttaatagttttccctggaataggataataggcaattttaaaacagactcctttaaaaaaacaaacaaacaaaaaaaacatagacttctttatatcttttgagctccctcccttttattatgtaatgaatatgtgttgcttttgtaataggaaa

SEQ ID NO: 23032 - DNA, 1490 bp, Homo Sapiens
cactatgatccacttcagcgtaacttccctgatccagatacacctcctctgaccattttctcctctaatgatgatattgttcttgtacaagcactggaattagcagatgaagctagaagaaggagacagtttactgatgtcaaccgcttcaccctgagatgcatggtatgtcagaaaggattaactggacaagcagaagcaagggaacatgccaaggagacaggccataccaactttggagaagtgtgacctatgcatgaatgagggttgaagcctactacctcacacatccagaaggctctgggttttccaataagctatggtaaccctaaagaacaaaggatacaatgcttgaaccatccttttaacttaaaaccactaagacactgaaattccttgttaagattaaaattagtgtgcaagtttacagatgtgtgtctacagtggtaaactgtacatacatgcctctttctgctggagtgacagaataggtgatccttgccacctactgacactgacctgaaggttgagattgagtattataaactagcacccagcagctttaacttgtagaagaaagcatcacattttgggtaatgtggaaggcctcctgtgagtccactgggcatacgattgagattgagtattataaactagcacccagcagctttaacttgtagaagaaagcatcacattttgggtaatgtggaaggcctcctgtgagtccactggacatttaccacagtgtctccagtaactgagtctttttaaaaactctgaatgagttaagtttctaaattatgaattgattcatcaaatgaagatactcagaattgtccaaactgattttatattgcaatttggtagacattataaatgtgtgcttaaccactgataagtacatcacaagcaatttttacagggatgagtctcatccttgagaatgttatcacaaaacaggaactgattgtgccctgtttaagatctctagcatataaaacgtagaatgtatgagggaataggtgcctgagcagcttcctgaagctttaaaagaccgttggcctcgtgttttaatgcaattcatgtattggtctttgtcacattggataacattttaaagttaagcagggtacttttttaattgaaattccttgaaattcgagtcctcagttttttcttcatttgcgtaaagtttatcgggggggatttaattttctcagctttttgttaagagcacttcctccaaaaaatttttttcaagtaataatgctctgctttgggttggtttttgtaagattttttgcacacctaaagagtgtttgcttttgtgctagccttatccctccactaaagttattttaaataatttcacatttctgcaaattagcactttgcttatctgcaatcttttactttgatttttgaagttttaaagcaattggagtaatactgttgaatgaactagtttcacttccaaaaaaaaaaaaaaa

SEQ ID NO: 23033 - DNA, 2224 bp, Homo Sapiens
aaacttggacctcatcctcaattattttctcctttcaactctgttgaccctctgtctggtcttcctctagaaggttctaccgcagaaattgatgtgtgctccctgccctcgtcactgcccaagcccgggcctgcacatactcactggactgttccagttttgacagctgccagtcttcctgcccctttcacactgcagctgaagttcattacctgaaggacgcctcatcatttcattccttggctccaaaccttctgctgcctctaagataaaagctcaacttcttaacagtgtacagtgtgcaacttccaacctttttatctgttctctccaccttcagtttagcgtcattccaaaaccacacccttgcaaagctttgtactccgcaccccagatgatctccaggcagctcagatctctttcctgcctttgccctgcactgttccccggtacttcctcctttattgtagcactcagctccccagccaatctgtacatccctcagaggcagcgatctgatgaattggtttttgaatcccagaaagggtctgccatggagttggcagtcatcacggtagatggcgtatgattttgctgaattttaaataaaatgaaaaccataaattacatgatgcttttattgacacttgacaactggcctaaataaaaagactctgactctaatacaagtccccttactgataataggcatgaaagagcaccattcttaaaatctaaaccctttaaaatcagttacggcaattcacttaaggagcttgagggccgtgttaaaaggagccaggttttcacaagacctcatccacctctgcacattggctggcactgtcacactgcagcctccgatctgctggagtacagaccacagcaccacgtctgctacggtgagttcattcccagcgagccaagggctcttcccaagagcagagttcatggagcggaaaacagcggctttttctttactgcttccctcttttaactgaaaaatcgcaatatctacccagctatctataagggttgcgttgacagcattatgcttctggccaaacagagagaacaagaaacgtgcaatgttcccttcgccttcgatggggcacatcgtctggatgctgaatttcatctgcgtcttcggcactgaaaagaaaaaacacgccaggtagcatcaccagagcagccctgagggaagtactcgcacagtggggaaggggacagtcaccaaacaccacagactgatgacatgggaaagggtgttttcaagaagaacatcacattttcagtctgtctctaagatgcttactactgaaaagggtttaagtgcaaactatgttaaaaagtaaccaaagagtcattcctggtatttgattatgacacttctgaagctagaagggacctcagaccacctgctccaatccctgctgcctaaggttttgggggctgagggctggaaacccaggagctgcatctcccaggctcttggcctcataatcgccttctgtgagactgagggcaattaagatatgaatgacatgaactcgcttctctccatatcaacataaaccagaagaggcatacatctgtgggatagtcaatacataacatcctatctttatatggccatatgagaagataacttcagtgtccctatgatggtaagttcttgaatgtgagggcaagatggctgtgatagccatgactccccgctttgcctggttggacagaacccccttccccaaatgctcacagtcccccccttgagctgtgtctcactcagagaccctaaattttgcagacgaacaagggcatctttgcgttgcttcatctctgctcctcctctagaactatcccacaggctttctagacttagaatatctgacctgatgcaaatcgctatgtggccagtatgccacagaatgtcctaaacccttgctgcctcttatcaaaaccatgttgcacatctcatcatatagtacagctaacccttgaacagtgggggggttagggacactgacccccgactgctgtgcagtcgaaaatccacataaaacttctgactccttcaaaacttaagcactaatagcctactattcatgggaagccttacccatcacagttgattaacacgttttgtatggtctgtatattatatgctatattcttacaataaacttgagaaaatgttaagaaaaaaaaaaaaaaaaaaaaaaaa

SEQ ID NO: 23034 - DNA, 1649 bp, Homo Sapiens
ctgcttgcctgggaggcaataagggaaaggagggcgatagcaataaagtgaaaaggaggacaatgggcctagaagagagagaggataagagaagaaataatatcagcttagcatcataaaggcagagttgttggctttcaatacttttgaattttaaaagaatactgtactggaatgggttaacatcatcatctttagcatcctggtagcattattcagtagttaataaacagacattaaaacctctgcctggctggtttttgaaaaaggaacctgagggaccccaaactcagccactcttgtagtttccatctccggttcttttaatcctggccaagatggcggccttggagactttcttccggtcataggccagaccgagggcggccatgcaatcaatgaagaatgtggtgaagttgatgtgccagcggtactcactggcagagtagtcatagggaaaggagtggtggtagttgtggaagccctcacccacagctccaagtgaaaccaggatattctcccgggggctaatgttcttgtcataaggacgatatccgaagaggtgggcagcactgttcaccagccaggtggcattaagcaccacagcatatcgcaagaaagtggcaacgaacacactgttttgaaaagtttcaccccagaaataccagggcacaagcgtgggcaggatgaagcacatcatcagcaagccaggtttgtagtacctcctctggaacatcaccagtttctcagcttctaggtcagacaagtctagcgtactccccttctctttgacagctgggtgtttgcgcacaagcagccaacccacgtgagagaagaaaaagccacgtcgggaattatgaggatcagcatgtgtttctgaaaacttgtggtgggcacggtggtcacgagcccattcatagacatcattctggaatgccattgtgttggcaatgatcagaaagagccgtaggggcagccgagctttgtaagagcggtggctccacagacgatgagctcctgctgttatgcccagggcactgacaaaatagtagaataccccccaaagccaggtgtagaacttgcaggtaggaatcaaagtgatcccatacagggctcccaagtgtagcagagacataaggatgatgtttctccagacatattcaaccttggggcttgggccttccttatccttgtaggtggggtcatatatatcatcttttatatcagggcgaatgtcgtcttccaagtagaggggcatcgtctccaacttatctcctccattctgcaggaccctggagggaggcgctgtaatggtggtggtggtggtataggagcttttgtagagaagtgctgcaaggctgacgataaggagacctgctttgccgaggagggtaaaaaacttgttgctgcaagtcaagctgccttaggcttataacatcacatttaaaagcatctcagcctaccatgagaataagagaaagaaaatgaagatcaaaagcttattcatctgtttttctttttcgttggtgtaaagccaacaccctgtctaaaaaacataaatttctttaatcattttgcctcttttctctgtgcttcaattaataaaaaatggaaagaatctaaaaaaaaaaaaaaaaaaaaaaaaaaaa

SEQ ID NO: 23035 - DNA, 1302 bp, Homo Sapiens
gtccagatggcctgcaggagccaagaagtctggggcagctgaaaaaccacacaagaagtaaaacagccagttcctgccttaactgattaaccaacattacaacattccaccattgtgacctgtccctgtcctaccttaactgatcaatcgaccttgtgacagtcttcttctggacaatgggtcttatcatctccccaccatgtaccttgtgaccccctcctctgctaacaatagataaccactttttactgtaattttccattacctacccaactcctataaagcaaccccttccccatctcccttcactgactctgttttcagactcagcccacttgcactcaagtgaataaacagccttgttgctcacacaaagcctgttggtggtctcttcacacagatgtgcttgacaaaagggaagggtggatttgtccttctggttacatatgttctgctcactcattttgaatttaattaaacaaggattgcccttaccttttcatactttgtaagaaaccataaatacttatgcaccatgatttttttaaagaaacactttttattttgaagtaattatagtctcataggaagttgcaaaagtagtacatagagtccctgagtactcttcccccagtggtgacaactgtagtataatatcaattctgggaaattgacattggtacaataccaaatatactatgcctttttctctaaggcatgatgttgcagtagcatccttgtacatgtagctaggagaacttgtactaagcccagataaatagttgaagtacaagggcaaggagtgtgtctttgatattttaatagaaatcacctattgccctctagaaaagctgtacccttttccagtggcagagaaccttcctgaaaggcagtcctgtgtaatggtgtccatttcatcacacccttaaaacactcagctttaacaaacatgcagatttttgctgatgtgggagaaaatattaattattaatgatattaaggtgattatcttttcgtatgtttatagatatttgtatttctttttaaatgaactgctcatgacctttgtctacttttatttgggtttacttctttctcatttattcctataaactctttataaaaggaaattaaccatttgattgtcatatgttgtgaatatttttaccattttgacttttgaatttatgtctttttaatgaattgtagaagtttaaaatctttatggaataaatttatttagtttttcgtttatggaaaaaaaaaaaaaaaaaaaaaaaaaaaaaaaaaaaaaaaaaaaaa

SEQ ID NO: 23036 - DNA, 1141 bp, Homo Sapiens
gctattactacggatcttactgctactatgaccaccaccaccaccacatcagttactgagaactgaactagatgccaagcaaaaatggtaaacacttcatatacattatctttttaaacacaaaatgtactattaatccagttttacatataagaaaactgaggctcaaagaggctaagtaatttgtatgtgaacatgctttacactatgtaaaacaccttattagtagatatcactattattaagaacctatcagccggagaggaagaattggccttttatctttctaagatgcacagttgtctttctgtttaatggttttttaaaaatccccctgtgacaagctccagaggacaaataatttatttcttgtggtgtatggctctctaaatgaattaattgataggcatcccattgtcagtctcagggatgtggaaataaaacagacatgagatgttttttaccaaactaatttgtgctttaaacacataaataataaatatatatatattaaagtaaatgtgtatttaccgtctctcctgctccactttgaattcaagaacccgtgtctttgttgggtcactgcactgtcaattgagaagtttggttttgtttctttgagtgttagtaagtggcattaaatagtaaatattgccgggggaaagaaaggagaaaaacagctcctccaatccatccctgtttccattcaattaaaggagggtagaaagaatacttaagataattgtaataagtctaatagaatagcaggagccactcttttcctttcagtaggccattagctcagaactattttcagagtaatactaagatgatatttgcctcttcactgtgttggcacttgtattgataaggcaaaaacagtggagtcttagcaaaaattaagaccatgaaaacaaactgcactaggaataattctcttcttcattactgtttacttgcagggggaaaaaccattttcgtttaagaaagtccttggtgaagtagtaaaaatattaattttattaaatctcaaccttgagtacaagtcttgtcgttgactgtacttaaaagttttgtcctccccaaagcatatggcgtcaaggctgggcctaacccagtctcatgaccttgtgaatccagt

SEQ ID NO: 23037 - DNA, 2434 bp, Homo Sapiens
gtgaaccctggaggcagagcttgcagtgagccgagatcgcaccactgcactctagcctgggagacagcgagactccgtctcaaaaaaaaaaaaaaaaaaaaaaaaaaaaaaaaaaaaaaaaaaaaaaaaaaaaaaaaaaaaaaaaaaaaaaaaaaaaaaaaaaaaaaaaaaaaaaaaaaaaaaaaaaaaaattttctctgcatcacctttggatttctacacccagtgtttcattcattcagccttcaacagatacttttaacacattctgtgtgccaggactctgtgataaacaaaacagccatggaggaaagtaaatacctgacccagtattaggagagattagaaaggcctccaagtctgagagatggataggaattagctcagcaaggagagatgaggaaggttatggctgaggaactggcatctatgaaagccagattcagctttcccttcagagcctggctttggcatctatgaaagccaggctctgaagggaaagttgaatcttgctagagtggagaattgaggaagagatgagatgttaaggcaagccgagtctatgaggtttgggccactgtatggttgtaaagaaccctggatctgggattaggagtcctgagttctagatatgtttctgctaccaatatgttagtcatcattctagtaacacttcacatcttttaggtgtgccatgatgggcactggggtacaaaaatgtgtaagatgtatgtagtcccctccctcagagatctgtcagtttaatgaggcaagcaggctaattaagaacccctgtagtaaaggaacagttacctctgctgtaagaagtcagaattgagctgtgtgttactttaagcactttctctgggctttgatgatctcacctgtcaaatggtaaataaccactgtcctatgtagctggtaaactgatgagaagacagacaactttgtaatgattggcgtttgtttggcattttgtggatttcaaaacacttttgacatcattaattcattgaaccttaactgcaatcttatgacttaggaaatttccccacaatgtacagatgaggaaactgagagaggttgaggcttgttcatagtttcacagcttttgattaacaaaagttaggattataaatccaaatcccgtgctcttattttgaaaagtataaagatggcaacctttctttctatcccctacttagtggcaaattatccccttccccttttcacagtcaccagaaatgcagagaatgtctgctgtgtttgaaaagcagatctaagctgactggggagaaagaaaggagcttatttcaggtcttcttcaggctggactctaaacttttaagatcatgtgcgcccgtgctcccatcagctcctgctgttccatctcatgccatttacagagtgccatttactgagccactacttcattggctactcatagcaacttgtggggtagacaaagtgcactttacagatgggcaaactgaggtccagagtccctgaattgtacatgtcagaaccaggattgaatctagaagtcttgggctcctgacaccaaacaggtgctcttaacttgcagaatgtaggttcctttgattcagttcggttcaaacaattcttgaatataacccatgtgccagagactttgctatgcaagagagcctctagttaggctcaaaccgtcttggtctagtgccttacttaagaacagggacttgtattatttacttctctgtccccaggcaggaccttgatccaaaaatgctttgctgttgtttttggccttaatctgccagaaactagagggagcagatggccacagcaatgtgggttatgaggatgtgatatcaggcagggttgaaggatgaattgagagccctgcacccaactacttctgtgtctgtgcctaggcccttgtcagggtagtctctatctgagagtgtagctggtcagcctggtcccatttctcatttccagtcacctccccctcttgccatcccatataatggggttagtctcctggacagatctcatacagaggctgctgggatctgctgtccaaatgaccctttggacctatttcccagccatgttccaagatgatggtgaggagtctagccccacagccagtatgctatctctattcagataactcccagctcacaggcctcccaccaggctctcacccactctgatgttttcactcctgactcctaagaagcagattggcaatttagtgtgagtctgtcagacagcctagagagtaatcaatactgagagaaatggacatatttcctgtttattcaaaatcctgatgaaaattttaaggagcactatttgggaagggatgactgggaaccttgcaagaacaaacagcttaaaattcatgaacagaaatagcaacgtttattcatgatgtttcaaattc

SEQ ID NO: 23038 - DNA, 1981 bp, Homo Sapiens
agacatcaggtttcatcatgttgaccagtctggtctggaacccctgggctcaagcaatcctccctccttgtcctcttaaagtgttgaaattatgggtgcgagtcactgcgcttggccctaaatattttcttcttctacctccacttccctgctacttctcaagcccctcaacaatatcatcattcactgatcttgtctaacatcttcccattttcattctcctctcaaaatccttgctcctcacagctgccagaataaacttttgttagtttatatcggatcatatcattcccttaatagttttccaaatttcttcacctggcccagaagctcctatgtcatccagtcccacctaagacatgaacatcctctcccctgagaggtttcttttgctttctgtcttctcgtcctgcttgctttcttccagacctctgaaaaagctgggcgggccctggaacattgctgtttcctcattttcaagtgcctttccttcttctctgcggtgccaactctctctcatgtctctatttgacatcgctgctagaacatcacttcctgcggtatctgcagtcaggcatcccttccataagaattaacaccacgttcttgaccttagcagtaattgaaattagacagtcactggttaaatcagtcacttcacatgaggtcagggaccaattcctcctttctaccatatcaccaggaaaaatcataaggcatcacagagaatagaaaaggtatatttgctaaataaatttaaacgttactaagaacccacccattaatatggaagcgattcctctgttaattcatggaatgtcacaaatgagctgaattcattcaccctcacggtgcctctaagttataaaccactaagtcatccatatactcccaaactttaccaagattcagtgtcttagggtacaacttaaaaataataacaaatgagaaatttgaaattttatgcctcaccagttttcaatttatcgtccctcatatcctaatacagctttatgatactgaatcaggatcctgtaagcattcctcctttgccagctagttgaaagttaagcttcatcaatagaggacactcgagtgatggtgaggtgcttgatgcaggaaggtgcatcccttccaagactcacactttagttattcagtaatgtttatcattaatattggagtttaagaatatgaatgttaaagaatatatttaagaatactaaagaatatactttgagaaggcaagaggaaaacttctaatagcacatttgttttaccttttattaaatattgcattctgcatagaaattaattcagaaaactcctacataaaccatttatatgagtcttttgtaatcactgaaagaaatagactgttgacagtcaccttttaaaagggtgtataccattcaactcttaggtataccatttattattttgtttcctgcaaactcaaagcatctaggagtgagattacaaaaataacaacaacaacaaaaaagcagtgttggctaatttgtcagcatatggaagttaaatttcttacagacacacaacttctgtgtaaatgtaaatcacttggccattctagctctattatcaaatttatagtttcccagagacaaacattgctttggcttttgtctggttttggatagttggttgtcttttctcttcatgcttccttatctcctttatttcatttatttttaattaaaaaacaaagagacaggaattacctatatttcattgttgaaggttaaattttgtttgtatttgtaccttagttccacacttttttctttctggaaacgtatatgataaacatatgcttgaaaacaaaggattacatggatattctgaactcccaaaaagagaatctcatgactaagccaatttcacatttctaattagcatacttgctttcattgagtgttttgaaatttaactaaacataaaattaaaaaaaaaaaaaaag

SEQ ID NO: 23039 - DNA, 2410 bp, Homo Sapiens
cggccggctttttttttttttttttttttttagtagagacaggatcttgctatgttgcccaggctggtctcaaactcctgggctcaagcaatcttccctcctcagcctcccaaagtgctgggattataggcgcaagccaccttacccagccaaaattaacatttataatagtgggtttgatgattggtcttagtagtatgttttgttgaacttctcaaaaatgagaaagtaacgttttatataactggacatgactgaatgaaatcattttctaaaagcttataataagaacatgaaagggtagtatggtcaaaatgtagatttttttttcctgcaaaagaaccatccacaggcaaattatctaagtcccctgaatatgaaatatgacactattagaagtggtaaggtgcaactgcatgtatgacaaagtaagttgctgaatgtcttcacaatcaaaagcactaacttttaaaggcctcaagtactaaagcataattttagggatagaggaaagtgttcttgtttttgtaaatgagtatgggtcatggcatgactttggttttattttgggtcctcaaactgagagctttcttatgataatctgtatataaatagcaaaaaaaaacaatgggaatgttcataggataaataatatgagtgcaaatttttgccagaaagttctggaaatgtaggacttggttctttttataagtgcttttaaccttttcagactcattaatttcataaaccaatttaagcaattatttctatcagctacagatattttcttcacaaatataaagggttttgctcccctccccatcctccagcctccaccaatttgtgcctgtaactgccacttgatagctgctcagtaagactttgtttaaatatcaggttctagtgccaacaaatccagaagtcagaaaaattctaagttacaatcgccagaatatctttcatgcattctattttactttattgttacagtttaaacaaattcagaaacgtggggtgtttctggctacttgagtaaaacgcactgcaaacgcaaagggaacaacgctgtaaacttaaatgatttctgaacagctcaggatcctcctggaggggatccttttcatctcacatattgattctgaacactatgttagcacctgctcccagaaggtcccttgacactggagcaagtcagaatatcttaatatcatagcttatttaacagcaggaaagcaactttaacatagacttgaggtttaggtagatctggtattatctagaacccaggcttaaattttgcaaaaagtttccaaagagcataagaaagtaaaacagaggtaccagaactgaagacatcattaacaaacaaaatatttccactcctaaccaaactgcaaccctttcagtatagcctgaggtatttttaaacatttgtacaagctaaagatcattcacagtttccaaagctgctttttactgagatagcttcaaattttcacaatatgtgactttcagacatgttttcatataccagagtctctgccctcagactcatggaaacatcagagatatttagtggcagaaaatggttcttctagtgataagggttctatttcccaattattgtgctattcctaggatgtgattaaaaaaatatgaaatttgcaatttgtataaaaggaaaggaaacttgcttaaaattcaaaaagcaagtccagtctggtggaggtatgtaagatattaaataatagagtcagattctttcttgaacattccagatgaacttgacagcagagagttctggttttccaacattttctccatcttttcttttccagtggttttactgatctctctttgcttcttactatggatccacgggataaaacaaagcacagcacctccaataaggggagggactccagcgaggtagaatgccacatcataggagcccagtttgtcacgaagtaaccctgcaatgggtgggccaacagtcatgggtatagacatgaatccgagcagaaatccaattgcttgggagacatcctgggcaccaactaactcaaaggctatgggagccataatggaaatgaagcatccatcgaagagacccatgatgaggcacacagcaatgagggccccaaagatgctacacagaggaatcatcatggacatcagaccaatgaagaaaaaggagagtacctgtagataaaccttcttcacaccaggcacataatctgcaatccggccaaagagcagtcgtccaactcctgaagtgacgccaatgcacatgagaacaacctctttatttttttcatcttgaaatctttcatttacatgtttcatctgaacagtcaaattgcagcagatgttgagatcaagtgaacataaggcacaaagtatccaaaaa

SEQ ID NO: 23040 - DNA, 856 bp, Homo Sapiens
tgctctccaagatgtcaatgataagtatctcttattggaagaaacagaaaagcaggctgtccggaaggctttgattgaagaacgtggccgattctgtaccttcatctctatgctgcggccagtgattgaagaagaaatctcaatgctaggggaaataacccaccttcagaccatctcggaagatctaaaaagcctgaccatggaccctcacaaactgccctcctcaagtgaacaggtgattctggacttgaaaggttctgattacagctggtcgtatcagacgccaccctcttcccccagcaccaccatgtccagaaagtccagtgtctgcagcagcctgaacagtgtcaacagcagtgactcccggtccagcggctcccactcgcattcccccagctcacattaccgctaccgcagctccaacctggcccagcaggctcctgtgaggctgtccagcgtgtcctcccatgactcaggattcatatcccaggatgccttccagtccaagtcaccatcccccatgccgccagaggcccccaaccagttgtctaacgggttttctcactatagtttatcaagtgagtcccacgtggggcccacgggtgcaggccttttccctcattgcctgcctgcctcccgcctgctccctcgggtcacctctgtccaccttccagactacgctcattattacaccattgggcccggcatgttcccgtcatctcagatccctagctggaaggactgggctaagcctgggccctatgaccagcctctggtgaacaccctgcagcgccgcaaagagaagcgagaaccggaccccaacgggggaggacccactaccgccagcggcccacct

SEQ ID NO: 23041 - DNA, 1247 bp, Homo Sapiens
cgctttttttttttttttctcattacaaaagttgatgttatttctcgtggtaaattcagaaaaacatcagggagtaaacaatgccaacatctgagcaaacattttggggtatatctctattttcatgtttacattgtcgtttaaaaaacaatcaaacgacattagcagttttccaacattttcctttccagttaaaactgtataccgttaccattttcccatcatactcttcacctacgatactgttttaagtggctgtatagatttccactttcacaacagaattagcagattcccaaaacttgaatatttaattttaaaaaaaattcttaataactgatattaaatttatatacgcaaatctgacacattacttccttaggataaattcctgtacgcacagtctttccattttaagcctattatactatgaaggagtctgaatcaacatctaagagctccgagagttcaacaccagcctgggccatattgtgagaacacgtctctacagacgatcaaaaaattagcttggtgtggtggcgcgcgcctgtgatctcagctacccaggaggctgaggtgggaggatcacttaagcccgggaggtcgaggctgctgtgagccgtgagccactgatcataccactgcactccagtctgggcaacagagcgatcctgtttcagagaaaaaaaagatccaagacctctgtagaccacactgacagcactgctactatttgcaactggtcacgacctatctgggctttaaccttctcttctataaaattagggatttgaactacgtgatgctcctaaaatacgacaccaccgttgcactcctcagtaaaaaccattaactgacttgtaatattagcgtttacaaactctaaaagcattagtaaaaaaattagtatgtttaaagactaaaacaaatgcacagatcaagggtagttaaatccttccaagttagttcaaaatgtgatataaaagctgtacacggctgaaaaatatataaagatgataaagcgaaacttctgtggaagttccagtgttctctcttattccacttcggtagaggatttctagtttcttgtgggctaattaaataaatcattaatactcttctaaaaaaaaaaaaaaaaaaaaaaaaaaaaaaaaaaaaaaaaaaaaaaaaaaaaaaaaaaaaaaaaaaaaaaaaaaaaaaaaaaaaaaaaaaaaaaaaaaaaaaaaaaaaaaaaaaaaaaaaaaaaa

SEQ ID NO: 23042 - DNA, 1299 bp, Homo Sapiens
gggcaattaaagagatttgaatggggctgtatattcaattttatggaattattgatatttttcttaggtatatttcttaatattgtggcaatgtaaaataatatccttattcttggggagaataagctgaagaatttaagggtggagaggaaacccttctaggaagtagttcaatgaaaaacctaaaaatgcccaaataaacattcgcttacatattatatatcttgggcttctttttatgacagttcattcagggacccagtcagtaaacaggtagttaacttcgtgtaaccaagcaagggttttgtttatcttttttaaagtagaaaaaagtgaggctcaaactctctctttctccttgtcataactattggtttacagtctttatttgtttaaaagtaaagcacattgtatgtatttatttggcaatacatgaggccattaaaaccctgagcctaaggtaccacagttagtctcatttgcctcttgtcctgtgaactccacttagaatgtcattgaacttgggcagacataattctagtgtctgttccaaacgcactgtgtcacagaagctagaattaccattagaggcacaaacccctgagaatacacaagggggcacgcttccagtagatgtgttggggaaggaggagggcagaggggacaggggacaggattcagctttgtggtgggtcctgagggttcctaccaggggtagccaggatctgggaaacagatcagcgactctagtctgaagtggctgcctggttcgggggctgccttcagcaagattcaggcaggagagacggaaatagccaccttccaggcgtgagtcctggagataaaaatggattttaacctaggactgccgggagctggccctccgcggctgctcagactagggctgtgtgtgctggctctcgcctgtttccggtgtctaactggcttgtttctctttatggcttggcttcattccgacctggggtggggccacatccaacccactgcccactggctgtccgtctggcctgccccgcggttccaaccacagtggtgaagcagcgcttgcagatgtacaactcgcagcaccggtcagcaatcagctgcatccggacggtgtggaggaccgaggggttgggggccttctaccggagctacaccacgcagctgaccatgaacatccccttccagtccatccacttcatcacctatgagttcctgcaggagcaggtcaacccccaccggacctacaacccgcagtcccacatcatctcaggcgggctggccggggccctcgcc

SEQ ID NO: 23043 - DNA, 1137 bp, Homo Sapiens
tggaactagaatttaggggcagttggatgaaattgcaaatttagaaggggaataagaattttctagtgctatataaagaaatgatgatggagacaaaagccttgctttcctctttttagaatttattttcgatttttagcatactgtggggcttttagagctaatatgatctaaattcagaaaatttaattttcatagtaggccaggtgtgaattacttatgtttgctatagaatgcttatttagactaacaataaatttactttgctttctaaggccagtcagcgaatgtggggatgaggcaggatgttttaaatgagccagagatgatccacaaagtgaacagtcgacacagaggtctttgagttggatggttgcaaatatattgacattagagtgaaaactccttcctttgggtaaactaaagaaagataaagtatactaaaaaattttaagatggtgttatacaaaaaaaagtttgggtctaacgtgtccacaaagactgtcaagtgaagaatggtggagattcttggtgtttgagcagccaacctggatgagtgacttcagggacagagcagaggaaagcaaaatgaatttcctttatttacccaaaacttgttgactgaatttttgtataggtccgggaaaataagcctaaacaaatagttgtagccttagaaaaactgttttcccatttctttctgagttagaatcagcatagcctccctgtcgccttaaatgtaaaaatcctattttgattaataccccagcctaagagttatagcaatacgagagactgaatctatttttgtttcgggtctttacctcatagtatgaaattagtaagacactgcatagattttgccctgaatactggtgtgcccaggtatgccgtgctctctctctgtttccagtggtggtaattttaaggcctaaagaaagctggggttaatcctgaagctaaaagtaaatgtttcttgaattgattttgttctgtggtacaaataacatctatgaatatcatatctgtatatatctgaaccaagttgtgtgcagagaggttgatataactatatttacagaaaatgatttttacaattaaagttcacattttaacatgaaaaaaaaaaaaaaaaaa

SEQ ID NO: 23044 - DNA, 4671 bp, Homo Sapiens
cggagacgtgtatcggacggtgggccgcagccatggccgagagaaaacctaacggtggcagcggcggcgcctccacttcctcatcgggcactaacttacttttctcctcctcggccacggagttcagcttcaatgtgcccttcatcccagtcacccaggcctccgcttctccggcctccctgctcttaccgggagaggattccacagatgttggtgaggaggacagcttccttggtcagacttctattcacacatctgccccacagacatttagttacttctctcaggtatcaagcagcagtgatccttttgggaatattggacagtcaccattaacaactgcagcaacctcagttggacaatcaggattccccaagcccctgactgctctcccttttacaactggatcccaagatgtctcgaatgcattttcaccatccatttcgaaggctcaacctggtgctccaccttcctcactgatgggaataaattcttatctgccttctcagccaagtagtctccctccttcatattttgggaaccaaccccaaggaattccccaaccaggatacaatccatatcgccatacccctggcagcagcagggctaatccttacattgcaccaccccagctgcagcagtgccaaacaccaggccctcctgctcatcctccaccttctggaccccctgttcagatgtaccagatgcctccaggatctttgccaccggttccttcttcagtgcagtcaccggcacagcagcaggtacctgccagacctggggctccctctgttcaagtgccatctccttttctacttcaaaaccaatatgagcctgttcagccccactggttttactgcaaggaggtagaatacaaacaactgtggatgccttttagtgtgttcgactctttgaatcttgaagaaatctataattcagttcagccagatccggagagcgtggttcttggcacggatggagggcgctacgatgtttacctctatgaccgaataaggaaggctgcctactgggaagaggagccagccgaagtgagacgctgtacttggttttacaagggggacacagatagtcgatttattccctatactgaggagttcagtgaaaaactagaggctgaatataaaaaagctgtaaccactaatcagtggcaccgaagattagagtttccaagtggagagacaattgttatgcacaatccaaaggttattgttcagttccagccctcctcagtgccagatgaatggggcaccacgcaagatggacagacaaggcccagggttgtaaagcgtggaattgatgataaccttgatgaaattcccgacggggagatgcctcaagttgaccatttggtgtttgtggtgcatggcattggacctgtgtgtgacttacgctttaggagcattattgagtgtgtggatgattttagggtggtttctctcaaattgctgcggacacatttcaagaaatctttagatgacgggaaagtaagcagagtggagttccttccagttcattggcatagttctttgggtggggacgccacaggtgtggacaggaatattaagaaaatcactttgccaagtattggtcgatttcgtcactttaccaatgaaactttgctagatattttattttataacagccccacctactgtcagacaattgtggaaaaagtaggaatggagataaaccatctgcatgcactctttatgagtcggaacccagacttcaaaggaggtgtctctgttgctggtcacagtttaggttctttaatattgcttgacatcctgtctaatcaaaaagatttgaatttatcaaagtgccctggacctcttgctgttgctaatggagttgtgaagcagctacattttcaggaaaagcagatgcctgaagagccaaagctgactttggatgagtcgtatgaccttgttgttgaaaatgaagaagtcctaactttgcaagaaactctggaagcacttagcctctctgaatattttagcacttttgaaaaggaaaagattgatatggagtccctgcttatgtgtacagttgatgacctgaaggaaatggggataccccttggacccagaaagaagatagctaactttgtagaacataaagcagccaaactgaaaaaagcagcgtcagaaaagaaggcagtggcggccacttctacaaaaggacaagagcaaagtgcccagaagactaaagacatggcttccctcccctcagaatccaatgagccaaagaggaaacttccagttggtgcttgcgtgtcttctgtgtgtgtgaattatgaatcttttgaagttggcgccggacaggtttctgttgcttacaactcattagattttgaaccagagatattctttgccttggggtctccaattgctatgtttctcactattcgaggagttgataggatagatgagaattacagccttcctacctgtaaagggttcttcaatatttatcatccgcttgatccagtggcatatagattagaacctatgattgttccagatttggacctaaaagctgttctcattccacatcacaaaggcagaaaaagacttcatttagaattgaaagagagtctctctcgtatgggatctgatttgaagcagggttttattagctctctcaaaagtgcttggcagacattaaatgagtttgcccgtgctcatacgtcttcaacccagttgcaagaagaattggagaaggtggccaatcagatcaaagaagaagaagaaaagcaagtagttgaaggtaaatttgacatttgaggcattttctaatacaaatgtttcatatgaacataatacttaaaagttatatgatgatgcatttcctttctagactttttggttaaattatagaagctctttaaaggaaaatctgttaagataaactgtactgtcaatagcattacttcaaaatccatgccatctttttttagtgggtttttatctgatagttactgaactttttcctctgcaatttaaaaattatattgagattcttaaggccagagtggaatatccgagttgagaactcaatttgttttagggtttgcattttaaagactcaatctgagaggttttcttcctgaaactgttgtttaactatgttacagacttgacatgcaatgtgaaggtcatcgtgctgtgatgtttttgacttcttcagattctaatcctgtttcctttctttctacaatgctttctcaccccttatcttcacaacttctctcagcttgttggctcttttctcctctctctcgggtaaccagcccctcttcccctggctctttggaggaacggggagtgagcctggtagctcctcaggttgctacatgcgtcaagcagtattctcattgagcccagaaagtcagctaaagtcaaaggataaagattaagtgattgactttgatattgaaatggtttaaattctagcagaaaaggttgttgaaagtccagatttttccaaggatgaggactacttaggaaaggttggaatgttaaatggaggccgccgaattgactacgttctccaagaaaaaccaatagagagttttaatgaataccttttcgctcttcagagtcacttatgctattggtaagtgttcttaaatttggtaacatttgagtgggcttttggtgctagcacgtgcagcaattttagttttagtgagattcttttactgatacaatgtactatgaatattcatttgaattactatatgttcagaatcgttatttttcccccttagttacccacaagatggcagtatgtcatctgcttttgaccaaagacccttggttcttgcacactgtttttgtgggaatgcctttcacagtgggagtggtagggactttgaaatgccattctttcctgtatccctgtcaccaaggagaattgcaacacagctattttggagctaatcagtattcatctagtttttaaggacagctctgagattacgctgctttatttattacactgagattacattgctatcatttgcccttcttagatagagttgaatagaatagaacctgcattttcaaccattgtgcatagaagttaatttcttctaattgtctcttaagtaaatatgcttttccttttcatagggaatctgaagatactgctctgttactacttaaagaaatttatcgaacaatgaacattagtccagaacagccccagcattgatcaaacttcagttttactgtactttcttgtctgcacagaaagtcccagtacaacttccattgctgagaaaatcctcagaggactttcccacttcgctcctgtgatggatgacagaagagtgattcattaacaattgctcagccacaattctcggatatagggattcaaaagacaggatacagaactaacacagtgaaaaaaatcagtaccacatttggacagtataggtgagaaaacataattataaaaatgatgccatgaaaaattccacagatcagtttagttgtatagttgtcaaagttatatgtgatatcaatgaagaaatatttgtagcatgtaaacggttatttctgtttcttaaaaagtattgttagtgggctattaaacttggatttttcttttttaaaaaaaaaaaaaaaaaaaaaaaaaaaa

SEQ ID NO: 23045 - DNA, 3624 bp, Homo Sapiens
ggtggactcggcgatggagctgttatttttagatacttttaaacacccgagcgctgagcaaagttctcatatagatgtggttcgttttccatgtgtggtttatatcaatgaagtccgagtcatacccccaggagtaagagcccatagcagtctgccagacaatagagcatatggagagacatctccccatacatttcaattagacttattcttcaacaatgtaagcaaaccaagtgcccctgttttcgataggttgggaagcctggaatatgatgagaatacttccatcatctttagacctaactcaaaggtgaatactgatggtctggtgctaagaggctggtataactgtctgacactggcaatatatggatcagtggatagagtgataagtcatgacagagactctccaccaccaccacctccaccgccaccacctccccagccacaaccaagtttgaaaaggaatccaaaacatgctgatggggagaaagaagatcagtttaatggaagccctccaagaccacagccaaggggaccaagaactcctccaggaccccctccacctgatgatgatgaagatgatcctgtgcctctgccagtgtctggtgacaaggaagaggatgctcctcatagagaagattactttgagcccatttctcctgatcggaattctgttccccaggaagggcaatattctgatgaaggagaagtagaagaggaacaacaagaagaaggagaagaagatgaagatgatgtggatgtagaggaagaagaggatgaggatgaggatgatcgacgtacagtagacagtattcctgaggaggaagaggaagatgaagaggaagaaggtgaagaggatgaagaaggtgaaggggatgatggttatgaacaaatttccagtgatgaagatggaattgctgacttggaacgtgaaacatttaagtatccaaactttgatgttgaatacactgctgaagacttagcttcagttcctcctatgacatatgatccatatgacagggagcttgtaccactcttatacttcagttgtccatacaagactacttttgaaattgaaatcagtagaatgaaggatcaaggtccagataaagaaaattcaggggcaatcgaagcctcagtgaagttaacagaactcttagatttgtatagagaagatagaggtgcaaaatgggtaacagctttagaagaaattccaagtttaataataaaagggttaagctatttgcaattgaaaaacacaaaacaagactcccttggccagttggtagactggaccatgcaagctttaaatttacaagtagcgcttcgccaacctatcgccttaaatgttcgacagctcaaagctgggaccaaattagtgtcctcactagcagaatgtggggctcaaggagttacaggactgctacaagcaggagtgatcagtggattatttgaacttctgtttgctgatcacgtatcatcttctcttaagttaaatgcttttaaagctttggacagtgtcattagtatgacagaaggaatggaagcttttttaagaggtaggcagaatgaaaaaagtggttatcaaaagcttctggaactcatacttttagatcagactgtgagggttgttactgctggttcagctattctccaaaaatgccatttctatgaagtcttgtcagagattaaaagacttggtgaccatttagcagagaagacttcatctcttcctaaccacagtgaacctgatcacgacacagatgctggacttgagagaacaaacccagaatatgaaaatgaggtggaagcttctatggatatggatcttttggaatcctcaaatataagtgaaggggaaatagaaaggcttattaacctcctagaagaagtttttcatttaatggaaactgcccctcatacaatgatccaacaacctgttaagtctttcccaacgatggcacgaattactggacctccagagagggatgatccgtaccctgttctctttagatatcttcacagtcatcacttcttggagttggttaccttgcttctgtcaattccagtaacaagtgctcaccctggtgtgctgcaagccacaaaagatgttttgaagtttcttgcacagtcacagaagggtcttcttttttttatgtcggaatatgaagcaacaaatttattgatccgagctctgtgtcacttttatgatcaagatgaggaggaaggtctccaatctgatggtgttattgatgatgcatttgccttgtggctacaggactcaacacagacattgcagtgtattacagaactgttcagccattttcagcgttgtacagccagtgaagaaacagaccattcagatctcttgggaaccctgcacaatctttatttgattacttttaatcctgtgggaagatcagctgttggccatgtttttagtctggagaaaaatctccaaagtcttattactctaatggagtactattccaaagaagccttgggtgattccaaatctaagaagtcagtagcttataattacgcatgcatacttattttggtggtggttcagtcttccagtgatgttcaaatgctagaacaacatgcagcatctctcttgaagctttgtaaagcagatgaaaataatgctaaattgcaagaacttggcaagtggcttgaacctctgaaaaaccttagatttgaaattaactgcatcccaaacttaattgagtatgttaagcagaatatcgataacttgatgaccccagaaggagttggccttaccactgccttacgtgttctctgtaatgttgcatgcccaccacctcctgttgaaggtcaacagaaagatctgaaatggaatcttgccgttattcagcttttttctgctgaaggaatggacacgtttattcgagttctgcaaaaattgaacagtattctgactcagccttggaggctccatgtcaacatggggactacccttcacagagttactactatttcaatggctcgctgcacactcactcttcttaaaactatgttaacggaactcctgagaggtggatcctttgagtttaaggacatgcgtgttccttcagcgcttgttactttacatatgctcctgtgctctatccccctctcaggtcgtttggatagtgatgaacagaaaattcagaatgatatcattgatattttactgacttttacacaaggagttaatgaaaaactcacaatctcagaagagactctggccaataatacttggtctttaatgttaaaagaagttctttcttcaatcttgaaggttcctgaaggatttttttctggactcatactcctttcagagctgctgcctcttccattgcccatgcaaacaactcaggtatcacttccatataacatgcatcttataaatgactgcagtaacactttttaaaaagccagtgattttgttaaaaaccaaaaaccctcatctcccttcctcccaaaaagacataaaataaccggatgagggggagataaaactgaaacaagttggtcattgaggaaatatgggggtaacattttaaataaatttttgttaaagtgaaaaaaaaaaaaaaaaaaaaaaaaaaaaaaaaa

SEQ ID NO: 23046 - DNA, 4214 bp, Homo Sapiens
ctgcggaggagtccgagacgcagctgccgcgccggggcctgagctgccgctctccgccgcccgaaaacccggagtgccccgcacaggtttagacccagtgtgcctggtgggctgtgcccaggttcagagtcatgccactctgtgggtgaagcttgaggcaaaaatggagccacttcagcagcagcagcagcagcagcagcaacaacagaagcagccacacctggctcctctgcagatggatgccagagagaagcagggccagcagatgagagaagcccagttcttgtatgcccaaaagctggtcacacagccgactctcctttccgccacagctgggagaccttctggcagcactcccttaggtcccttagccagagttccacccaccgcagcagtggcccaagtgtttgaacggggcaacatgaactcagagcctgaggaagaggacggaggtttggaagatgaggatggggatgatgaagttgcagaggtggctgagaaagaaacccaggctgcttcaaaatattttcatgtgcagaaagtagctcgccaagatcccagagtggcacccatgtccaatctacttccagcaccagggctcccaccacatggacaacaagctaaagaagaccataccaaagatgcttccaaggcctcaccttctgtctccacagcaggacagccgaactggaatctggatgagcagctcaagcagaatggtggtttggcctggagtgatgatgcagatggaggccggggaagagagatctctcgagattttgccaagctgtatgaactggacggtgatcctgaaaggaaagagttcctggatgacctcttcgtctttatgcagaagagggggacccccatcaaccgaatccccatcatggccaaacagatcctggacctgtacatgctgtataagctggtgaccgagaagggaggcctggtggagatcatcaacaagaagatctggagggagatcaccaaaggcctaaacctgcccacatccatcaccagcgccgccttcaccctcaggacgcagtacatgaagtatctgtatgcctatgagtgtgagaagaaagccttgagttccccagccgagctccaggcagcaattgatggcaaccgcagggagggccggcggcccagctacagctcctccctctttggctactcacctgctgcggctactgctgctgccgctgccggggcccctgcccttctctccccacccaagatccgctttcccatccttgggcttggctccagcagtggtaccaataccagtagccctcggatatccccagcaaccactctcaggaaaggtgatggagccccagtgacaacagtgcctgtgccaaatcgtctggctgtgcccgtgaccttggcaagccagcaggctggtactcggaccgccgcactggagcagctgcgggagcggctggagtcaggggagcctgctgagaagaaggcatcgaggctgtctgaggaggagcagcgcctggtgcagcaggccttccagcgcaactttttcagcatggcacggcagctccccatgaagatcaggatcaacggcagggaagacagagcagaggcctcggctgcagcactgaacctgaccacgagtagcattgggagcattaacatgtctgtggacatcgatggcaccacctatgcaggtgtgctgtttgcccagaagcctgtggtccacctcatcacggggtctgctccccagagcctcggcagcagcgccagcagcagcagcagctctcactgttcaccaagtcctacctcatcccggggcacccccagcgcagagccctccaccagctggtccctctgatgggcaggacccagcttcccacttgccactctcctgtcgagagtgaaggaagttgatgcacagaatttacctcatctcacagagcccacgtcgacgagcaccatttggccagacattgagagtttggacgtgtccgtctgtccaggctccattcaggtcctgctgtactctgggggcagggagaggctagaggggcaggacagacagcgttgtccaatcagggattgtcctggagaactgggtgggggtctgtgggtgtccagcttcctccagggttccccagccacctcccagctcagggcacagtgtatcgacaatctgtcagccgacgcagggctggaggccctccatttccctccccttttaatttatttccctgaccctgccttctgccatgaacccaggccactagtctcttcccctgtttttaagtcccatgtggggctgccaggagccaagagcatgccttcatgcccttctctgcagagcatgggatggggcccttccagcccactttgcctactgttaggttcctggggtacgggtccctcaaacacaagtcttgaatcagtcctcagggccccagatcccccttctaatagtctgaaggaagaggctgtgagggcagttcagggccagggcccacagggcatctgctgatgggaaggcagagcctcggggctgcccagccctggcacctgcttcacacggaccattctctgaccgcccccgccaaacctcatgctccccacttgcccttattggcctgctttcccaaaaacagcccactcatcctttccccagccctcttcagccctccccagtcctccccagccttcttcagccttcttcagctcagccctcttctatttcttatggggccatcttggcctcaccatccccacacgtgccgatgtcaggttcattgaaatacctcagatttgtaattgttgatgtttgagtcttcaggaagtatttgcatctctgaaatcttttttatatgtgttttgctgacttttgttttttttttattttaaaatttttatcgtagcaccaaagaaatgaaaacagatcacccccaaagccaagcaagtgattgggtaacccggcccctctggcccttccctcaagcccagtgaggaggtgggtggaggcatgcaggggagacgactcagggatcgtgggggcggggaggtggagtggagaggcccgctctcacaccgggtcgggccctgaaaccgtaccagttctgaagaccgttttctgccacacccccacccccagctgaccagggaggcagaggacacctccccatcactcagcattcccagctcagggcacaggcaggctggggtcctcgctggccttgccagaggttgagccgccccagggtatgaggagatgaataactccacagctcctcctggaccctgcgcgggagcaggcagctcctgtgctgtaaagaaaattgattcgcttgcggctcacctcagtcgaggaagccctggaatgttcagcagaacaccaccactgtgacatggggctgtggcagtgggagacaccgcgcgtggcgtgggtgtgtgtggcagcgtggctcgcattcagtcctgtgtaggagaggaaagggaatcaaaagcttgagcacaaacagatacctcagcccggtaagctgcagctctgctcaactgcgtcttctctcagccctccacacacactcacccccactcccacacacatacacacacacacacacataccccatctcccgagggctgacctcctctggcctcagcctgcagggtgtgggcagagaagggcatctgggacgtggtgccagtgaggagcccagttggctggcactgggcccatttgaaggtgtctcagacatttggccagtatgtctttctcaggggtttggtcacaaaggatggactcttcccacccagaggatgcagggaaagcacactgtgtctttccggtcattggatcctctccctttccccaggcagctcgcctggccacaccgttggagtgaaccctcactgccctcaaggacaacagcagggtgtcacccagagcccgatgaggggtgccagcaggtgcccccacgagtggggccttggcccaagcagagcttcccctgaaggtgccatcagccagggcagctctgtcccctcctgctctccatcttatatgtattctaaccaggaaaaatgtgatagcacatgggtagcctaggcagtgagtaaatacctcagatgtcctcctgcagcaagtgtctatatgttgtggttattttctatcttacatgttctcgaatgtttatatttcaataaacctctacctcttcacacaaaaaaaaaaaaaa

SEQ ID NO: 23047 - DNA, 1520 bp, Homo Sapiens
gcggccgcgaattcggcacgagcggcgcacaagatggcggctctggcggcctaaagaaggcggccgcggctcagccgtgggctctaacgcggggctgggggccggagacagacttcgcccaggtgacgggtagtaggggcggcgccgcttggcctcgtggggtgtaagacccacttgctgttgcccccggaccttgccgccacaccagccctgtcctggggcggaaccgaaggaaggtcgggccctgctgccccgccccgtccttcctccttcccgggcggtcactgtgcgtggctcacttttagagtttacttcaaccacgtggagcttccatggcggcctctcaggtcctgggggagaagattaacatcctgtcgggagagactgtcaaagctggggacagggacccgctggggaacgactgtcccgagcaagataggctcccccagcgctcctggaggcagaagtgtgcctcctacgtgttggccctgaggccctggagcttcagtgcctcactcacaccggtggccctgggcagtgcccttgcctacagatcccacggtgtcctggatcccaggctcttggtgggttgtgccgtggctgtcctggctgtgcacggggccggtaatttggtcaacacttactatgacttttccaagggcattgaccacaaaaagagtgatgacaggacacttgtggaccgaatcttggagccgcaggatgtcgtccggttcggagtcttcctctacacgttgggctgcgtctgtgccgcttgcctctactacctgtcccctctgaaactggagcacttggctcttatctactttggaggcctgtctggctcctttctctacacaggaggaattggattcaagtacgtggctctgggagacctcatcatcctcatcacttttggcccgctggctgtgatgttcgcctacgccatccaggtggggtccctggccatcttcccactggtctatgccatccccctcgccctcagcaccgaggccattctccattccaacaacaccagggacatggagtccgaccgggaggctggtatcgtcacgctggccatcctcatcggccccacgttctcctacattctctacaacacactgctcttcctgccctacctggtcttcagcatcctggccacacactgcaccatcagcctggcactccccctgcttaccattcccatggccttctcccttgagagacagtttcgaagccaggccttcaacaaactgccccagaggactgccaagctcaacctcctgctgggacttttctatgtctttggcatcattctggcaccagcaggcagtctgcccaaaatttaaggggacaagtagctccccccacgacatgtctccctttcttagaatatattaaagtcagagtctctgaggaaggaatgtgatttggcagtcagggtactaagcatgggtgggaactcctgccttataaaaattgtttttgtgttcttaaagataaaaaaaaaaaaaaaaaaa

SEQ ID NO: 23048 - DNA, 5133 bp, Homo Sapiens
ggctgggctgcgaatagcgtgttcctctccggcggaacacacacacccggccttggggctgtctcctgaagctccctcctccacggagagcgctgagcgccgccgggaattccatcccaccgtgggcacgcagtctttggaggtcccgggcgcagcacgctcggtgtccccacactgcagcaagacagagaccccgcgggaaccttgagcttggaacaacccttgagcctctgcagtcggaagagtgggcgcagcagcccagcggaggccaggcgcgcaacctcgggcgccggggcaaggagagagtgcagggaggcgcagctcaggcgcccggctcaggagcgggaggaagttctcgcggcgccgggagcgcggtggacgcgccctgggcgcacgcccaggcagccttctccctggccctcgggactgtcctcgggcggcaaggaggagcttgctggagtcttagaggccatccagagccagcgagcaggagcgctgcgtctcccgcctcagctaggaagggggagtggcgctggcaggctggagctgggaacccagcgagcgcctgaccttcctcctcctcttcctgaccctcttcgcgtcttgggctccggaggaaggttctagcggctgcaggaggtccccagacccattttcctagaaggctggtgatggatctgctgctcctgccgccgccggggcacttggagcgcaccggcggcgcgtgagctgggctttgctctccaccgccctgggcaaaccccgggccagccccgcctggcacctttgcctgagtccctttcggttcccgacccaaagccaccagcgtccagggagggaggaggaggtggtcctcaggtgcagccccgccgagatgtccgcgcagagcctgctccacagcgtcttctcctgttcctcgcccgcttcaagtagcgcggcctcggccaagggcttctccaagaggaagctgcgccagacccgcagcctggacccggccctgatcggcggctgcgggagcgacgaggcgggcgcggagggcagtgcgcggggagccacggcgggccgcctctactccccatcactcccagccgagagtctcggccctcgcttggcgtcctcttcccggggtccgccccccagggccaccaggctaccgcctcctggacctctttgctcgtccttctccacacccagcaccccgcaggagaagtcaccatccggcagctttcactttgactatgaggttcccctgggtcgcggcggcctcaagaagagcatggcctgggacctgccttctgtcctggccgggccagccagtagccgaagcgcttccagcatcctctgttcatccgggggaggccccaatggcatcttcgcttctcctaggaggtggctccagcagaggaagttccagtccccacccgacagtcgcgggcacccctacgtcgtgtggaaatccgagggtgatttcacctggaacagcatgtcaggccgcagtgtgcggctgaggtcagtccccatccagagtctctcagagctggagagggcccggctgcaggaagtgcctttttatcagttgcaacaggactgtgacctgagctgtcagatcaccattcccaaagatggacaaaagagaaagaaatctttaagaaagaaactggattcactaggaaaggagaaaaacaaagacaaagaattcatcccacaggcatttggaatgcccttatcccaagtcattgcgaatgacagggcctataaactcaagcaggacttgcagagggacgagcagaaagatgcatctgactttgtggcttccctcctcccatttggaaataaaagacaaaacaaagaactctcaagcagtaactcatctctcagctcaacctcagaaacaccgaatgagtcaacgtccccaaacaccccggaaccggctcctcgggctaggaggaggggtgccatgtcagtggattctatcaccgatcttgatgacaatcagtctcgactactagaagctttacaactttccttgcctgctgaggctcaaagtaaaaaggaaaaagccagagataagaaactcagtctgaatcctatttacagacaggtccctaggctggtggacagctgctgtcagcacctagaaaaacatggcctccagacagtggggatattccgagttggaagctcaaaaaagagagtgagacaattacgtgaggaatttgaccgtgggattgatgtctctctggaggaggagcacagtgttcatgatgtggcagccttgctgaaagagttcctgagggacatgccagacccccttctcaccagggagctgtacacagctttcatcaacactctcttgttggagccggaggaacagctgggcaccttgcagctcctcatataccttctacctccctgcaactgcgacaccctccaccgcctgctacagttcctctccatcgtggccaggcatgccgatgacaacatcagcaaagatgggcaagaggtcactgggaataaaatgacatctctaaacttagccaccatatttggacccaacctgctgcacaagcagaagtcatcagacaaagaattctcagttcagagttcagcccgggctgaggagagcacggccatcatcgctgttgtgcaaaagatgattgaaaattatgaagccctgttcatggttcccccagatctccagaacgaagtgctgatcagcctgttagagaccgatcctgatgtcgtggactatttactcagaagaaaggcttcccaatcatcaagccctgacatgctgcagtcggaagtttccttttccgtgggagggaggcattcatctacagactccaacaaggcctccagcggagacatctccccttatgacaacaactccccagtgctgtctgagcgctccctgctggctatgcaagaggacgcggccccggggggctcggagaagctttacagagtgccagggcagtttatgctggtgggccacttgtcgtcgtcaaagtcaagggaaagttctcctggaccaaggcttgggaaagatctgtcagaggagcctttcgatatctggggaacttggcattcaacattaaaaagcggatccaaagacccaggaatgacaggttcctctggagacatttttgaaagcagctccctaagagcggggccctgctccctttctcaagggaacctgtccccaaattggcctcggtggcaggggagccccgcagagctggacagcgacacgcagggggctcggaggactcaggccgcagcccccgcgacggagggcagggcccaccctgcggtgtcgcgcgcctgcagcacgccccacgtccaggtggcagggaaagccgagcggcccacggccaggtcggagcagtacttgaccctgagcggcgcccacgacctcagcgagagtgagctggatgtggccgggctgcagagccgggccacacctcagtgccaaagaccccatgggagtgggagggatgacaagcggcccccgcctccatacccgggcccagggaagcccgcggcagcggcagcctggatccaggggcccccggaaggcgtggagacacccacggaccagggaggccaagcagccgagcgagagcagcaggtcacgcagaaaaaactgagcagcgccaactccctgccagcgggcgagcaggacagtccgcgcctgggggacgctggctggctcgactggcagagagagcgctggcagatctgggagctcctgtcgaccgacaaccccgatgccctgcccgagacgctggtctgagcccgcacccagccgagccccccctgccccgagccccccgccctccagcccaggggggaccgtgggtggtggccactggcacacttagtgttcttctttcacacttctcaaaagtgacacaagagaaatccagttcacctacagaggtagagcactcacgcccccgccattgagaataaggttccattgcgtagccagccttaggaaaaacaaacagaacccaaaccagatggcaatgtccaatctaaaaacgtccctcttggctctataatataagatacaactcttgcttggtatagcctaaccgtatttatgtgtcttcggttttgactattgtgtattctgtaacagattatgtataatcatatatgatatattcacaaagagaaaacaaaaggaacttttaaaaaaaaaatcacttcacttatattaagcaatgagatatactaaacaatgagattctatagaatgttctagaatgtgcacaagcgggtttctgtgcttttgccatagctttataactggggataacccttccttcgataccaaacactaacaagaggaagcagaatatgagaagccatatttttacataggagtcagatacaaaaagaaaaatcactgaatgcttttagatattgaatacgttttcaggaaaatgctaaatctgatagattacgaaatatatttttagaacttgtttagaaaggattcagttaaccaaacaagaaaaaggcagtgcctcacaaagaaattaagaagttgtccgtcccacgttacatcaaattcagttttatataggccatatataatatatatttataatgtataatttttatgtatttttcaaaactacaaactggaatccaactataaagtgtttaagaatctacacagaatattcaaattatagaacatgttttttccctttgccccataatcagtatttgccaaattacatgcaattccttaaaaactaaatcacattggtaaaaggcctacagctttgtacttacattgtgccaaaggctgaggaaatgttttctttcgaatttttatgtgtattgtaaaatgttctaccgtactttagtagtttgaagttttcaagtgcataactatttttgaccagcagaaggcgatacgcttcagtattttatgcaattttttttcacttcgaagggaaagtgtattataaaaaaagattttttttttttaaaacatgctactcttaattttcatgttggtgatgaaattcccagtggtgtttcttaaggttctatcttgtgccatgatgaataaaaagttaagcaaaaaaaaaaaaaaaaaaaaaaaaa

SEQ ID NO: 23049 - DNA, 4171 bp, Homo Sapiens
  misc_feature (3273)..(3273): n is a, c, g, or t
  misc_feature (3310)..(3310): n is a, c, g, or t
  misc_feature (3329)..(3329): n is a, c, g, or t
  misc_feature (3767)..(3767): n is a, c, g, or t
  misc_feature (3798)..(3798): n is a, c, g, or t
aagacttaggaagactggtggatgcgtttgggttgtagctaggctttttcttttctttctcttttaaaacacatctagacaaggaaaaaacaagcctcggatctgatttttcactcctcgttcttgtgcttggttcttactgtgtttgtgtattttaaaggcgagaagacgaggggaacaaaaccagctggatccatccatcaccgtgggtggttttaatttttcgttttttctcgttatttttttttaaacaaccactcttcacaatgaacaaactgtatatcggaaacctcagcgagaacgccgccccctcggacctagaaagtatcttcaaggacgccaagatcccggtgtcgggacccttcctggtgaagactggctacgcgttcgtggactgcccggacgagagctgggccctcaaggccatcgaggcgctttcaggtaaaatagaactgcacgggaaacccatagaagttgagcactcggtcccaaaaaggcaaaggattcggaaacttcagatacgaaatatcccgcctcatttacagtgggaggtgctggatagtttactagtccagtatggagtggtggagagctgtgagcaagtgaacactgactcggaaactgcagttgtaaatgtaacctattccagtaaggaccaagctagacaagcactagacaaactgaatggatttcagttagagaatttcaccttgaaagtagcctatatccctgatgaaatggccgcccagcaaaaccccttgcagcagccccgaggtcgccgggggcttgggcagaggggctcctcaaggcaggggtctccaggatccgtatccaagcagaaaccatgtgatttgcctctgcgcctgctggttcccacccaatttgttggagccatcataggaaaagaaggtgccaccattcggaacatcaccaaacagacccagtctaaaatcgatgtccaccgtaaagaaaatgcgggggctgctgagaagtcgattactatcctctctactcctgaaggcacctctgcggcttgtaagtctattctggagattatgcataaggaagctcaagatataaaattcacagaagagatccccttgaagattttagctcataataactttgttggacgtcttattggtaaagaaggaagaaatcttaaaaaaattgagcaagacacagacactaaaatcacgatatctccattgcaggaattgacgctgtataatccagaacgcactattacagttaaaggcaatgttgagacatgtgccaaagctgaggaggagatcatgaagaaaatcagggagtcttatgaaaatgatattgcttctatgaatcttcaagcacatttaattcctggattaaatctgaacgccttgggtctgttcccacccacttcagggatgccacctcccacctcagggcccccttcagccatgactcctccctacccgcagtttgagcaatcagaaacggagactgttcatctgtttatcccagctctatcagtcggtgccatcatcggcaagcagggccagcacatcaagcagctttctcgctttgctggagcttcaattaagattgctccagcagaagcaccagatgctaaagtgaggatggtgattatcactggaccaccagaggctcagttcaaggctcagggaagaatttatggaaaaattaaagaagaaaactttgttagtcctaaagaagaggtgaaacttgaagctcatatcagagtgccatcctttgctgctggcagagttattggaaaaggaggcaaaacggtgaatgaacttcagaatttgtcaagtgcagaagttgttgtccctcgtgaccagacacctgatgagaatgaccaagtggttgtcaaaataactggtcacttctatgcttgccaggttgcccagagaaaaattcaggaaattctgactcaggtaaagcagcaccaacaacagaaggctctgcaaagtggaccacctcagtcaagacggaagtaaaggctcaggaaacagcccaccacagaggcagatgccaaaccaaagacagattgcttaaccaacagatgggcgctgaccccctatccagaatcacatgcacaagtttttacctagccagttgtttctgaggaccaggcaacttttgaactcctgtctctgtgagaatgtatactttatgctctctgaaatgtatgacacccagctttaaaacaaacaaacaaacaaacaaaaaaagggtgggggagggagggaaagagaagagctctgcacttccctttgttgtagtctcacagtataacagatattctaattcttcttaatattcccccataatgccagaaattggcttaatgatgctttcactaaattcatcaaatagattgctcctaaatccaattgttaaaattggatcagaataattatcacaggaacttaaatgttaagccattagcatagaaaaactgttctcagttttatttttacctaacactaacatgagtaacctaagggaagtgctgaatggtgttggcaggggtattaaacgtgcatttttactcaactacctcaggtattcagtaatacaatgaaaagcaaaattgttccttttttttgaaaattttatatactttataatgatagaagtccaaccgttttttaaaaaataaatttaaaatttaacagcaatcagctaacaggcaaattaagatttttacttctggctggtgacagtaaagctggaaaattaatttcagggttttttgaggcttttgacacagttattagttaaatcaaatgttcaaaaatacggagcagtgcctagtatctggagagcagcactaccatttattctttcatttatagttgggaaagtttttgacggtactaacaaagtggtcgcaggagattttggaacggctggtttaaatggcttcaggagacttcagttttttgtttagctacatgattgaatgcataataaatgctttgtgcttctgactatcaatacctaaagaaagtgcatcagtgaagagatgcaagactttcaactgactggcaaaaagcaagctttagcttgtcttataggatgcttagtttgccactacacttcagaccaatgggacagtcatagatggtgtgacagtgtttaaacgcaacaaaaggctacatttccatggggccagcactgtcatgagcctcactaagctattttgaagatttttaagcactgataaattaaaaaaaaaaaattagactccaccttaagtantaaagtataacaggatttatgtatactgtgcaatcanttctttgaaaaaaaagtcnaaagatagagaatacaagaaaagtttttgggatataatttgaatgactgtgaaaacatatgacctttgataacgaactcatttgctcactccttgacagcaaagcccagtacgtacaattgtgttgggtgtgggtggtctccaaggccacgctgctctctgaattgattttttgagttttgtttgtaagatgatcacagtcatgttacactgatctaaaggacatatatataaccctttaaaaaaaaaatcactgcctcattcttatttcaagatgaatttctatacagactagatgtttttctgaagatcaattagacattttgaaaatgatttaaagtgttttccttaatgttctctgaaaacaagtttcttttgtagttttaaccaaaaaagtgccctttttgtcactgggattctcctagcattcatgattttngtttcatacaatgaattaaaattggctaaantcatggactggctttctgggttggatttcaggtaagatgtgtttaaggccagagcttttctcagtatttgatttttttccccaatatttgattttttaaaaatatacacataggtgctgcatttatatctgctggtttaaattctgtcatatttcacttctagccttttagtatggcaaatcatattttacttttacttaagcatttgtaatttggagtatctggtactagctaagaaataattctataattgagttttgtactcaccatatatggatcattcctcatgtataatgtgccccaaatgcagcttcattttccagataccttgacgcagaataaattttttcatcatttaggtgcaaaaaaaaaa

SEQ ID NO: 23050 - DNA, 2583 bp, Homo Sapiens
ggggttgggaagatggcggctcccagcctcctcaactggaggcgagtttcttccttcacggggccggtcccccgcgcccggcacggacaccgagcggtggccatccgggagctgatgatcatctttggagggggaaatgagggcatcgcggatgagctgcacgtctacaacacggctacgaatcagtggtttctgccagctgttagaggagatatccctccaggctgtgctgcccatggatttgtctgtgatggtaccagaatattagtatttgggggaatggttgaatatggaagatacagcaatgagttatatgagttacaagcaagtcgttggttatggaaaaaagtgaaaccccatccccctccttctggtttacctccttgtcctcggcttggacatagcttctctttatatggtaacaaatgctatttgtttggtggcctggcaaacgaaagcgaagattcaaacaataatgttcccagatatttaaatgatttttatgagttggagctacagcatggctctggtgttgtgggttggagcattccagtgactaaaggggttgtgccttctccaagagaatcccacacagctgttatatattgcaaaaaagattctggaagtcctaaaatgtatgtttttggtggaatgtgtggtgctcgcctggatgacctatggcagcttgacttagaaactatgtcatggtcaaaaccagaaactaaagggacagtgccacttccacgaagccttcatacagccagtgttataggaaacaagatgtacatttttggtggatgggtcccacataagggggaaaatactgagacttcacctcatgattgtgaatggagatgtaccagttcattttcttacctaaatctggatacaacagagtggaccaccctagtatcagattctcaggaagataaaaaaaattcaagaccaagaccaagagctggccactgtgctgttgcaatcggcactcgattgtatttttggagtggaagagatggctacaaaaaagcactgaatagtcaagtttgctgcaaggatctttggtatcttgatactgagaaaccaccggcaccatctcaagtacagctgatcaaagccactaccaactcctttcatgtcaagtgggatgaagtgtctacagttgagggctatcttttgcagttgagtacagacttgccataccaagctgcatcatcagattcttcagcagcaccaaatatgcaaggagtcaggatggaccctcacagacaaggcagtaataacatcgttcctaacagtatcaatgatacaataaacagcacaaaaactgaacagccagccacaaaagaaacttcaatgaaaaacaaaccagactttaaagcactgacggattctaatgccattttatatccatctttggcatcaaatgcttctaatcataatagtcatgtggtggatatgctaaggaaaaatgaaggtcctcacacttcagcaaatgtaggtgttctaagtagttgcctggatgtaagaacagtaattcctgaaacatctgtatccagtactgtttccagcacacaaactatggtaacccagcagaccattaaaactgaatcatccagtacaaatggggcagttgttaaagatgaaacttcactaacaacattcagtaccaaatctgaagttgatgaaacatatgcactgcctgcaacgaagatcagccgtgtagagacacatgctacagcaacgccgttttctaaagagactccttcaaatccagtggccacagtgaaagcgggagaacgacaatggtgtgatgtgggaatttttaaaaataatacagctttggtgagccagttttatttgctgccaaaagggaagcaaagcatctcaaaggtaggaaatgcagatgtacctgactacagcttgcttaagaaacaagatcttgttccaggcacaggatacagattcagggttgctgcaatcaatggttgtgggataggtcctttcagcaaaatcagtgaatttaaaacttgtattcctggttttcctggagctccttctgcagtcagaatttcaaagaatgttgaaggtatccacctttcctgggaacctccaacctcaccttctggaaatattttggaatattcagcctacttggctatccgcacagcacagatacaagataatccaagtcaacttgtgttcatgaggatttattgtggtcttaagacatcatgtatagtaactgctgggcaacttgcaaatgcacatattgattatacatccaggcctgccattgtgttcaggatatcagcaaagaatgaaaagggatatggaccagctacacaagttcggtggcttcaaggtaacaataagaaagcacctttaaattgaattggtttttttactgaagctattgtgatgatgattatttattagtaactggttatgaagatttgtcatttaaaagagtattctctggctgtatttccagcagttatgaacttgagtttgtaaattgttcttaaaatgtatttgctgaattatagatccaaataaaagaaaagaagcaaagactctctgaaa

SEQ ID NO: 23051 - DNA, 4081 bp, Homo Sapiens
ggcgagctaagggaagggcggcggcagcggtgactagggcgggagcaggagcgggagccgggtgcacgggatggtgccttgagtgaatgacccccttggagaacattcttccgcatccctcgcctcaagccagcctcagacagaaaactgaagattcagcagatccagtgcttcctgctcctcttctgcccaggaacacgcttgccttccccaaggcttccagaagctctgaggcaggaggcaccaagttctacctcatgtttggaggatcttgctagctatggccctcgtactcggctccctgttgctgctggggctgtgcgggaactccttttcaggagggcagccttcatccacagatgctcctaaggcttggaattatgaattgcctgcaacaaattatgagacccaagactcccataaagctggacccattggcattctctttgaactagtgcatatctttctctatgtggtacagccgcgtgatttcccagaagatactttgagaaaattcttacagaaggcatatgaatccaaaattgattatgacaagattgtctactatgaagcagggattattctatgctgtgtcctggggctgctgtttattattctgatgcctctggtggggtatttcttttgtatgtgtcgttgctgtaacaaatgtggtggagaaatgcaccagcgacagaaggaaaatgggcccttcctgaggaaatgctttgcaatctccctgttggtgatttgtataataataagcattggcatcttctatggttttgtggcaaatcaccaggtaagaacccggatcaaaaggagtcggaaactggcagatagcaatttcaaggacttgcgaactctcttgaatgaaactccagagcaaatcaaatatatattggcccagtacaacactaccaaggacaaggcgttcacagatctgaacagtatcaattcagtgctaggaggcggaattcttgaccgactgagacccaacatcatccctgttcttgatgagattaagtccatggcaacagcaatcaaggagaccaaagaggcgttggagaacatgaacagcaccttgaagagcttgcaccaacaaagtacacagcttagcagcagtctgaccagcgtgaaaactagcctgcggtcatctctcaatgaccctctgtgcttggtgcatccatcaagtgaaacctgcaacagcatcagattgtctctaagccagctgaatagcaaccctgaactgaggcagcttccacccgtggatgcagaacttgacaacgttaataacgttcttaggacagatttggatggcctggtccaacagggctatcaatcccttaatgatatacctgacagagtacaacgccaaaccacgactgtcgtagcaggtatcaaaagggtcttgaattccattggttcagatatcgacaatgtaactcagcgtcttcctattcaggatatactctcagcattctctgtttatgttaataacactgaaagttacatccacagaaatttacctacattggaagagtatgattcatactggtggctgggtggcctggtcatctgctctctgctgaccctcatcgtgattttttactacctgggcttactgtgtggcgtgtgcggctatgacaggcatgccaccccgaccacccgaggctgtgtctccaacaccggaggcgtcttcctcatggttggagttggattaagtttcctcttttgctggatattgatgatcattgtggttcttacctttgtctttggtgcaaatgtggaaaaactgatctgtgaaccttacacgagcaaggaattattccgggttttggatacaccctacttactaaatgaagactgggaatactatctctctgggaagctatttaataaatcaaaaatgaagctcacttttgaacaagtttacagtgactgcaaaaaaaatagaggcacttacggcactcttcacctgcagaacagcttcaatatcagtgaacatctcaacattaatgagcatactggaagcataagcagtgaattggaaagtctgaaggtaaatcttaatatctttctgttgggtgcagcaggaagaaaaaaccttcaggattttgctgcttgtggaatagacagaatgaattatgacagctacttggctcagactggtaaatcccccgcaggagtgaatcttttatcatttgcatatgatctagaagcaaaagcaaacagtttgcccccaggaaatttgaggaactccctgaaaagagatgcacaaactattaaaacaattcaccagcaacgagtccttcctatagaacaatcactgagcactctataccaaagcgtcaagatacttcaacgcacagggaatggattgttggagagagtaactaggattctagcttctctggattttgctcagaacttcatcacaaacaatacttcctctgttattattgaggaaactaagaagtatgggagaacaataataggatattttgaacattatctgcagtggatcgagttctctatcagtgagaaagtggcatcgtgcaaacctgtggccaccgctctagatactgctgttgatgtctttctgtgtagctacattatcgaccccttgaatttgttttggtttggcataggaaaagctactgtatttttacttccggctctaatttttgcggtaaaactggctaagtactatcgtcgaatggattcggaggacgtgtacgatgatgttgaaactatacccatgaaaaatatggaaaatggtaataatggttatcataaagatcatgtatatggtattcacaatcctgttatgacaagcccatcacaacattgatagctgatgttgaaactgcttgagcatcaggatactcaaagtggaaaggatcacagatttttggtagtttctgggtctacaaggactttccaaatccaggagcaacgccagtggcaacgtagtgactcaggcgggcaccaaggcaacggcaccattggtctctgggtagtgctttaagaatgaacacaatcacgttatagtccatggtccatcactattcaaggatgactccctcccttcctgtctatttttgttttttacttttttacactgagtttctatttagacactacaacatatggggtgtttgttcccattggatgcatttctatcaaaactctatcaaatgtgatggctagattctaacatattgccatgtgtggagtgtgctgaacacacaccagtttacaggaaagatgcattttgtgtacagtaaacggtgtatataccttttgttaccacagagttttttaaacaaatgagtattataggactttcttctaaatgagctaaataagtcaccattgacttcttggtgctgttgaaaataatccattttcactaaaagtgtgtgaaacctacagcatattcttcacgcagagattttcatctattatactttatcaaagattggccatgttccacttggaaatggcatgcaaaagccatcatagagaaacctgcgtaactccatctgacaaattcaaaagagagagagagatcttgagagagaaatgctgttcgttcaaaagtggagttgttttaacagatgccaattacggtgtacagtttaacagagttttctgttgcattaggataaacattaattggagtgcagctaacatgagtatcatcagactagtatcaagtgttctaaaatgaaatatgagaagatcctgtcacaattcttagatctggtgtccagcatggatgaaacctttgagtttggtccctaaatttgcatgaaagcacaaggtaaatattcatttgcttcaggagtttcatgttggatctgtcattatcaaaagtgatcagcaatgaagaactggtcggacaaaatttaacgttgatgtaatggaattccagatgtaggcattccccccaggtcttttcatgtgcagattgcagttctgattcatttgaataaaaaggaacttggaaaaaaaaaaaaaaaaaaaaaaaaaaaaaaaaaaaaaaaaaaaaaaaaaaaaaaaaaaaaaaaaaaaaaaa

SEQ ID NO: 23052 - DNA, 1873 bp, Homo Sapiens
ggcacgaggccccgcgcgccggccgagtcgctgagccgcggctgccggacgggacgggaccggctaggctgggcgcgcccccccgggccccgccgtgggcatgggcgcactggcccgggcgctgctgctgcctctgctggcccagtggctcctgcgcgccgccccggagctggcccccgcgcccttcacgctgcccctccgggtggccgcggccacgaaccgcgtagttgcgcccaccccgggacccgggacccctgccgagcgccacgccgacggcttggcgctcgccctggagcctgccctggcgtcccccgcgggcgccgccaacttcttggccatggtagacaacctgcagggggactctggccgcggctactacctggagatgctgatcgggacccccccgcagaagctacagattctcgttgacactggaagcagtaactttgccgtggcaggaaccccgcactcctacatagacacgtactttgacacagagaggtctagcacataccgctccaagggctttgacgtcacagtgaagtacacacaaggaagctggacgggcttcgttggggaagacctcgtcaccatccccaaaggcttcaatacttcttttcttgtcaacattgccactatttttgaatcagagaatttctttttgcctgggattaaatggaatggaatacttggcctagcttatgccacacttgccaagccatcaagttctctggagaccttcttcgactccctggtgacacaagcaaacatccccaacgttttctccatgcagatgtgtggagccggcttgcccgttgctggatctgggaccaacggaggtagtcttgtcttgggtggaattgaaccaagtttgtataaaggagacatctggtatacccctattaaggaagagtggtactaccagatagaaattctgaaattggaaattggaggccaaagccttaatctggactgcagagagtataacgcagacaaggccatcgtggacagtggcaccacgctgctgcgcctgccccagaaggtgtttgatgcggtggtggaagctgtggcccgcgcatctctgattccagaattctctgatggtttctggactgggtcccagctggcgtgctggacgaattcggaaacaccttggtcttacttccctaaaatctccatctacctgagagatgagaactccagcaggtcattccgtatcacaatcctgcctcagctttacattcagcccatgatgggggccggcctgaattatgaatgttaccgattcggcatttccccatccacaaatgcgctggtgatcggtgccacggtgatggagggcttctacgtcatcttcgacagagcccagaagagggtgggcttcgcagcgagcccctgtgcagaaattgcaggtgctgcagtgtctgaaatttccgggcctttctcaacagaggatgtagccagcaactgtgtccccgctcagtctttgagcgagcccattttgtggattgtgtcctatgcgctcatgagcgtctgtggagccatcctccttgtcttaatcgtcctgctgctgctgccgttccggtgtcagcgtcgcccccgtgaccctgaggtcgtcaatgatgagtcctctctggtcagacatcgctggaaatgaatagccaggcctgacctcaagcaaccatgaactcagctattaagaaaatcacatttccagggcagcagccgggatcgatggtggcgctttctcctgtgcccacccgtcttcaatctctgttctgctcccagatgccttctagattcactgtcttttgattcttgattttcaagctttcaaatcctccctacttccaagaaaaaaaaaaaaaaaaaa

SEQ ID NO: 23053 - DNA, 3340 bp, Homo Sapiens
cgggcgcccagagacagcgccgcctcagatatcctgctggatgacattgtccttacccattctctcttcctcccgacggagaaatttctgcaggagctacaccagtactttgttcgggcaggaggcatggagggccctgaagggctgggccggaagcaagcctgtctagccatgcttctccatttcttggacacctaccaggggctgcttcaagaggaagagggggccggccacatcatcaaggatctatacctgctaattatgaaggacgagtccctttaccagggcctccgagaggacactctgaggctgcaccagctggtggagacggtggaactaaagattccagaggagaaccagccacccagcaagcaggtgaagccactcttccgccacttccgccggatagactcctgtctgcagacccgggtggccttccggggctctgatgagatcttctgccgtgtatacatgcctgaccactcttatgtgaccatacgcagccgcctttcagcatctgtgcaggacattctgggctctgtgacggagaaacttcaatattcagaggagcccgcggggcgtgaggattccctcatcctggtagctgtgtcctcctctggagagaaggtccttctccagcccactgaggactgtgttttcaccgcactgggcatcaacagccacctgtttgcctgtactcgggacagctatgaggctctggtgcccctccccgaggagatccaggtctcccctggagacacagagatccaccgagtggagcctgaggacgttgccaaccacctaactgccttccactgggagctgttccgatgtgtgcatgagctggagttcgtggactacgtgttccacggggagcgcggccgccgggagacggccaacttggagctgctgctgcagcgctgcagcgaggtcacgcactgggtggccaccgaagtgctgctctgcgaggccccgggcaagcgcgcgcagctgctcaagaagttcatcaagatcgcggccctctgcaagcagaaccaggacctgctgtctttctacgccgtggtcatggggctggacaacgccgctgtcagccgccttcgactcacctgggagaagctgccagggaaattcaagaacttgtttcgcaaatttgagaacctgacggacccctgcaggaaccacaaaagctaccgagaagtgatctccaaaatgaagccccctgtgattcccttcgtgcctctgatcctcaaagacctgactttcctgcacgaagggagtaagacccttgtagatggtttggtgaacatcgagaagctgcattcagtggccgaaaaagtgaggacaatccgcaaataccggagccggcccctttgcctggacatggaggcatcccccaatcacctgcagaccaaggcctatgtgcgccagtttcaggtcatcgacaaccagaacctcctcttcgagctctcctacaagctggaggcaaacagtcagtgagagtggaggctccagtcagacccgccagatccttgggcacctggcactcaagcactttgcacgatgtctcaaccaacatctgacatctttcccgtggagcaacttcctgctccacgggaaagaggtcgatggatttacccctggacccataagtctgttcatcctgctgaagtcccctccccattgctccttcaagccaaaactacactttgctggttcctgtcccctctgagaaaggggatagaaagctccttcctctatgtcctcccatcgagatctgttctggggatggagcttccaacttcctcttgcagcaggaaagaatgctgctcacccttctgtcttgcagagtgggattgtgggagggattggcagccttcttctccaccacctgtccagcttcttcctggtcagggctgggacccccaggaatattatgttgccgtgtgtgtgtgtgtgtgtgtgtgtgtgtgtgtgtgtgtgtgtgtcttcttttagggagcaggagtgcatctggtaattgagggtggatgttgtgtgtgctggggaggggtccttctgtttggtgctacccttgtctactctgcccctggatggtgcggggtgctttctccacccccacactccctgctcagctcctcgtgctgccctgcatgcccaggcttgtgagccaaggtgctttttggggcagggagtagcagcaggtgggaggggttacccatcagcccttgcaagtcccccactcaggcctctggaaggtccagggatgggctctgatgagagggtaaaagatgctcagggaaacacaggcctcagctgcctagaggaccctccccctgccttgcagtgggctcgggtagagcagtatcaggagctagggttgtctgctgcccacactcctgctttttgggatatctaactgctaaggagggagttgacatcccccttctggctcatgtgtctgacaccaacaacatggtctccgtccctctctcttagactctccctttgtcctccccatagagctggggtggggtggatccctatactggggcaggcagccccaaagtgggggagggggatggcagagactgtaaaggcgccactggactctggcaaggcctttattacctttactccctccctctcccatcaccagcctcaaggcctgaggggtgcaggggctcctggcagctactgggtgaggtttcctggcacagactcacccttctttctggcaccactctttcccttttgaagagacagcaacagccgtagcaaaagcagctgctgctcctgctatgagggtgtatatattttttacccaaagctctggaattgtacatttattttttaaaactcaaagagggaaagagccttgtatcatatgtgaacattgtatcataggtaatgttgtacagacccttttatacagtgatctgtcttgttcctgcagcaaaaatcctctatggacataggaggtgctgtgtcccatgccttcttgccctgacagtgtcccatgggcccccttctgctccctgccccctccctgctactgctgatgcactgtcctctccctgcagcccctggcttcccagccttcctcctgaccccttccaacagccttggaactccagctgccaccaccctctgggtcggacactgggacccactggcccagtcttggctgctgcttacccctagccttgatgcctgcccagggacccccagccccctcccgttgccctgcagctttaacagagtgaaccatgtgtattgtacaggcgcggttgtcattgcagaaaccgctgggtggagaagaagccgataaagtctatgaatc

SEQ ID NO: 23054 - DNA, 6401 bp, Homo Sapiens
ggcacgagctgtaggagcaggggcctagcaagcgcccagcggagcgacccctgcctggccgtggctagcatggcccctacgctgttccagaagctcttcagcaagaggaccgggctgggcgcgcccggccgcgacgcccgggacccagattgcgggttcagttggcctttaccagagtttgatccaagccagattcgactgattgtatatcaagactgtgaaagacgagggagaaatgttttgtttgactccagtgttaagagaagaaatgaggacatatcagtatcggacttaaatactatttattcttatcttcatggaatggaaatattatcaaatctcagggaacatcagcttagattaatgtctgcaagagcacgctatgagagatacagtggcaatcaggttctcttttgttcagaaacgattgccagatgttggtatatcctactttctggatctgtgcttgtgaaaggctccatggtcttgcctccttgcagttttggtaagcagtttggaggaaaaagaggatgtgattgtcttgtattagagccttcagaaatgattgtggtagagaatgccaaagataatgaagatagtattctacaaagagaaattcctgccagacaatcccgaagaagatttcggaaaattaactataaaggagagcgccaaaccattactgatgatgtggaggttaacagctatctttctcttccagctgatcttaccaagatgcatctcacagaaaaccctcatccacaggtgactcatgtgtcttctagtcagtctggttgtagcattgccagtgactctggaagcagcagtttatctgatatctatcaggctacggagagtgaggtaggagatgtagatttgacacgtcttccagaaggacctgttgattctgaggatgacgaagaggaagatgaagagattgatcgaacagatccattgcaggggcgagatcttgttcgagaatgtcttgaaaaagaacctgcagacaaaactgatgatgacattgaacaattgctggagtttatgcaccagctccctgcatttgcaaacatgaccatgtctgtaaggagagaactctgctcagtgatgatttttgaagtggtagagcaggctggagctattattcttgaagatgggcaagagcttgactcatggtatgttattttaaacggcactgtggaaatcagtcatccagatggaaaagttgaaaatttgtttatgggaaatagttttggaattactcccactctggataagcagtacatgcatggaattgtcaggactaaagtagatgattgtcagtttgtctgcatagcccagcaagattattggagaattttaaaccatgtggaaaaaaatacccataaagttgaggaagagggagaaattgttatggtacatgagcatcgggaactagaccggagtggaaccaggaaaggacacattgtgatcaaggcaacacctgagcgtctcataatgcatttaatagaagaacattccatcgtggatccaacttatatagaagattttctattaacttacaggacatttcttgaaagtcctttggatgttgggatcaaactattggaatggtttaagatcgacagcttaagagataaggtgacacggattgtattattatgggtaaataatcattttaatgattttgaaggtgaccctgctatgactcgatttctagaggaatttgaaaaaaatctggaagatacaaagatgaatggtcatctccggttattgaatattgcctgtgctgcaaaggctaagtggagacaggttgtgctgcaaaaggcttcccgcgagtcccctctacaattcagccttaatggagggagtgagaagggatttggtatttttgttgaaggagtagaacctggtagcaaagctgctgattcaggactgaaacgtggtgatcagattatggaagtaaatggacaaaactttgagaatattacatttatgaaagccgttgaaattttgaggaataatactcatcttgcacttactgtgaagaccaacatttttgtgttcaaagagttactttttaggactgaacaagagaaatctggtgttcctcatattcccaaaattgctgaaaaaaaaagtaatcgccattctatccagcatgtgccaggagatattgaacagacatcacaggagaaaggaagtaagaaagttaaagcaaatactgtttcaggtggaagaaacaaaatcaggaagattttggataaaacacgatttagtatcttgcctccaaagctatttagtgatggaggcctaagccaatcacaagatgacagcattgtgggaacaaggcactgtaggcatagtctggctataatgcccatccctggaacactctcatccagcagccctgatctcctgcagcctaccaccagtatgttggatttttccaatccttcagatatccctgatcaagttataagagttttcaaagtggatcagcaaagttgctacattatcatcagtaaagacaccacagctaaagaagtagtttttcatgctgttcatgaatttggtttgaccggtgcatccgacacatattctctctgtgaagtttctgttactcctgagggtgtcataaaacagagaagacttccagatcagttctccaaattagctgatagaattcaactcaatggaaggtattacttaaaaaataacatggaaacagaaaccttatgttcagatgaagatgctcaagaactagttaaggaaagccagctatccatgctgcagctcagtaccattgaggtggccacccagctgtcaatgagggactttgatttgtttcgtaatattgaaccgactgagtacatcgatgacctttttaagttaaattccaaaacaggaaatactcatttgaagaggtttgaggacattgtaaaccaagagacattctgggttgcctcagaaattttaactgaagcaaatcagctcaaacgaatgaagattattaagcattttattaaaattgcacttcattgtcgagaatgtaagaacttcaattccatgtttgcaataataagtggcttgaacctggcatctgtagcaagactcagaggaacttgggaaaagttaccaagcaaatacgagaaacatcttcaagatctacaagacatttttgatccatctagaaacatggcaaagtatagaaatattcttagtagtcaaagtatgcagcctccaattattccactcttccctgttgtcaagaaagatatgacatttctacatgaaggaaatgactccaaagtagatggtttagtaaactttgagaagttaagaatgatttccaaggaaatccgccaagttgttcgaatgacttctgctaacatggacccagctatgatgtttcgacagaggtcactgagtcaaggaagcacaaattcaaacatgctggatgttcagggaggtgctcacaaaaaaagggcacgccgcagctctctgcttaatgccaagaagctatatgaggatgcccaaatggcaaggaaggtgaagcagtatctttccagtctcgatgtagagacagatgaggagaagttccagatgatgtcattacagtgggagcctgcatatggtaccttgaccaagaatttaagtgagaaaagatcagccaagatcatctgaaatgtctccagtgcctatgaggtcagctggccaaacaactaaagcccacttgcatcaaccccacagagtaagccaggtgcttcaggtgccagctgttaatttgcaccccatcaggaagaagggacaaacaaaagaccctgcactgaatacaagtttacctcagaaagttttaggaacaactgaagaaataagtggtaagaagcatacagaagacactatttctgtggcgtcatctttacattctagtcctcctgcatctcctcaaggctcccctcacaaaggttacacacttattccatcagctaaatctgacaacttgtctgactccagccatagtgagatttcttcacggtccagcatcgtgagcaattgttctgttgactccatgtctgcagctctacaggatgaacggtgttcctctcaggccctggcagtccctgaatccactggggcattggaaaagacagagcacgcttcagggataggagatcatagtcaacatggccctgggtggacactcttgaagccatctctaatcaagtgtttagctgtctcatcgtctgtgagcaatgaagagatttctcaagagcatatcattatagaagcagctgacagtggtcgtggaagttggacttcgtgttcaagcagctcccatgacaacttccaaagccttccaaacccaaaaagctgggattttttgaactcttacagacatacccatttggatgaccccattgctgaagttgaacccactgactctgagccctattcctgttctaaaagctgctctagaacttgtgggcagtgtaaaggaagcctagagagaaagagttggacctcctccagttctctgtctgacacgtatgaaccaaactatgggacagttaaacggagagtattggagagcaccccagctgagtcatctgaaggcttggaccccaaggatgccactgacccagtttataaaactgtcacttcaagtacagaaaagggcttgattgtgtactgtgtcacctcacccaagaaggacgataggtatagggagccacctcccactcctccaggatatttggggatttctttagcggacctaaaggaaggaccccacacacacctaaaacctccagattatagtgtggcagtgcagaggtcaaagatgatgcataacagcctctctagactgccaccagcttctctcagtagcaacctcgtggcctgtgttccatcgaagattgtaactcagcctcagaggcataatttgcagccattccatcctaaactaggagatgtgactgatgcagatagcgaagcagatgaaaatgaacaagtttcagcagtctagcctttggatgacctatttgaaaaccactgaaagtcgtggaggaatgggcaagaaccacctcatgattctgcaggccattgctaacgaacagctcattgctacaaccagtccagaggttttattccctctactccgagcaatgaaatagacctgagttatgcttcctttcatttaatttctgcagataaatagtttcctgagcaatggatgctatgcctggataccagtctccactttgcacgccggaactgccttgggaccacagttacagaaaaaatgtaaactcagagtgatccttgtgtatattgctatagatttttctttaacaagctattttaaagataatggcattattatttccaagccatagcttgggctgaaggacaaattgaaattgtctgccaataccaaggatattcttgtatatttgaaaaataacttattatttgaattgttgtggttttgtttgtatttgagagctcttgttagctgatattcatgtttgaggtcataaaattgtctctggtctgaccaaacagaagtcatctttacagaggtgatatgcttgatctacacagagatgtgacttgatctgtagcaccaatgcaatgtaggtctcagtttgagagaaataggaagccctttgcagttgaggtgttaggaacctgctggtcatggtgtggaaggccaaatgaagctgccacagggtttcttgtcagtcctttgggaaatgggagggagtagtttggggaggagggtgggaaccctaatttccacagaatgaaattttgatgttaaatgacatgtatacaaattcttccttaagtgaaagttatgctgcatcgaattgtaactgaaagtatagatccaacaaatagagactgggttctagagagttctggtctatagaaacccaaaactaaaatctctcataactcaagtatggaatactttttttaaagaaattcttatcatgggtgttgtaataatgaagacgaatttgactttatgcagtgttttgcagcatgcctcccccacatctcatagcaccaggttgtgtctgacctgacataccctgcagctctcagctggctgcagtaacattttgtgggagaaagaggagctggagttacagaaatgattgtctcttggttctcagtttttagcccttgagaggacatacttttccagcctcatgggtatggcactcttaattaaaatttcagtgactgtttactggatgaggcagatttttcacatttttgcaaattaaatatattttatatatattaagtttaattttttcagtttttttaatgtaaaagcaagtgaaattttaataaacttctgtaattaccaaaaaaaaaaaaaaaaa

SEQ ID NO: 23055 - DNA, 3198 bp, Homo Sapiens
aacctgaatatccaggtggaggacattcggattcgagccatcctctcaacctaccgcaagcgcaccccagtgatggagggctacgtggaggtgaaggagggcaagacctggaagcagatctgtgacaagcactggacggccaagaattcccgcgtggtctgcggcatgtttggcttccctggggagaggacatacaataccaaagtgtacaaaatgtttgcctcacggaggaagcagcgctactggccattctccatggactgcaccggcacagaggcccacatctccagctgcaagctgggcccccaggtgtcactggaccccatgaagaatgtcacctgcgagaatgggcagccggccgtggtgagttgtgtgcctgggcaggtcttcagccctgacggaccctcgagattccggaaagcatacaagccagagcaacccctggtgcgactgagaggcggtgcctacatcggggagggccgcgtggaggtgctcaaaaatggagagtgggggaccgtctgcgacgacaagtgggacctggtgtcggccagtgtggtctgcagagagctgggctttgggagtgccaaagaggcagtcactggctcccgactggggcaagggatcggacccatccacctcaacgagatccagtgcacaggcaatgagaagtccattatagactgcaagttcaatgccgagtctcagggctgcaaccacgaggaggatgctggtgtgagatgcaacacccctgccatgggcttgcagaagaagctgcgcctgaacggcggccgcaatccctacgagggccgagtggaggtgctggtggagagaaacgggtcccttgtgtgggggatggtgtgtggccaaaactggggcatcgtggaggccatggtggtctgccgccagctgggcctgggattcgccagcaacgccttccaggagacctggtattggcacggagatgtcaacagcaacaaagtggtcatgagtggagtgaagtgctcgggaacggagctgtccctggcgcactgccgccacgacggggaggacgtggcctgcccccagggcggagtgcagtacggggccggagttgcctgctcagaaaccgcccctgacctggtcctcaatgcggagatggtgcagcagaccacctacctggaggaccggcccatgttcatgctgcagtgtgccatggaggagaactgcctctcggcctcagccgcgcagaccgaccccaccacgggctaccgccggctcctgcgcttctcctcccagatccacaacaatggccagtccgacttccggcccaagaacggccgccacgcgtggatctggcacgactgtcacaggcactaccacagcatggaggtgttcacccactatgacctgctgaacctcaatggcaccaaggtggcagagggccaaaaggccagcttctgcttggaggacacagaatgtgaaggagacatccagaagaattacgagtgtgccaacttcggcgatcagggcatcaccatgggctgctgggacatgtaccgccatgacatcgactgccagtgggttgacatcactgacgtgccccctggagactacctgttccaggttgttattaaccccaacttcgaggttgcagaatccgattactccaacaacatcatgaaatgcaggagccgctatgacggccaccgcatctggatgtacaactcccacataggtggttccttcagcgaagagacggaaaaaaagtttgagcacttcagcgggctcttaaacaaccagctgtccccgccagtaaagaagcctgcgtggtcaactcctgtcttcaggccacaccacatcttccatgggacttctccccaacaactgagtctgaacgaatgccacgtgccctcacccagcccggcccccaccctgtccagacccctacagctgtgtctaagctcaggaggaaagggaccctcccatcattcatggggggctgctacctgacccttggggcctgagaaggccttgcgggggtggggtttgtccacagagctgctggagcagcaccaagagccagtcttgaccgggatgaggcccacagacaggttgtcatcagcttgtcccattcaagccaccgagctcaccacagacacagtggagccgcgctcttctccagtgacacgtggacaaatgcgggctcatcagcccccccagagagggtcaggccgaaccccatttctcctcctcttacctcattttcagcaaacttgaatatctagacctctcttccaatgaaaccctccagtctattatagtcacatagataatggtgccacgtgttttctgatttggtgagctcagacttggtgcttccctatccacagcccccaccccttgtttttcaagatactattattatattttcacagacttttgaagcacaaatttattggcatttaatattggacatctgggcccttggaagtacaaatctaaggaaaaaccaacccactgtgtaagtgactcatcttcctgttgttccaattctgtgggtttttgattcaacggtgctataaccagggtcctgggtgacagggagatacatgagcaccatgtgtcatcacagacacttacacatacttgaaacttggaataaaagaaagatttatgaaacgtgtctgtgtttcctttgacccacagcacctgggccctgagcagcaggcttcctatgttcagtggccagaagcagagcttcaggtacattcgtggttttctccggtggacatgggtcctcagatcccctccagcccagtgtggccaccagggcacctccttcaatagactccaaaaggggcagctcctaccatctgggagaagcaatctaaggagatcacaaaaagtaacggaacaggagtcataatctttcttgaactcctgtggtttttactgaaacttgtcagaaggcataggagttgtgcgagggctggatgggaagtctagatttaaacagccaccaggcagcttatcaaagcaagagggcatccgttcacaggacaggggctcccagcaattcccagtggcagtggggggtggctggcccaagccccaagtcacccagacacaggggacttccccttgtgtcaacagcatgctagggcccagcaaactagagggtaggtaggaccaccttggcaccaactccactcaaaccac

SEQ ID NO: 23056 - DNA, 2114 bp, Homo Sapiens
ctggccacagtatgaggtgttttctaaggcttgacattaggtatttcctagtgcaaaatttactgatcccgcgtaggctccaacctagagccaggattccttaatggaacacaaactgatttactttgaatatactcaagcttcacagcaaacacttcctgtttctattactgtccaagtcttcttaccatgcctgaggcagacaatttaaggcttgattcctcaccctttcccttcatctgctgaaatcccatttagttttagtgcaccaggcatgcactggtatttcatcctatgcattccttccacagcctgacctataaagggctgacactgagtcctggcttgttcagatcagagagaattaacacttttatttctttgatttcaaaagcttctgaggtaacttttgagctcgtaaatgtcaataatttgttgtcaagacaattatattcttaacccagctgctacatatagggaacatagagactgacagaaagtcagtgaatttagaattaaaacagtaagtttatctgattgactatgcttctcaaaatgtaaatggatgatacaaattaatacaaccaattcattttatttggtttggttttggtttttgaatgggtttatgggtttaagagacattgctctctgttgtttatgtgtattcagtgtcagaaaggaaaagtgagcaaaatgactgcaaaggaaactgagctgcagagggaaatgcatgagatggcacagaaaacagcagagctgcaagaagaactcagtggagagaaaaataggctagctggagagttgcagttactgttggaagaaataaagagcagcaaagatcaattgaaggagctcacactagaaaatagtgaattgaagaagagcctagattgcatgcacaaagaccaggtggaaaaggaagggaaagtgagagaggaaatagctgaatatcagctacggcttcatgaagctgaaaagaaacaccaggctttgcttttggacacaaacaaacagtatgaagtagaaatccagacataccaagagaaattgacttctaaagaagaatgtctcagttcacagaagctggagatagaccttttaaagtctagtaaagaagagctcaataattcattgaaagctactactcagattttggaagaattgaagaaaaccaaggaacaatgaaggtgaaccctagtctcaggattgctagtctcaagatggtaccactgtaattctacctggaaaaggaggtgttttcattcctacagatatttttcataagataaatacccacagtgtatagtaatgaacctggataataaatatcttccagcaaatattttacttagaagacgattatattttttaaattttgagattaattgaatatatacaaacagaaaattaagtacaaatttattatgtttatggctcttatacaactatcaaggtaaaggaaatttaccaattaaatacaaagtagtaaaattcaaaatcacaataattaataatgttctgctgctacaaaatgagatgttgggtttaataatagaaggaagtagcactgttgaaatagaattaaatgggtcttgaattcatttgtgattggaatcagaagtcgcgagttctgaaagggtaaggtttactgcaacattgctaataaataatttcaagatgaaatatacaaagatgagatccaagctctaacatttacttgcaacatgaatatggtactgtgttcttctccgtcccccatcctcattccccctcctcctcctgctgctgtttggtcttcctttggaaattcatgatgccatatcagatggttttagaattctgcactttaataatgtaatgcatatgccatatataatatcccagagggatctgctataatattgcataatcgaattcatatttctgcagcaaaatgtgtggatactctcacaaggcaggataaatagagactatatatactgggccaggtgtggtgactcatgcctagaatcccagcactttgggaggccagggcaggaggatcacttgaggccaggaatttgagaccagcctgggcaacatagtgagacctcatctcttaaaaaaaaaaa

SEQ ID NO: 23057 - DNA, 1826 bp, Homo Sapiens
ccgcttttttttttttttttttttttttttttttttttttttttttttttttttttttttttagtcttaggaaacaaaaggtttattgaaatgcatgtagataaattatcatcagcataaaactgttatggagttttcaacatggggtcttttgctcttaaaatgaagtgaagctttgcaagtccattgtccaataggaaaaatattatatctctctgttcagataaagtcctttaaaaaagtaaatctcttttgaaacggtcttttaaacgtctccagcctgtttggctccccccaggtggtgttgctgtccttctccaattgtgagtctgttgaatgggattatcttcatagtggttttcttcatggaataccaccgggttttccaagtggcccaaataatgccattatcataaccattaggagtagatgcttttgagtaagtgccaccttggtaataaactccattgagatggccagcgtgacacttgttcatccaccaaccagatccatcctgttcagcacagttgccttcaaacttatcattgtcattgtcccaggtactgaactgcatgccattatgggatgtgaaaaacttgtcactaggatcatcgccaaaatcaaagccatcaaaggcatctccagcatccccaccagcgaagtaggcatatgttaggcggtacttgtcagcttcaggtcccaccttgaacatggcatagtctgcagtactggttctgccattccagtcttccagttccactcttaatgcatatgggatggcagactgtgtgcttatcaaatgaatcttctcatttcccagccaaaattctgttgtgccagtaggagacagatgtccaaatccttctttatattgaatccagtttttcttgaaatctacactgccatcaagtctcttctgaaacacagtccatccatttccagacccatcgatttcacagtagactaagaattgctggttagctttcagaggtttaataaagtaaagcccgctctgtttagctcccttattggcaatgtcttgacaatctttcccagtgatatcatggatttgcaccgtgtctttgcaaggttcctggcactgtgcttcaagctgggctaccttctctttcaggttaacaatcttttgattatttgaattatatatttcctgcaaatatcgaatacttgagtcatgtgttaaaatcgatgcttcatatttcataatttcttctaacattttcctggacttcaaagtagcagcgtctatcatatttggttttgatgattcatcaggattataagtgagttggattgcttttatcagctgtttgacttctgatgttttgttttcaacttgatgtaagatgtcttccaaagactgtagatccttgtctactttggtttgataagtagacaggaaatctgcaatgccacaggtagttggacaataactaccgaatctttcatctaagatgcagcagttgtctctggtagcaacatatgctacacatgttgaagagagaaataaaagagcatagaagtagagaattaaattccgggggtgcaaggaccaactcatgatgtctgagtgcccggagctccgagccttgtagtgtcagcatttatttatttatgtacctttgttatgatgggatatttttcatttgaaacttgttcataaaaatgtcaatgacattgatgactgatttgtacatatttttcatatagttttgtttaaaaaataattcacgcaaaatcttgaagtcatttttgctattgaaataaaccttaattaaaatatttcatcatcaaaaaaaaaaaaaaaa

SEQ ID NO: 23058 - DNA, 2430 bp, Homo Sapiens
gtcggggtcttccccagttttctcagccaggcggcggcggcgactggcaatgtttggcctcaaaagaaacgcggtaatcggactcaacctctactgtgggggggccggcttgggggccggcagcggcggcgccacccgcccgggagggcgacttttggctacggagaaggaggcctcggcccggcgagagatagggggaggggaggccggcgcggtgattggcggaagcgccggcgcaagccccccgtccaccctcacgccagactcccggagggtcgcgcggccgccgcccattggcgccgaggtccccgacgtcaccgcgacccccgcgaggctgcttttcttcgcgcccacccgccgcgcggcgccgcttgaggagatggaagccccggccgctgacgccatcatgtcgcccgaagaggagctggacgggtacgagccggagcctctcgggaagcggccggctgtcctgccgctgctggagttggtcggggaatctggtaataacaccagtacggacgggtcactaccctcgacgccgccgccagcagaggaggaggaggacgagttgtaccggcagtcgctggagattatctctcggtaccttcgggagcaggccaccggcgccaaggacacaaagccaatgggcaggtctggggccaccagcaggaaggcgctggagaccttacgacgggttggggatggcgtgcagcgcaaccacgagacggccttccaaggcatgcttcggaaactggacatcaaaaacgaagacgatgtgaaatcgttgtctcgagtgatgatccatgttttcagcgacggcgtaacaaactggggcaggattgtgactctcatttcttttggtgcctttgtggctaaacacttgaagaccataaaccaagaaagctgcatcgaaccattagcagaaagtatcacagacgttctcgtaaggacaaaacgggactggctagttaaacaaagaggctgggatgggtttgtggagttcttccatgtagaggacctagaaggtggcatcaggaatgtgctgctggcttttgcaggtgttgctggagtaggagctggtttggcatatctaataagatagccttactgtaagtgcaatagttgacttttaaccaaccaccaccaccaccaaaaccagtttatgcagttggactccaagctgtaacttcctagagttgcaccctagcaacctagccagaaaagcaagtggcaagaggattatggctaacaagaataaatacatgggaagagtgctccccattgattgaagagtcactgtctgaaagaagcaaagttcagtttcagcaacaaacaaactttgtttgggaagctatggaggaggacttttagatttagtgaagatggtagggtggaaagacttaatttccttgttgagaacaggaaagtggccagtagccaggcaagtcatagaattgattacccgccgaattcattaatttactgtagtagtgttaagagaagcactaagaatgccagtgacctgtgtaaaagttacaagtaatagaactatgactgtaagcctcagtactgtacaagggaagcttttcctctctctaattagctttcccagtatacttcttagaaagtccaagtgttcaggacttttatacctgttatactttggcttggttccatgattcttactttattagcctagtttatcaccaataatacttgacggaaggctcagtaattagttatgaatatggatatcctcaattcttaagacagcttgtaaatgtatttgtaaaaattgtatatatttttacagaaagtctatttccttgaaacgaaggaagtatcgaatttacattagtttttttcatacccttttgaactttgcaacttccgtaattaggaacctgtttcttacagcttttctatgctaaactttgttctgttcagttctagagtgtatacagaacgaattgatgtgtaactgtatgcagactggttgtagtggaacaaatctgataactatgcaggtttaaattttcttatctgattttggtaagtattccttagataggttttctttgaaaacctgggattgagaggttgatgaatggaaattctttcacttcattatatgcaagttttcaataattaggtctaagtggagttttaaggttactgatgacttacaaataatgggctctgattgggcaatactcatttgagttccttccatttgacctaatttaactggtgaaatttaaagtgaattcatgggctcatctttaaagcttttactaaaagattttcagctgaatggaactcattagctgtgtgcatataaaaagatcacatcaggtggatggagagacatttgatcccttgtttgcttaataaattataaaatgatggcttggaaaaaaaaaaaaaaaa

SEQ ID NO: 23059 - DNA, 3124 bp, Homo Sapiens
atgttcaaacccgtcaaggaagaggatgatgggctcagtgggaagcatagcatgaggacacggcggagtcggggctcgatgtcaacactacgcagtggtcggaagaagcagccagccagccctgatggtcgcacctcacccatcaatgaagacatccgctccagcggccggaactcccccagcgctgccagtacctccagcaatgacagtaaagcagagacagtgaagaagtcggccaagaaggtgaaggaggaagcctcttcccctcttaagagtaacaaacgccagcgggagaaggtggcctctgatacggaggaggctgacaggaccagctccaagaagacaaaaacgcaggagatcagcaggcccaactcgccatctgaaggtgagggagagagttcagacagtcgcagcgtcaacgatgagggtagcagtgaccccaaagacatcgaccaggacaatcgcagcacgtccccgagcatccccagcccccaggacaatgagagtgactcggactcgtcagcccagcagcagatgctgcaggcccagcccccagccttgcaggctcccactggggtcaccccagctccctcctcagctcctccagggacccctcagctgcccacgccagggcccacgccctctgccactgcagttcccccacagggctcccccacggcctcccaggcccctaaccagccrcaggctcccacagcgcctgttccccacacccacatccaacaggcaccggccytgcacccccagcggccgccctcaccgcatcccccgccgcatccctcgccacatcccccactgcagcctctgactgggtcggcgggccagccttctgcaccctctcatgcccagcccccactgcacggtcagggcccacccggccctcacagcctgcaggctgggcccctgctgcagcacccaggccccccacagccctttggcctccctccccaggcctcccaaggccaggcccctctggggacctccccagcagcagcgtaccctcacacctccctgcagctgccagcctctcagtcagcgctgcagtcccaacagcctccacgggagcagcccctgccaccagcgcccttggccatgccccacatcaagcccccgcctaccactcccatcccccagctgccggcgccacaggcccacaagcaccctccccacctctcggggccctcacccctctccatgaatgccaacctgcctccccctccagccctgaagcccctgagctccctgtccacacatcaccccccgtcggctcaccccccacccctgcaactcatgcctcagagccagccattgccctcctcgcccgcccagccccccgggctgaccagaaccagaaacctgcccccgccccctgcctcccacccccctacaggcctccaccaggtggccccccaacccccgtttgctcagcacccctttgtccctggaggccctcctcccatcacccctccgacctgcccctccacctctaccccaccggcgggacctggcacctcggcccagccaccctgctctggtgcggcggcttcaggaggcagcatagcgggggggtcgtcctgcccactccccaccgtccagatcaaggaggaggctctggacgacgctgaggagcctgagagcccccctcccccaccaaggagcccgtccccggaccccactgtggtggacacccccagtcacgccagccagtcagccaggttctacaaacacctggaccggggatacaactcgtgtgcccggacagacctgtacttcatgcctctggccgggtccaagctggccaagaagagggaggaggccattgagaaggccaagcgcgaggctgagcagaaagcccgagaggagcgagagcgggagaaggagaaggagaaggagcgggagcgggagcgagagcgggagcgcgaggcagagcgggcggctaaggcgtccagctcagcgcatgaaggtcgcctcagtgacccacagctcagtggtcctggccacatgcggccatccttcgagccaccaccaaccaccattgctgctgtgcccccctacatcgggcccgacacacctgcccttcggactctgagcgagtacgcccggccccacgtcatgtcgcccaccaaccgcaaccaacccttctacatgccccttaaccccacggaccccctgctggcctaccacatgcctggcctctacaacgtcgaccccaccatccgcgagcgggagctccgggagcgggagatccgagagcgggagatccgggagcgtgagctgcgggagaggatgaagccgggcttcgaggtgaagcccccagagctggaccccctgcacccagccgccaaccccatggagcactttgcccggcacagcgccctcaccatccccccgaccgccgggccccacccttttgcttctttccacccgggcctgaaccccttggagagggagagactggccctggcgggcccccagctgcggcccgagatgagctaccctgacagactggcagccgagcgtatccacgcagagcgcatggcatcgctgaccagcgatcccctggcccgactgcagatgttcaacgtgactccgcaccatcaccagcactctcacattcactcccacctccacctccaccagcaggaccccctccaccaaggttcagcaggccccgttcacccgctggtcgaccccctgactgccggtccccacctggctcgcttcccctacccgcctggcactctccccaaccctctgcttggacagcccccacacgagcacgagatgcttcgccacccagttttcggcaccccctacccccgtgacctgcctggggccatcccaccccccatgtcagcagcccaccagctgcaggccatgcatgcccagtcggccgagctgcagaagctggccatggagcagcagtgcctgcatggacacccccacaggcatggtggccacctaccaagtcaggaagattattacagtcgactgaagaaagaaggtgacaagcagttataagttatttatttgttaacgctggctgtggaaaccccagttcttggggggagaaacaggactttttacataaaataggagctgcaaa

SEQ ID NO: 23060 - DNA, 1485 bp, Homo Sapiens
gggccggggccgcgcgccgctgccgatgcccgcgcaggctcataggcagaagggacttgacttgtctcagataccctattttaatcttgtgaagcatttaacacctgcctgtccaaatgtatatagtatatcacagtttcatcacacaaccccgtacagcaaaacacacagtggtgagaaatacaccgatcctttcaaactcggttggagagacttgaaaggtctgtatgagggtattagaaaggaacccctcatatcaacaacagaacttaaggaaatctctgagtactactttgatgtaaaaggaaaagcctttagaccgattattgtggtgctaatggcccgagcatgcaatattcatcataacaactcccgacatgtgcaagccagccagcgcgccatagccttaattgcagaaatgatccacactgctagtctggttcacgatgacgttattgacgatgcaagttctcgaagaggaaaacacacagttaataagatctggggtgaaaagaaggctgttcttgctggagatttaattctttctgcagcatctatagctctggcacgaattggaaatacaactgttatatctattttaacccaagttattgaagatttggtgcgtggtgaatttcttcagctcgggtcaaaagaaaatgagaatgaaagatttgcacactaccttgagaagacattcaagaagaccgccagcctgatagccaacagttgtaaagcagtctctgttctaggatgtcccgacccagtggtgcatgagatcgcctatcagtacggaaaaaatgtaggaatagcttttcagctaatagatgatgtattggacttcacctcgtgttctgaccagatgggcaaaccaacatcagctgatctgaagctcgggttagccactggtcctgtcctgtttgcctgtcagcagttcccagaaatgaatgctatgatcatgcgacggttcagtttgcctggagatgtagacagagctcgacagtatgtactacagagtgatggtgtgcaacaaacaacctacctcgcccagcagtactgccatgaagcaataagagagatcagtaaacttcgaccatccccagaaagagatgccctcattcagctttcagaaattgtactcacaagagataaatgacaactctttctgttctttctggcagctatcttaccagactgtgcctaaagaattttgtggaatacactttgtttgcttcatgtgcagataaccaaaaatcattttaaaagatatcaaacttattgatgggcaatttatttttttttattgcaaaaggtttttcagaaaactttttaaatgtaattaataaaccacctgaatctgtcattctagtcctataaattataatcaaggtatcttgatggttatatgtggtattgtttacactgttaatatccacatgtaaggccattacacaaataaataaccaatgttaaaattcaaaaaaa

SEQ ID NO: 23061 - DNA, 3150 bp, Homo Sapiens
ggccaggaacgcacgctgcctggccgtatcgccgcccccaccgacgccgccgccgggactagaagtgagccgcccgggtcccaaacgccagccagccagtcagtgggtcccgcagtcgcccgcaaccggggcgaatcatggcggccgccaaggtggctttaaccaagagagcagatccagctgagcttagaacaatatttttgaagtatgcaagcattgagaaaaacggtgaatttttcatgtcccccaatgactttgtcactcgatacttgaacatttttggagaaagccagcctaatccaaagactgtggaacttttaagtggagtggtggatcagaccaaagatggattaatatcttttcaagaatttgttgcctttgaatctgtcctgtgtgcccctgatgctttgtttatggtagcctttcagctgtttgacaaagctggcaaaggagaagtaacttttgaggatgttaagcaagtttttggacagaccacaattcatcaacatattccatttaactgggattcagaatttgtgcaactacattttggaaaagaaagaaaaagacacctgacatatgcggaatttactcagtttttattggaaatacaactggagcacgcaaagcaagcctttgtgcaacgggacaatgctaggactgggagagtcacagccatcgacttccgagacatcatggtcaccatccgcccccatgtcttgactccttttgtagaagaatgtctagtagctgctgctggaggtaccacatcccatcaagttagtttctcctattttaatggatttaattcgctccttaacaacatggaactcattagaaagatctatagcactctggctggcaccaggaaagatgttgaagtgactaaggaggagtttgttctggcagctcagaaatttggtcaggttacacccatggaagttgacatcttgtttcagttagcagatttatatgagccaaggggacgtatgaccttagcagacattgaacggattgctcctctggaagagggaactctgccctttaacttggctgaggcccagaggcagaaggcctcaggtgattcagctcgaccagttcttctacaagttgcagagtcggcctacaggtttggtctgggttctgttgctggagctgttggagccactgctgtgtatcctatcgatcttgtaaaaactcgaatgcagaaccaacgatcaactggctcttttgtgggagaactcatgtataaaaacagctttgactgttttaagaaagtgctacgctatgaaggcttctttggactgtatagaggtctgttgccacagttattgggagttgccccagagaaggccataaaacttacagtgaacgattttgtgagggataaatttatgcacaaagatggttcggtcccacttgcagcagaaattcttgctggaggctgcgctggaggctcccaggtgattttcacaaatcctttagaaatcgtcaagatccgtttgcaagtggcaggagaaatcaccactggtcctcgagtcagtgctctgtctgtcgtgcgggacctggggttttttgggatctacaagggtgccaaagcatgctttctgcgggacattcctttctcggccatctactttccgtgctatgctcatgtgaaggcttcctttgcaaatgaagatgggcaggttagcccaggaagcctgctcttagctggtgccatagctggtatgcctgcagcatctttagtgacccctgctgatgttatcaagacgagattacaggtggctgcccgggctggccaaaccacttacagcggagtgatagactgctttagaaagatactgcgtgaagaaggaccaaaagctctgtggaagggagctggtgctcgtgtatttcgatcctcaccccagtttggtgtaactttgctgacttacgaattgctacagcgatggttctacattgattttggaggagtaaaacccatgggatcagagccagttcctaaatccaggatcaacctgcctgccccgaatcctgatcacgttgggggctacaaactggcagttgctacatttgcagggattgaaaacaaatttggactttacctacctctcttcaagccatcagtatctacctcaaaggctattggtggaggcccataggaagatcagccctgggatagtgctgtctttttgtgggtactgcagtaaagaacatccctcctgggaatgaagcaatgcttcatcccttttacgtccatctcttgtttaaattcaagtccaggcttttttatcatgtgaaatcattcattttctgggtgttttcttaaccagatcattgtgaaattattcataattattatttggccctctgcccagaaacctttgtttgcatctgaaaattgatgggatttggtcaacactaacatgatttggggaaaggagcaagtcagaatagaaattagtactcccctccttgaactaggattgtagtcccaaagaggctactgtaaggcaatcatggtgctcagagcagtgtttcgtgtgtgttttaaactggtaggaaactaggtgcatatttataaaaataaaaaacactgggagaaatgaaaaaatatatatcaaatatattcagcctggcttcaaattgtaagcatgcacaaattctgtctctggattatattatgaagcttttatgtgaaacatgtttctttgtaatgaaaaccacattggagatgtttagtaatcatattgttactggtaccaagactactagggaaatgcctttgtactttagggaagtacttttggcattttactgtacagacagaaaaaactgagatgtagcccctctcctggaagtgctaattttgaaaaactgctcatatgatgtacatgtactgattactgcctattttaataaacactcttgaaaaatgcatgttgccctgttgctgcctgccctattctcctcatctccccatcattggtacccacttgcttttaaaatccactttatcttgaataatgtaagacaaatatgttctgacataagtatttaattcatgttgccttgcataatggtcagaggcgcatgaatttgtgaaggtggaaataaactatttgtaaagtgaaaaaaaaaaaaaaa

SEQ ID NO: 23062 - DNA, 2331 bp, Homo Sapiens
cggctgaagcgccgccggcggggctcactgtggtggtgtgagtgggaggcggcggcgctggtggctgcagctggggtgaggcgcgaggcggcgcactcgacggctgactggagcagcggtaaaggcgaggatggagaccgaaggatataagtcaaagagtacagcagaaaatgtctactgaacggacttcttggacaagcctgtccaccattcagaaaatagccctgggccttgggatcccagccagtgcaacagttgcctatatcctataccgcaggtatagggaaagcagagaagagcggctgacatttgttggggaagatgacattgagatagagatgcgggttccccaggaggctgtgaaactcatcattggccggcaaggagccaatattaaacagctgcggaaacagacaggtgctcggattgatgtggacacagaggatgtaggcgatgagcgagtgctgcttatcagtggttttcctgttcaggtgtgcaaggccaaagcagcaatccatcagatcctgacagagaataccccagtgtctgagcagctttcagttccccagagatctgtgggcagaatcatagggagaggcggcgagacaattcgttctatctgtaaggcatctggagccaaaattacctgtgacaaagaatcagaagggacattactactatcaagacttataaaaatctcaggaacacagaaggaagtggcagcagccaagcatttgatactggagaaagtttcagaagatgaagaacttcggaagagaattgctcattctgcagaaaccagggtcccacgcaaacagccaatcagtgtgagaagagaagacatgacagagccaggtggagctggagagccagcattatggaaaaacaccagttctagcatggagccgactgcacccctggtgactcctccacccaaaggaggaggcgacatggctgtggtagtgtcaaaggaaggttcctgggagaaacctagtgatgacagctttcagaagtctgaagcccaggccatcccagagatgcccatgtttgaaatccccagtcctgacttcagttttcatgctgatgagtacctagaagtctacgtttctgcttctgagcaccctaaccacttctggatccagatcgttggctcccgcagcctgcaattggataagcttgtcaatgagatgacccagcactatgagaatagtgtgcctgaagacttgactgtgcatgtaggagacattgtagcagcacctttacctacaaatggttcctggtatcgagcccgggtcctcggcaccttggagaatgggaacttggacctctattttgttgactttggagataatggagattgcccactgaaggacctcagggctctcaggagtgacttcctaagccttccatttcaagcaatagaatgtagtctggcacggattgctccctcaggtgaccagtgggaagaggaagctttggatgagtttgatagactcactcattgtgctgactggaagcctctggtagccaagatctctagctatgtccagactgggatctcaacttggccaaagatctacttatatgatactagcaatgggaagaaacttgatattgggctagaattagtacacaaaggatacgcaattgagcttcctgaagacatagaagaaaacagagctgtcccagacatgttgaaggacatggccacagaaacagatgcctctctcagcacgttgctcactgagaccaaaaagagctctggagagataacacataccctgtcctgcctcagcttatcagaagctgcttccatgtctggtgatgataaccttgaagatgactacttactcggaagtctgggcttcagtttgctcagccatctgctttgctgtatgttgcctgcaatgaactcgctgaagcatgctcagccctggaactggtgctaccagagttccgtagggaacctttactctttagaggttccctgatataaatcattcataagacttcctaccctggaaaatgagtaatgtctcattcttacctgcagtttgttactatgtataaaagtctttttctttaatatgcctttaagtcttacctgtttacagcccattctgatgggttctttgtcattctgttagtataacccagtacttttcctgctgcctggaatgccctcttctatgttacctattctgtccgttgagatgccccaacttgggccaaagccaagagatctatgtgccttctctggttttctccacatctatagcacctcaactgaaatatatggataaaaacagcctaacaaaaaaaaaaaaaaaa

SEQ ID NO: 23063 - DNA, 2659 bp, Homo Sapiens
ggcccatgcaagtccaaaattcagcagggcagtcaaattttaaacctccaaaatgatcacctttgactccacgtctcacaatcatctctctcaagttcgaagttccacaaatctctaaggcaagggaaagatgctgccagtctctttgctaaaacacagcaagagtcacctttactccagttcccaaaaagtttttcatctccatctgagaccacctcagcctgaattttattgtcaatattgctatcagcattttgggcaaagccattcagcaagtatctaggaagttccaaactttcccacattttcctgtcttcttctgagcccttcaaactgttccaacctctgcctgttacccagttccaaacttgctttcatatttttggctatcttttcagcaatgccccactctactgttagcagtttactgtattagtctgttttcacactgctgataaagacattcctcaagattgtgaagaaaaagaggtttaattggacttacagttccacatggccggggaggcctcagaatcatggcgggaggtgaaaagcacttcgtacatggtggtggcaagagaaaatgaagaagaagcaaaagtggaaacccctgataaacccatcagatctcatgagacttactatcatgagaatagcacaggaaagactggcccccctgattcgatgacctccccctgggtccctcccacaacatgtgggaattccagaagataaattcaagttgcaatttcagtggggacatagccaaaccaggcgccaggtagctcctgcccttagcccaggaggccatccctgcagcggggccacgggcatcggaaaagccatcgtgaaggagctcctggagctggggagtaatgtggtcattgcatcccgtaagttggagagattgaagtctgcggcagatgaactgcaggccaacctacctcccacaaagcaggcacgagtcattcccatacaatgcaacatccggaatgaggaggaggtgaataatttggtcaaatctaccttagatacttttggtaagatcaatttcttggtgaacaatggaggaggccagtttctttcccctgctgaacacatcagttctaagggatggcacgctgtgcttgagaccaacctgacgggtaccttctacatgtgcaaagcagttgaccagctaatctggcttctgtgtctttttgaaatggctcagacctgtttctccaagaagacctagttccctttagtagtttacagctcctggatgaaagagcatggaggatctatcgtcaatatcattgtccctactaaagctggatttccattagctgtgcattctggagctgcaagagcaggtgtttacaacctcaccaaatctttagctttggaatgggcctgcagtggaatacggatcaattgtgttgcccctggagttatttattcccagactgctgtggagaactatggttcctggggacaaagcttctttgaagggtcttttcagaaaatccccgctaaacgaattggtgttcctgaggaggtctcctctgtggtctgcttcctactgtctcctgcagcttccttcatcactggacagtcggtggatgtggatgggggccggagtctctatactcactcgtatgaggtaccagatcatgacaactggcccaagggagcaggggacctttctgttgtcaaaaagatgaaggagacctttaaggagaaagctaagctctgagctgaggaaacaaggtgtcctccatcccccagtgccttcacatcttgaggatatgcttctgtactttttaaaagcttatagttggtatggaaaacatttttcttatttttaagtgttattaattatatctatggaaaaactattcctgaaatatatacagtcttatgtcccaatcagagtcttttaacctatgatttaaaaatgtataagtaacagaaattaacatattttaatgactttactttttatttctaagaaaagtatttgaaaaatggaataattttaaatcaatgataattctagggatcatgaactcccagaagattttattatttaattgtaaaggtagaggccagacgcagtggctcacgcctgtaattccagcactttgggaggccgaggtaggcgggtcagttgaggtcaggagttcaagaccaggctggccaacatggtaaaaccctgtctctactgaaaaacaacaaaaacaaaaacacaaattagtcgggtgtggtggcacacacctgtagtcccaggtacttgggaggctgaggcaggaggatcgcttgaacccaggaagcagaggttgcagtgagctgagatcatgctactgcagtccagcctgggctacagagtgagactgcatctcaaaaaaaacccaaaaaacaaaaacaaacaacaacaacaaaattataaaggtagaaaataaacctaaattgtgtcgtaattaagattattaaaattagaattatacaatgacttatttttggtggcaaatactttaggagcaataatgccttatggtaattattgatgtatagtttcttttgtttatgaagtcaaatttgtataaattctcttaattcaaagaaaaagttttatgtgatttaaaaaaaaaaaaaaaaaaaaaaaaaaaaaaaaaaa

SEQ ID NO: 23064 - DNA, 2608 bp, Homo Sapiens
cccgctttttttttttttttttttttttttttttttttttttttttttttttttttttttttttttgaaatataaaatcaataataatttttattttttgttcagcacagcctgtgcggagcgagccagagctacctgtggaagggacctcagcgaaaaccagtgattgcccacacagcagtagctcctctgacggcccagcggaaagccctgtggaaagctgtgtgtcggctggagctgagtggaccagggtttccccagagaccagcgcctgctcaaagctttctgacatgaatgacctccccatcagcagctaccctggatcagattcctgggcctgcccagggaacactgaggatgtgttcagtcattttctttattggtgaactcctctccctgacataagcaaggacttagagctgcttctgagtgaggctgggcctcaggaggacgactgcagcagacctggggttgtgcacaacagctgtgtggcccggagtgagattcagaaagtccttggtagcttgcaggagcatctgatgaatgatccagatgttcaagctcaagttcaggtattatccgctgcactgagagctgcacagctcgactgcgtgaatgaagctgagagcaagccaacagcaggcctaaaggaagtgtccatttcacatcccagctctgcctctgacaatcagatcgctctggcggcctcatcatctcaggatgagctctttgtggccaggatattacaaagcccagatccaggtggacccagaaatggaaccagtgaccatctggagactgaccagaggcaggatcccaccccacttgaagagaataaatctaaattacaggatgtaatacctcagccgctgctagatcagtatgtgtccatgactgacccagctcgagcccagactgtcgatactgacatagccaaacactgtgcctacagcctcccaggggtggcactgaccctgggcaggcaaaattggcactgcctgaaagatacatatgaaacactggcttctgatgtacagtggaaggtacggcgagccctagccttctccattcacgagctggctgtgattcttggggatcagttaacagcagctgacctggtgcctatcttcaatggatttttaaaggatctggatgaagtgcgaataggagttcttagacacctgtatgattttctaaagttgcttcatgaagacaagaggagagactatctttatcagcttcaagaatttgtagtgactgataacagcaggaattggaggtttcgatatgaactagcagaacagctgatactgattctggaactctatagtcccaatgatgtttatgattacctaatgcacattgccttaaagttgtgtgcagatcaagtttctgaagttcggtggatctccttcaaactagtcgtggcaattctgcagaagttctattccaacagtgaaagtgcattggggttaaatttcatcaatgagctcatcataaggttccggcactgttctaagtgggttggaaggcaagctttcgctttcatttgtcagattctgaaacgacttctttgggattaaagaagtgtatgtttctagaagactgcggaaaacatcatttctttggctgtgactttcttggagcaggcagtggtgagcaaggagtgtgtccccgtggaccagttcatggagcacctgcttcccagcctcctgagcctcgcatcagatcctgtgcccaacgtgagggttctgctagccaaggccctaaggcagatgctgttggaaaaggcgtattttagaaatgctggtaaccctcatcttgaagtcattgaagagaccatcttagcattgcagtcagaccgggaccaagatgtttccttttttgcagccctagaaccaaagcggcggaatatcatagacactgctgtactagaaaaacagaattaactacttccgtgatgagttgcaatctgattatttcatgcttggcacatatggcttaccataacttgaaggggaactgattgtattataccagctgggggagattttggaacctttcatactgtgcactcagtgattgacgccttttccatctgtaccccgaagggactgaacctgatgggggctttttctggatggctaggccatcctgatcaagcctgatcagtaagtctgtggaaagattgcagaccaggtggctaactgggcactggagcctctgaaccatcaggctgtctgccagcaagttcttttctccatggcagactgtatgatctgaagtccccccaaccctctccaagtaaagtagtttattagaagctcttaagtctttaatagacctgcatatttccttcccttatgatttcctataaaatatagtttatggtgttatatttttaactgaaatactgtacatatgtaaataactcttgacaggaagaaaatatattaatgtagtatttgccccctatcagtgagctgaacaaatacatcatttaaatctatgctgcactttgagttgctacaaatatggttcgatttgtttatttttgaaaaatgtgataaagaaatctaaagaatgaaaaaaaaaaaaaaaaaaaaaa

SEQ ID NO: 23065 - DNA, 1658 bp, Homo Sapiens
gaattcccacctgaggagttcaaggaactgatggacctgccgacgtgtggagccaggaacttaaaacaacatttagccaaagccacagcttcagggattatggggagcccaaaaccagccatcaagtccatctcggcctcagcactcttgaagcaacagaagcagcggatgttggagatgaggagaaggaaatcagaagaaatacagaagcgatttctgcagagctcaagtgaagttgagagcccagctgtgccatcttcatcaagacagccccctgctcagcctccacggacaggatccgagttccccaggctggagggagccccggccacaatgacgcccaagctggggcgaggtgtcttggaaggagatgatgttctcttttatgatgagtcaccaccaccaagaccaaaactgagtgctttagcagaagccaaaaagttagctgctatcaccaaattaagggcaaaaggccaggttcttacaaaaacaaacccaaacagcattaagaagaaacaaaaggaccctcaggacatcctggaggtgaaggaacgtgtagaaaaaaacaccatgttttcttctcaagctgaggatgaattggagcctgccaggaaaaaaaggagagaacaacttgcctatctggaatctgaggaatttcagaaaatcctaaaagcaaaatcaaaacacacaggcatcctgaaagaggccgaggctgagatgcaggagcgctactttgagccactggtgaaaaaagaacaaatggaagaaaagatgagaaacatcagagaagtgaagtgccgtgtcgtgacatgcaagacgtgcgcctatacccacttcaagctgctggagacctgcgtcagtgagcagcatgaataccactggcatgatggtgtgaagaggtttttcaaatgtccctgtggaaacagaagcatctccttggacagactcccgaacaagcactgcagtaactgtggcctctacaaatgggaacgggacggaatgctaaaggaaaagactggtccaaagataggaggagaaactctgttaccaagaggagaagaacatgctaaatttctgaacagccttaaataacccgaacttcagacattttcccacagacttcctggcctcctgtgactctggaaagcaaaggattggctgtgtattgtccattgattcctgattgacgccgtcaaaaacaaatgcttgttaagcccataagctttgcctgcttactttctgccattgggttggtttgataccacatttaacattgacatttaagtggaaaaccaagttatcattgtcttttctaagctcagtgtggatgattgcattacttcattcactgaagtttttgcccaaaaattggaaggtaaacagagagctatgtttctgtatcttttggttatagagtgttcacttctttatcataacaaaattctagtgtttatacgaacacccagaggcaaaagaatttggcttaattctcactccaggtaagtagcttaacttctgggcttcagttttctcatctgtaaaatcaggaagattggactaagtgatcctgaaatgtattttttagcactggatttctacaaataataaaactttcccatctaaaaaaaaaaaaaaaaaaaaaaaaaaaaaaaaaaaaa

SEQ ID NO: 23066 - DNA, 1581 bp, Homo Sapiens
gccctgagtccttggggtggttctgcttattcttcaagtttatctgaatctgtggggagtgcatgatccccatgttgcaatatggagtctctgccctgagatcttccccatctcagttttccttccatgaaagagtacgtgtaaatacatagtgttcataagagacctggccacatgtgcatgaatgactgggccgatgcttaggaatatttatgagggatggggagggagacgattggaatgggggcgttgcctgcagaactttagaccctgtagccatagagggaatggcgttcctttctaaaaggaactgaaacactgcccctctccccattgccccacaaccttactctaaatttgagtagagaaaagctcctaaagtgaccttccgggtgggaagggcagcagtacacatgaccccatccttttctttgtttttaccccctggctgccaccactgccatgtcacagctgctttctctggctggagtgtaggctgtaccccatttccttggctcccattaaaaatcaacaacattctaatgattagggaacaacagaaggggaatagtcataggatatacgagcagtataaagatacgtttgcaatcagtgactactcagggtgacacccttgccctaaagcaggagtcccccctacctggggtccatggactccctgaaattgtatgcaaaatgttgtttgtacatgtgtgtctgtatgtctctgtggggaggttttatggcttttgtcagattttcaaggccttaacaaagttaaaggaccactgccctgaggttactgcactgaggccaagttaggatggcatcactctgtggcagctctccctggacttgccctgcctggaacagggtgatttgctggaatggagttaccactgagatgccaaaggttgctgggtctggaagactgttgtggcctctcagttctctttgagtctgactgactgtggccagtccctggactggtagctgctggaggccttcttgtttctccagtccctggaagctgagctctatgtgtatttgatgacattgtcagctcttaccaaacgtcaagacctcttcctgcttgaccactcgcacatggctctaggcttctcctgctgagtcctggtcttggcctgtgaatgtgcctcgttcatccctggtgcttgagcccctcaagctccagtcaatgatccagtccttcccctttgaagttttctgctctactttccttggcagcagcctgtgaactactcaaaagagtccccttgggtttggaattatcagtggctttgccactagtaaatgtgtgatcttcggcaagtaacctaacctagggacatcagtttactcatctgcgaagtggggataataaaacctacctcagggttgcttcaaggattaaatgagaaaatatgtcaacaataaagacctgtctgtaccaataaaaaaaaaaaaaaaaaaaaaaaaaaaaaaaaaaaaaaaaaaaaaaaaaaaaaaaaaaaaaaaaaaaaaaaaaaaaaaaaaaaaaaaaaaaaaaaaaaaaaaaaaaaaaaaaaaaaaaaaaaaaaa

SEQ ID NO: 23067 - DNA, 1797 bp, Homo Sapiens
tgtcgcccaggctagagtgcgtggcacaatgaaggcacactgcagctttgacctcctgggctcaggtgattctcccatctcagccttcccagtaagtgggactacaggtgcccaccaccaagactggccaattttttgtatagacagggtttcaccatattgcccttacactcctggactcaatctgcccacattggcttcccaaagtgctgggattatagacatgagccaccacacccagcctgtatggctgttgtgaataatatgctgttatgaacacgggcacactaaacaccattcaacttaaaaaaataatcaaagccttaagaactgaccaaaatggcttaggtgaaaataaaataccaaactctgctctaagaaaaggaaagaacattcactgaattataccttcagcaataagcacgtaatggaacttgtttcatttaaaatgcatcacaatcctgtaaattgataatcatcataccgcaattttatagatgagcaaggtattaggcggacctttttcaaaaggtcatacagctagtgacaaatatttccaaatttttcataacatttctttttttgagacggagtcttgctctgtggcccaggctggagtgcagtggtgcaatctcggctcactgcaagccttgcctcccaggttcacgccattctcctgtctcagcctccctagtagctgggactacaggcacccaccaccatgcccggataatgtttttgtattttcagtagagacggggtttcactgtgttagccaggatggtctcaatctcctgaccttgtgatcctcccgccttggactcccaaagtgctgggattacagacatgagccactgtgccaggcctaacatttctgttttaaatagcttaattaactacacatgttttatattcttgcctctgaaaggcagctttttttgttgggttggtttattatgcatcagacacttgattcgctgaggaattctgtttttcagtaattcatccaccacaaatatcacgtagcattttgactccacagacctaagagtcttaagtcttaaaaggattgtaaaatctaagtttttctgagctatctgagagtaagaggcttttttctattgaaaataggttgcatttcaaactttatccgtaagagctcacaacactttctccaacatgcatgcccatgtgctcacttaaacagaactctgagtgagacagtaaatacctcatatgcccttgaaaattttaccttggcatagaaaaaccttgttaagaacctaaaaataatttcactttgaaagtctttagggttagacaaatgttaaacttcaattggcagtacaagggcagcactcaagccagtaagagttttgttgggccaaattatgttgaaaaagatcaaatattttaaaaacaggagatttcacataaaaatctgggattccagcttcttctgaataaatgaggtacactaattatgcagagtggcaaatggctggagttgagtgggaggtgtttctagcccaacagataggcatggaagctccagctcagccccctccactccattttcttacacaagggaagccactatggtatagcatctaacttaaggcatattatatgtattcttaagacagaggaaaaggctgaatatttgatattgtcaaaagaaatgagagtctaactttctgtggcaaggaccttcttgcagtagtaacatagtctggaacacctccaacataaattatgaaaagaaagctcttggctcagaagagaaaaaaaaaaaaa

SEQ ID NO: 23068 - DNA, 1505 bp, Homo Sapiens
caaaagcaacccttcttgctccaggcatgtgcaggaggttttttggtttcagcattttgttgcatgctgactatgtcctttaccttctcttaaattatgtatcaattcatgctggtttattcacttcctgatgtctatatgaagaggctgtctgccaacatctttcatcactctgcctgcaactatgaaaaatttagttctaaaaaatgcaaccttgctaaattgagtactaataggattggttcaattatgttctatgtctgttccatattgacattgtgtgcatctttgccatgcaggctttttaggaattatcgcatctctaacttcccacgagtgtttatgaaaatgtttagatttaaagaactttattgctttagacagaataaggcatgcagttctaacagaaagatccatgaattccagaaatatcactgaaaattattgacatttaagattattttctgtttgttactatggttcacaattcaagaataactctggccaggtgcagtagctcacaccctgtaatcccagcactttgggaggctgaggtaggcagatcacttgagctcaagagttcaagaccagcctgggaaacatggcaaactcccaccattacaaaaaaatacaaaaattagttggtcatggtggtgttcacctatagtcccagtgacttgggaggctgggatgggaggatctcttgagcccaggagatgcaggcttgcagtgagccatgatcatgccactgtactgcagactgagtgaaacagcaagatcttgtctgaaaagaaaaaaaaagtaaaagaaaaagaaaagaaaataactcccattgctaaagacatatatgcttatcaggttaagataaagtgaattttgttcttcccaatgacatttcaggatatttgttcacaggaaagaacatgttgggaattggtactggctagaaatttctgttgagtatttattaccccatggtaataatggtaaaccacagtttagaaagattttttttgacagccacagcatgttccgaagagatgattggaagatggaagtggagggttaaataatgaaatgcagctaacatttcggaaagtttctaaaagttgtacaacatgccctacagctactctttaaatctccaaatcaaatgagtttcaggtggagcctctgggaggtgatgaggtcatgagagtggagcctcatgaatgggatgagcactcctacaaaaaggattccagagagctcgcttgctccttccacagtgtgaggacacagagggaaggctctgtctatgaatgagaaagtgggtccccaccagacattgaatctgccgcatcttgatactggacttccagtctccagaactgtgggcaataaatgtctgttgtttattacctgtccagtatctttggtattttgctatagcaacccaaatggactaagaaaacaccagaggccatacctaataaaaatattgacatcacaaaaaaaaaaaaaaa

SEQ ID NO: 23069 - DNA, 1857 bp, Homo Sapiens
gggagaaggagaggcaaggaaagagggagggaagaaaggaagaaaagaaggagggagagagggaggaaggaagaaggtgcaaaaagaagctagcaggaatctgatttaatttcttgctgcaaaggaggttatcatctaatacacctattctattccaggcacttttctaggtaaaacagatgtgaatctagcttcatggagccatgaaaatacagattaggtatacaaataaactaacaaataaatctacattacaaactttgattactgctatggaagaaaaatacagagtgctctaagagagaataacaataggaactgtatttaaattgaaggactataagaggagtctgaggatatgaaaaatagagctgatgcccaaagatgagaaaaaattaattaatgaggacaaataaggtaaaaccattcccaatagaaaaaaaatggaatctacaaagaaaagaacatggcacccttgatgagctgagataaggccaacataactaaaacagaatgagctagtggcatgagatcagtctgcagagacagtcatgggccagcttatgtaatgtctttttggataatgttaagcatttgattctgtcatcattcttagttcaacagaaagccactgacggctttcttcaagcaagaaaatgagcttatctgatttacattttttaagtcactaaggttgctaggggaactgattaagtatctgctaatgtaggagagatgacaaattatacaatggtgatagccacagaagaaaaaagaagtagaaagattctaagtacactctgaagatgatactggtagcaaaggtgttagattagattagatggggggatgaaggactgggtagtgtcagcaataattttcaggtatctccctttggcaaaaggatggattactgaggcaatcaagtctaaggtagaaagggttagggaagaaaaatgagaagctatcagagttttgttttggaaatgtttgatttaaaatgcctgaaggctatcctactgaagctgtcaagtaagcagcagggtatacaaatctgaagtgcagaggagaactgggctacagatgccagtttaggacttcttgggatctgaaaggtattgaaaatctgaaaatactcatattttatacattaagaagtatggaatatattgatgttgatagcatcccaaagccacagagcacacatttaatttgctcctagtaacacctatgagtaggtattgaaattacttttaatgatgaaaaattagtaaaatatttccttgtattttactatagtatactcccatgtcatctataataactgagaaccatctctatcaaaagatatgtttttaaaagcttatctaacaaattattaaaggaactaaaattttacaactttttcccctagatacactatacctttcctccactgattctctgtaactaatctgcctgcaaaatgggtgattagtaaaaacatttactgagtgtataaagtacatgtaggggtatacagaaacgggaagtagctcacccattctccactaagttatttcaactttcctctctggagggcccataaaagaatatggcagcaatgtagtatcaaactaccacagatgctagagttccacttgctataaaacctcacttagtttttctaatctgattctaatctataaaatttggataatactataccttttgagttgtgaagtttaacagataattaaaatatatatttatcccaaaaaaaaaaaaaaaaaaaaaaaaaaaaaaaaaaaaaaaaaaaaaaaaaaaaaaaaaaaaaaaaaaaaaaaaaaaaaaaaaaaaaaaaaaaaaaaaaaaaaa

SEQ ID NO: 23070 - DNA, 7781 bp, Homo Sapiens
  misc_feature (5764)..(5764): n is a, c, g, or t
ggcaccgcggccgccgggcctcgccgtccccgccacgggttcgtcgcgtctccccgtccccgcctcgggcccgtcgcggctccccgtcgccaccgcggggccgacgactcttcccgccgggcccggccggcttcagaggcagcagccgaggggagtcccgcgccgactatgcccgggacggccgcggagaccatccaggcgacagcggcagccggagacgctctcctggtctgtgttctgactctttggaaaagagcttaaggatcactgttggcaatgaccacttctgtgttagcacaccagaacggcgacggcttagtgatcggctggggtcaccagtggataatctggaagacatggacagggatgacctgactgatgattctgtcttcactcgaagctcccagtgctctcggggtcttgagcgatatatttcccaggaggaagggcctctcagtcccttcttgggacaacttgatgaggactaccgaacaaaagaaactttcctgcatcgatctgattatagtccccatatcagttgtcatgatgagctgttgcggggaacagaacggaatcgagaaaaactcaaaggctactccatacgatctgaagaaaggagccgggaggccaaaagaccccgttatgatgacacagtgaagataaacagcatgggaggggatcacccaagttttacatcaggaactcgcaactatcgacagcgtagaagaagcccaagtcctaggtttctcgaccctgagtttcgagaactggatcttgccagacgaaagcgagaggaagaggaggagcgaagtaggagcttgagtcaggagctggttggggttgatggtggtggtactggctgttccatccctggattgtcaggtgtcctaacagcatcggagccaggatattctttgcatcggcctgaggaagtatctgtgatgcccaagaaatccattttgaagaagcggattgaggtggacataatggagccctccatgcagcttgagagtttttccagcagtaccagctccagccaggatcaccctctctactctgggcacccatcccttccactaagtggtgctattgctgcttttgcctcagagattgaaaacaaggggactatggtagagactgccttgaaggaacctcagggcaacctctaccaatggggtccccttcctgggattcccaaagacaacagtcctctcagagaaaaatttggaagttttctatgccacaaggataatttggatttgaaggctgagggacctgagcgacacacagacttcctgctgccccatgagagagctagccaggatggcagtggtttttcccgcattctgagcatgttggctgattctaccagtacacaggaaaaaaggcgacgtagctttcccgacattgaagatgaggagaaatttctctatggggatgaagaagaggatttaaaggcagaatccgtaccaaagccccttgggagctctgagagtgaagttatgaggcagaaggcaagctccctgccgtcttcagctccagctgtaaagctagaatcactagaagagaccaatccagaatatgcgaagatccatgacttgctcaagacaatagggctggatattggagtagcagagattagtcaattggctgcacgcacccaggaacgacttcatggcaagaagccatcattacgctcctcagctgaccgccgttcctcagttgaccgatacttttcagctgaccactgttcctcagttgaccaccgcttctcagctgaccgctgttcctcagttgaccactgcttctcagctgatcgacgttcctcagatccccacagactagagagcagggaggcacatcatagcaatacccactctccagaggtgtcccatccacacccaccttctcctgtggatccttacctgctcacaaaaaacagccctccattcctaaagtctgaccatccagtgggtcatatttcaggaccagaggtggttggtagtgggtttcagtcatctgttgcagtcaggtgcatgttgccatcagccccatctgccccaattagacttccacacactgctgctttatctcagtttcacatgccaagggcctctcagtttgctgcagctcggatacctccgaactaccagggacctgccattccccctgcctcttttgatgcctataggcactacatggcatatgcagcctccagatggcccatgtatcccacctctcaaccgtcaaaccaccctgtacctgaaccacacaggataatgccaataaccaaacaagctactcgtagccgtcccaatcttcgtgtgatccccactgtgactcctgataagcctaagcagaaagagtctctgcgaggctcaattcctgcggcccaagtgcctgtccaggtgtccattccatcactcataagatataatccagagaagatctctgatgagaagaaccgtgcttcccagaagcaaaaggttattgaagagagggaaaaactaaagaatgaccgggaagcccgccagaagaagatgtactatcttaggaccgagttagagcggcttcataaacaacaaggagaaatgctgcgcaagaaacgaagggagaaggatggccacaaagatcctctcttggtggaggtgagtcggcttcaggataacattatgaaggacattgcagagctacggcaagaggcagaagaggcagaaaagaagcaatctgaactggacaaagtggctcagatcttgggaattaacattttcgataaatcccagaagtctttaagtgacagtagagagcctacagagaagcctgggaaagcagaaaaatctaagagcccagaaaaagtgtcatcgttctcaaactcctcctccaacaaggaatcaaaagtaaacaatgagaagttttgtattaagagccccaagcctgccgaaagcccccagtcagccactaagcagttggatcagcccactgctgcttatgagtattatgatgctggcaatcactggtgcaaagactgcaacaccatctgtgggaccatgtttgatttcttcactcatatgcacaataagaagcacacacagacactggatccctacaacagaccttgggcttcaaagacccagagtgaggccaagcaagatgccataaagcgcactgacaagataactgttcctgcaaaaggctctgagtttctggttcccatcagtggattttattgccagctctgtgaggaatttttgggggatccaatttctggggagcaacatgtgaagggtcaccaacacaatgagaaatacaagaaatatgtggatgaaaacccattatatgaggagcggcggaatctggaccgccaagctggcttggctgtggtcctagagacagaacggcgacggcagagtgagctaaagcgcaaacttagtgagaaaccaaaggaggagaagaaagaaaaaaaggcaaaggctgtgaaagaagtaaaggaggatgacaaggtctctgagaaattagaagaccaactctctgagggtaggaactcccctgaaaaagctgaaaataaaaggaacactggcatcaaactccagtttaaagaagaagtaaagaaggaatcaccaacatcatcttcttttgggaaattcagctggaagaagcccgaaaaagaagaggagaaaagttccttggtgaccccaagtatctctaaagaagagattctagaaagtagtaaggacaaagaggatggcaaaactgaagctgggaaggcaaagcctatcaaaatcaagctctctgggaaaactgttgttgcacataccagcccttggatgcctgttgtgacaacttccacacagactaagatcggacccaacctgcctattccatccacagtactccgcaagtcatgttcagccacaatgagcaagccagctcctcttaacacctttctgtctattaagtcctctggaaccactgctaaacctctgccagtggttaaagagtcttcagctgatctcctcttacctccagacatcatctccaaagcatttggaggggaagaggtgattctaaaagggtctccagaggaaaaagtggtgttggctgaaaagagtgagccatctcatttacctgaacaaatactaccacctcctccaccacccccacctccaccacctccaccaccccccgttatacctcatccagctgccccgtctgctgctcaagcaaatgctatcttggctccagtaaaatcaaacccagttgtatctcaaactctcagccctggcttcgtgggtcctaacattttgaacccagtgttgcctgtagccatcatggcctcagcacagccagctgccattccttctgatgagacagctcctggggtgagtgagagtgaccgagaccagaccctgttctctgtgttagtacgtcctccaccacccctctcaagtgtgttcagtgaacaagccaaaaaattagagaagcgaaattcatgcttagccacagccaatgctaaggacctgtatgacatattctatagtagtggtggaaagggggcccctgagactaagggggcccctgagactaagctaagtggtggtccattggccaatggggaaaatagcaacctctctagaaccaaaagttcagacacctcttctacttctcctttgaacagcagtgcatcccaagaggagttgcatcaagatgagggtttggtcgctgctcctatagttagcaactctgaaaagcccattgcaaaaactctggtggccctagggaaatggtcagttgtagaacatgtaggcccaaaaagcacaggcagcacctatggcttcctacagcctctgacaaggttgtgccaaagcaggccttatgaaacaattaccccaaagacagacactttggccatatggacctctagttccttccagagtgacactagtagggatatatctccagagaagagtgagcttgacctgggagagccaggaccacctggtgtagaaccacctcctcaactgttagatatacagtgcaaagaatctcagaagttggtagaaatccacctcagagaatctgttaaccaggataaggaaagccaagagctccgtaaatctgaggattgtagagaaagtgagatagagacaaacactgaactaaaagaaagggtaaaggagctgtctgaggggatagttgatgagggagcaagtaccagcattggaccccacagcatagatgattctaatttgaaccatggaaacagatacatgtgggagggagaagtaaaacagcccaacttgctaatgattgacaaagaggctgaacagtccaataaattgatgacaggaagtgaaactccaagtaaagtagtgatcaaattgagtccacaggcttgctctttcacaaaggcaaaattagactcatttttatcagaagctaggtctttactcaacccacaagatacacctgtgaaaatttctgccccagagttgctgcttcattccccagccagatcagctatgtgtttaacaggtagtccacaagagcaaggagtttcagttgttagtgaggaggggctagagaattcagctccagaatcagcttctagaacttctaggtacagaagtctcaaactcaagagagaaagatcaaaagactttcaagttaaaaagatctatgagttggctgtttgggatgaaaacaagaagaggccagagacctgggagagcccagagaaaccaaaaacagaagcactggagctacnagatgtccatccagagttaacagtgacaatagaaagcaaggccctagaagactttgaagctacagacttaaaggtagaggagcttactgccctggggaatctgggggatatgcctgttgatttctgcactactcgggtaagcccagcacatagatccccaactgtcttgtgtcagaaagtgtgtgaagaaaattctgtatcacctatagggtgtaattcctccgatcccgctgacttcgaaccaatcccatctttttctgggtttccgttagattctcccaaaaccttggtgcttgactttgagacagagggtgaacgaaactcacctaatcccaggagtgttaggatcccttctcctaacattttgaaaactggacttacagaaaatgttgaccgtggcttggggggcctagagggaacacaccaggcccttgacctgttagcaggaggaatgatgcctgaggaagtaaaagaatcttcccaattagacaaacaagagtcactcggattggaattaaaaacaattaattttgcaggccttgggccatctccttgccttccagaccttgttgactttgtcacacggacctctggagttcaaaaagataaactgtgttctccactctctgagccaggtgacccttctaaatgtagttccctggagttggggccattacagctagaaatatcgaatgcatccaccacagaggtggcaattctgcaagtagatgatgacagtggcgaccctctgaatttggttaaagctccagtgtcaaggtcccctccaagggagcaggtaattgaagacaatatggtccctcagggaatgcctgaacaggaaactacagttggtgccatccaggaccacacagaatccagtgttcacaactaagaataaatacctagagctacttgtgagtgaatcattggcttctagaaatcagatgcccagatgatccaagactagtttgttatctcatctggaacctacaccaagagatgcagtcagcatcttaaagtaaatgttcatggaagctaaaaaatttacctcctttccttttccctttccccttaaaacaccagacaaatcgataacaacttatatatatatatatatatatctgtaaaaatgtattttgttaatttttttggccaatttattttctcccactttgtcattaaaatcacatgtctaactggctcaccacatagtgtgctttgattgtattttggctttgactctgccatttctgaaatgtgggggaggatggaggcagctgacctctccagttgctgtgttgtattcctacccaatttcctgggcagttgatgcatctctgggaaaaacaccagaaagcttgctgaaatggaaaacttggaagaattgttcatctcttaggcttccatttggatgggcctgccttaacattgtttgaaatgcagcgtgagtagctcttttgtttactgtttacaccccttattggcatgtcaactcctgtacttcccttactctgttgcctttcttgagatgcattgtcctgctaacccacaaacctgtttggaaataaacatggaagaatatctggcaggcttacttttagaagacgacaaatcggtaaggcttattcatggttcattgccaggagcagatatgcttttgagatcacttttatttttgaaatggcctttgttcattgtattgtgatccaataacactttgtattaaattgtttagcagccatttgtgttgtgaaggggtagaagatctctgaaacttgtctttagattgaactcattccctgttccacaaacccatatgtatcctttcctcaacctcctcctttcccaattaatttcaaccatagtacgatgtttggggttgtatattttgttaaaaagattaaagaatttatgagttggcttggacaagtttaactttatttttaatgtgttaattacttggaataaatgcattaatttcagaaaaaaaaaaaaaaaaaaaaaaaaaaaaaaaaaa

SEQ ID NO: 23071 - DNA, 2480 bp, Homo Sapiens
atagttgaccagcttctgcaggggctcctcagtgagagaatggaggtgaggtcagggactcctgccttgcctctgccatcacttccagtgatgcctattcctaagattgatcgtgtcctgtgctgaagatgtttccggaacaacagaaagaggaatttgtaagtgtctgggttcgagatcctaggattcagaaggaggacttctggcattcttacattgactatgagatatgtattcatactaatagcatgtgttttacaatgaaaacatcctgtgtacgaagaagatatagagaattcgtgtggctgaggcagagactccaaagtaatgcgttgctggtacaactgccagaacttccatctaaaaacctgtttttcaacatgaacaatcgccagcacgtggatcagcgtcgccagggtctggaagatttcctcagaaaagtcctacagaatgcacttttgctttcagatagcagccttcacctcttcttacagagccatctgaattcagaagacattgaggcgtgtgtttctgggcagactaagtactctgtggaagaagcaattcacaagtttgccttaatgaatagacgtttccctgaagaagatgaagaaggaaaaaaagaaaatgatatagattatgattcagaaagttcatcctctgggcttggacacagtagtgatgacatcagttcacatggatgtaaagtaaatacagctccgcaggaatcctgaaaaataattctaatgttactatcttaggaatagcaaattatgtccagtcatagagaagaaagcttcataataatacattcttacctaaagctcactgtcatgatgttaggtatttaaattcttaaagatgttgggttgtttattagtggtatttttatgttgtcttattttaggtaagcttctgtgtaaagctaaaaatcctgtgaatacaatactatcctttacaggcagacattattggtaaacaagatcttgccctccaatgaaatgacttacatgttttaaaaaaccgagttggttttattgaatttaaaaagataggtaactaagtagcatttaaaatcaagatagagcattccttcttgtatcagtggggcagtgttaccataaacacggtgtatatgttgttaaaccctatgaagagtaacagtgtagaccagactgcctctctcagatatgtgcctgatattttgtggatacctcccctgcactggcaaaacactatgcttttgggtgttagactgaaatattttaagagtatttaacctttccagtattctgtttcacgcttagatggaaatgtatcttatgaatagagacatattaaaataatgtttacatcttagaaaaaacatagatagtgctagtaatattacttataactgtaatatatagattcagaaatacattttcattatccaaaatcagcttcaacaaatggtttctggagacaaataatttgttttcattatcattgtataatcaggttaatgatttattttttgactaaatgtgcaatttcttatcactagataactttcagtatcagtggtggttacttattacttaaatcagaggaaggattttataaagattaataaatttaattttaccaataaatattcccataatttagaaaaggatgtcgacttgctaatttcagaaataattattcatttttaaaaagccccttttaaagcatctacttgaagattggtataattttcataaaatgtctttttttttagtgtcccaaagatatcttagataaactattttgaagttcagatttcagatgaggcaacattttcttgagataattacccaagtttcatccatgttgaatggtacaaaatatttctgtgaaactaacaggaagatattttcagataactaggataacttgttgctttgttacccagcctaattgaagagtggcagaggctactacaaaaagcaaccttttcattttcactaagagtttaaaagctattgtattattaaaaagtctttacaatgcttgtttcaaagaaccaacagaaaaaaaagctaagaaaactgagaactaacattaaaaaaattaaatttagaataagaatgatttctttaatttgtcctttttttctttggtctaaaacattattaaatttttgtaaatattttgatttaatgtgtcttagatcctcattattttaatacaggaaaagaaaagatttagtaatttcttaccatgctaatatgtaaagttcatgccatccaggcatttaagagcgatcctcatcccttcagcaatatgtatttgagttcacactatttctgttttacagcagttttgaaaaacacatactatgccaccaattgtcatattatttttagatgatgtaacatagccatcaaaattaatattatgtaatgcctaatacttagtatgtaaatgtcacgagatcatttttacattaaacgtga

SEQ ID NO: 23072 - DNA, 3339 bp, Homo Sapiens
ctcagccatggcggaggcggctttggaagccgtgcggagcgagttacgagaattcccggccgctgcaagggagctctgcgtgcctcttgctgtgccctacctggacaaacccccaactccgctccacttctaccgggactgggtctgccccaacaggccgtgcattatccgcaacgctctgcagcactggccggccctccagaagtggtccctcccctatttcagagccacagtgggctccacagaggtgagtgtggccgtgaccccagatggttacgcggatgccgtgagaggggatcgcttcatgatgccagctgagcgccgcctgcccctgagcttcgtgctggatgtgctggagggccgggcccagcaccctggagtcctctatgtgcagaagcagtgctccaacctgcccagcgagctgccccagctgctgcctgatctggaatcccatgtgccctgggcctccgaagccctgggaaagatgcccgatgctgtgaacttctggctgggggaggcggctgcagtgacttctttgcacaaggaccactatgagaacctctactgcgtggtctcaggagagaagcatttcctgttccatccgcccagcgaccggcccttcatcccctatgagctgtacacgccggcaacctaccagctaactgaagagggcacctttaaggtggtggatgaagaggccatggagaaggcagaggtgtccaggacctgcctgctcacggttcgtgtcctgcaggcccatcgcctaccctctaaggacctagtgaccccctctgactgctacgtgactctctggctgcccacggcctgcagccacaggctccagacacgcacggtcaagaacagcagtagccctgtctggaaccagagctttcacttcaggatccacaggcagctcaagaatgtcatggaactgaaagtctttgaccaggacctggtgaccggagatgaccctgtgttgtcagtactgtttgatgcggggactctgcgggctggggagttccggcgcgagagcttctcactgagccctcagggtgaggggcgcctggaagttgaatttcgcctgcagagtctggctgaccgtggcgagtggttcgtcagcaatggcgttctggtggcccgggagctctcctgcttgcacgttcaactggaggagacaggagaccagaagtcctcagagcacagagttcagcttgtggttcctgggtcctgtgagggtccgcaggaggcctctgtgggcactggcaccttccgcttccactgcccagcctgctgggagcaggagctgagtattcgcctgcaggatgcccccgaggagcaactaaaggcgccactgagtgccctgccctctggtcaagtggtgaggcttgtcttccccacgtcccaggagcccctgatgagagtggagctgaaaaaagaagcaggactgagggagctggccgtgcgactgggcttcgggccctgtgcagaggagcaggccttcctgagcaggaggaagcaggtggtggccgcggccttgaggcaggccctgcagctggatggagacctgcaggaggatgagatcccagtggtagctattatggccactggtggtgggatccgggcaatgacttccctgtatgggcagctggctggcctgaaggagctgggcctcttggattgcgtctcctacatcaccggggcctcgggctccacctgggccttggccaacctttatgaggacccagagtggtctcagaaggacctggcagggcccactgagttgctgaagacccaggtgaccaagaacaagctgggtgtgctggcccccagccagctgcagcggtaccggcaggagctggccgagcgtgcccgcttgggctacccaagctgcttcaccaacctgtgggccctcatcaacgaggcgctgctgcatgatgagccccatgatcacaagctctcagatcaacgggaggccctgagtcatggccagaaccctctgcccatctactgtgccctcaacaccaaagggcagagcctgaccacttttgaatttggggagtggtgcgagttctctccctacgaggtcggcttccccaagtacggggccttcatcccctctgagctctttggctccgagttctttatggggcagctgatgaagaggcttcctgagtcccgcatctgcttcttagaaggtatctggagcaacctgtatgcagccaacctccaggacagcttatactgggcctcagagcccagccagttctgggaccgctgggtcaggaaccaggccaacctggacaaggagcaggtcccccttctgaagatagaagaaccaccctcaacagccggcaggatagctgagtttttcaccgatcttctgacgtggcgtccactggcccaggccacacataatttcctgcgtggcctccatttccacaaagactactttcagcatcctcacttctccacatggaaagctaccactctggatgggctccccaaccagctgacaccctcggagccccacctgtgcctgctggatgttggctacctcatcaataccagctgcctgcccctcctgcagcccactcgggacgtggacctcatcctgtcattggactacaacctccacggagccttccagcagttgcagctcctgggccggttctgccaggagcaggggatcccgttcccacccatctcgcccagccccgaagagcagctccagcctcgggagtgccacaccttctccgaccccacctgccccggagcccctgcggtgctgcactttcctctggtcagcgactccttccgggagtactcggcccctggggtccggcggacacccgaggaggcggcagctggggaggtgaacctgtcttcatcggactctccctaccactacacgaaggtgacctacagccaggaggacgtggacaagctgctgcacctgacacattacaatgtctgcaacaaccaggagcagctgctggaggctctgcgccaggcagtgcagcggaggcggcagcgcaggccccactgatggccggggcccctgccacccctaactctcattcattccctggctgctgagttgcaggtgggaactgtcatcacgcagtgcttcagagcctcgggctcaggtggcactgtcccagggtccaggctgagggctgggagctcccttgcgcctcagcagtttgcagtggggtaaggaggccaagcccatttgtgtaatcacccaaaaccccccggcctgtgcctgttttcccttctgcgctaccttgagtagttggagcacttgatacatcacagactcatacaaatgtggtcgac

SEQ ID NO: 23073 - DNA, 2327 bp, Homo Sapiens
cgggggtgacagcagcccggagccgcggagcctcagcttccgcctggacccagcctcgtgggagccccgcgggtcctgcccagatgtggaagactgaggcctgttgaaagtgcagagctcagccctggcaccctctgttcccaagagctccatgcaggtgccacaggatggagaagaccttgctggccaaccctggtaccacggcctcctgtcccgccagaaggctgaagctcttcttcagcaagatggcgacttcctggttcgcgcctctgggtcccgtgggggcaaccccgtgatctcctgccgctggcggggctcagccctccattttgaggtgttccgtgtggccctgcgtccccggccaggccgacccacagccctctttcaactggaggatgagcaattccccagcataccggctctggttcacagttatatgacaggcaggcgcccactgtcccaggccacaggggctgtggtctccaggcctgtgacttggcaggggcctctgcgacgcagctttagcgaggacaccctgatggatggcccagctcggatagagcctctcagggcaaggaagtggagcaacagtcagcctgcagatttggcacatatggggcggtcaagagaagaccccgctgggatggaagcctccaccatgcccatatctgccttgccccgaacgagcagtgacccggtgttgctgaaggcccctgctcccctgggaactgttgccgacagtctcagggcctccgatgggcagcttcaagccaaggcaccaacgaagcccccccggacaccctccttcgaactgcctgatgcctctgaacgtcccccgacgtactgcgagctggtgccccgagtgcccagtgtccagggaacatccccgagccaaagctgcccagagccagaggccccatggtgggaggccgaggaggatgaggaggaagagaatagatgttttacaagaccacaggctgagatctctttctgcccccatgatgccccctcctgcctgctgggcccccagaatcggcccctggaaccccaagtcctgcataccctccgtggcctgttcctggagcaccatcctgggagcaccgcccttcacctgctattggtagactgccaggccacaggcctcctgggagtgaccagagatcagcggggcaacatgggagtctcatctggcctggagctgctcactcttccccatggacaccacttgaggttggaactgctggagaggcatcagacactggcgctggccggggcgctggcggtgctgggctgctcggggccgctggaggagcgcgcagccgcactgaggggactggtagagctggcgctggcgctgcggccaggggcggcgggggacctgcccgggctggctgcagtcatgggcgccctgctcatgccccaggtgtcccggttggagcacacgtggcgccagctccgaaggagccacacggaggctgcgctggcctttgagcaggagctgaagccgctgatgcgggctctggatgagggcgctggaccctgcgaccccggcgaggtggcgctgccgcacgtggcacccatggttcgcctactggagggcgaggaagtcgcggggccgctggacgagagctgtgagcggctgttgcgcaccctgcacggggcgcgtcacatggtccgggacgcacccaaattccgcaaggtggcagcccagcgcctgcgaggattccggcctaacccggagctgagggaggccctgaccaccggcttcgtgcggaggctgctctggggtagccggggcgcgggagctccgcgcgctgaacgctttgagaagttccagcgcgtcctcggcgtcctgtcgcagcgcctggagcctgaccgctgagagcgcagacacccttcttcacacccgggacccccaggtttttgcgaaccccagaagagaccaaaggagtcgtcccaggctcctcgcgcctcaggtggaatcctgccctgtgcctcacagaagaggtggggaccgcagtcagggtcacctggaccatggtgaacatgtgacctgcagatctggcatcagaggccagagttcaaatgtgactccacctcttaaaagccgtgatttctagcagttgacttcacctctgtgtcggcctttaacaaaatcatagccatacagcagctcaggcctgtaatctcagcactttgggaggccgaggcggaaggaaggcttgaggccaggagttcaagaccagccagggcaacatggtgagacctcatctctacaaaaactgaaaaataaaaaacttttaaaaaatgtaaaaaaaaaaaaaaaa

SEQ ID NO: 23074 - DNA, 1122 bp, Homo Sapiens
atggctcaagaatctcccaaaaattcagcagcagaaattccagtgactagtaatggagaagttgatgactctcgtgaacatagctttaatagggatttgaagcattcattaccatctggacttggtctctcagaaacccaaattacatctcatggctttgacaataccaaagagggtgttattgaagcaggagcatttcaaggttccccagcaccgccactgccatctgttatgtctcctagcagggttgcagctagtcgactggctcagcaaggaagtgatttaattgttcctgcaggtggccagagaacacagacaaaaagtggaccagttattctagcagatgaaattaaaaatcctgcaatggaaaagttagaacttgttagaaaatggagtctaaacacctataagtgtactcgacagattatctctgagaagctaggccgtggctcaagaactgtggaccttgaacttgaagctcagattgatatattaagggataacaagaaaaaatatgaaaatattttaaaactggctcaaacattgtcgacccagcttttccagatggtacatacccaaaggcaacttggagatgcatttgctgacctgagtttgaagtcactagaacttcatgaagaatttggctataatgccgatacccagaaactgctggctaaaaatggagagactcttcttggggccattaattttttcattgcyagtgtgaacactttggtgaataaaaccattgaagatacattaatgactgtgaaacagtatgaaagtgccaggattgaatatgatgcatatcgcactgatttggaagaactgaatcttggaccacgtgacgcaaacactctgccaaagattgagcagtcacagcatctcttccaagcacataaggaaaaatatgataaaatgcgcaatgatgtttctgtcaaattgaaatttctagaagaaaataaggttaaagtattgcacaatcagctggtccttttccacaatgccattgccgcttactttgctgggaatcagaagcagcttgaacagacacttaaacagttccatatcaaattgaaaacccctggagtggatgccccatcttggcttgaagaacagtaa

SEQ ID NO: 23075 - DNA, 4935 bp, Homo Sapiens
cttttctctcgaagggcacccgaagattgtcacgagtccttagactccaactactgcggcagcttccaaatttcctaaaaccctaagctgggccagcccggcagcccacgcacttccggcctcggacccgccccaaacacccaagcgccccagcgcctcatctctaggtccggaaataaacgaacatctccgattatggttataccagggtcgagggtttccgaatatattcgattcaaagcttcggcaagacgaagaaaaccgagcctgaaagcagggcgagaaaaggggcgctgcagggcggatggaaagaattgattggtaacgatgtggagacggaaacatccgaggacatccggaggaacccggggagttctgagtggtaatcgaggggtagagtatggcagtgggcggggtcatctcggtacgttcgaagggcgttggcggaaattaccgaagatgcccgaagccgtcgggacggacccgagtacctcacgcaagatggcggagctggaggaggtgactctggacgggaagcctcttcaggcgctgcgggtgaccgacctgaaggccgcactggagcagcgaggcctagccaagagcgggcagaagagtgccctggtcaagcggctcaaaggggctctaatgctagaaaatttacagaaacactcaacaccccatgctgcattccagccaaattcccagattggtgaggaaatgagccagaacagtttcataaaacagtatctggaaaagcagcaggagctacttaggcagcgtctggaacgtgaagctcgagaagctgcagaacttgaagaagcttcagctgagtcggaggacgagatgatccatcctgagggagtggcttccctgctgcctcctgactttcagagcagcctggagagaccagagctggagctcagcagacattcgcccagaaaaagctcctcaatttctgaagagaaaggtgactctgatgatgagaaaccaaggaaaggagaaagacgatcatctagggtcagacaggcaagagcagctaaactgtctgagggcagccaacctgctgaggaggaagaggatcaagaaacaccttccagaaacctaagggtcagagcagatcgaaatttgaaaacagaggaggaagaagaggaggaggaggaggaggaagaagatgatgaagaagaggaaggtgatgatgagggacaaaaatctagggaggcaccaatcctgaaagagtttaaggaagaaggggaagagatacctagagtaaaaccagaggagatgatggatgagagacccaaaacaagatcccaggaacaggaggtgttagagagaggagggagatttacaagatcccaggaagaggctagaaaaagtcatctggccagacagcagcaggagaaggaaatgaaaacaacatctccccttgaggaggaagaaagagaaataaaatcttcacaaggcttaaaggaaaaatcgaagtctccttcccctcctcgactgactgaagatcgaaagaaggcctcacttgtagcgctgccagagcaaactgccagcgaggaggagactcctccacctttactaacaaaggaagcatcttctccaccacctcatccacagctccatagcgaagaagaaatagagcccatggaaggcccagccccccctgtcctcattcagttatctcctcctaatacagatgctgacaccagggagctattagtatctcagcatactgtccagttggtaggaggcctgtctcctttgtcaagtccttcagacaccaaagcagaatctccagcagagaaagtgccagaggagagtgtcctgcctctggttcagaaaagcacactggctgactactcagcccagaaggatcttgaacctgagtcagacagatctgctcagcccctccctctaaaaattgaggaattagcactggccaaaggaatcactgaagaatgtctgaaacagccatctttggaacagaaggaaggcagaagagcttctcatacccttctcccaagccacagattgaaacagtcagctgattcatcctctagccggtcctcctcatcttcctcctccagttctagatcaagatctcgctctcctgacagttcaggttctcggtctcattcaccgctcagatccaagcagagagatgtagcccaggcacgtactcatgccaaccctcgtggtagacccaagatgggctccagatcaacatcagagtccagatcaaggtcacgttcacgttctcgttcagcatcaagcaacagcagaaaatctctgagccctggagtctccagggacagcagcaccagctatactgaaaccaaagatccctcttctggtcaggaggttgcaactccaccagtgccacaactgcaggtctgtgagccaaaggagaggacttccacctcctcatcctctgtccaagcaaggcgtctgagtcagcctgaatcagctgaaaagcatgtgacccagaggttacagcctgagcgggggagcccaaagaagtgtgaagctgaagaggcagagccaccagctgccacacagccccaaacctcagagactcagacctctcatctgccagaatcagaaagaattcatcacactgttgaggagaaggaggaagtgaccatggacacaagtgaaaacagacctgaaaatgatgttccagaacctcccatgcctattgcagaccaagtcagcaatgatgaccgcccggagggcagtgttgaagatgaggagaagaaagagagctcgctgcccaaatcattcaagaggaagatctccgttgtctcagctaccaagggggtgccagctggaaacagtgacacagaggggggccagcctggtcggaaacgacgctggggagccagcacagccaccacacagaagaaaccttccatcagtatcaccactgaatcactaaagagcctcatccccgacatcaaacccctggcggggcaggaggctgttgtggatcttcatgctgatgactctcgcatctctgaggatgagacagagcgtaatggcgatgatgggacccatgacaaggggctgaaaatatgccggacagtcactcaggtagtacctgcagagggccaggagaatgggcagagggaagaagaggaagaagagaaggaacctgaagcagaacctcctgtacctccccaggtgtcagtagaggtggccttgcccccacctgcagagcatgaagtaaagaaagtgactttaggagataccttaactcgacgttccattagccagcagaagtccggagtttccattaccattgatgacccagtccgaactgcccaggtgccctccccaccccggggcaagattagcaacattgtccatatctccaatttggtccgtcctttcactttaggccagctaaaggagttgttggggcgcacaggaaccttggtggaagaggccttctggattgacaagatcaaatctcattgctttgtaacgtactcaacagtagaggaagctgttgccacccgcacagctctgcacggggtcaaatggccccagtccaatcccaaattcctttgtgctgactatgccgagcaagatgagctggattatcaccgaggcctcttggtggaccgtccctctgaaactaagacagaggagcagggaataccacggcccctgcaccccccacccccacccccggtccagccaccacagcacccccgggcagagcagcgggagcaggaacgggcagtgcgggaacagtgggcagaacgggaacgggaaatggagcggcgggagcggactcgatcagagcgtgaatgggatcgggacaaagttcgagaagggccccgttcccgatcaaggtcccgtgaccgccgccgcaaggaacgtgcgaagtctaaagaaaagaagagtgagaagaaagagaaagcccaggaggaaccacctgccaagctgctggatgaccttttccgaaagaccaaggcagctccctgcatctattggctcccactgactgacagccagatcgttcagaaagaggcagagcgggccgaacgggccaaggagcgggagaagcggcgaaaggagcaagaagaagaagagcaaaaggagcgggagaaggaagccgagcgggaacggaaccgacagctggagcgagagaaacgtcgggagcacagtcgggagagggacagggagagagagagagaaagggagcgggacaggggggaccgagatcgggatagggaaagggaccgagaacgaggcagggaaagggatcgcagggacaccaagcgccacagcagaagccggagtcggagcacacctgtgcgggaccggggtgggcgccgctagctgggaaaacactagagctgcaggtaccagccactcggccccagggggttatggccacagagggataggcacagtctccaccaccctggagccaagggtctttcacatcacctatccctacatacataccaaatggaaaagtggccatccttttccccccaaacacacccccttaacctatctcttgggacttagcccgaccctccctctcatttcccattaagtctgagaggcaagagctaggttaggcaaggaggtggttggccagagatggggaacagccaggtgccccagtcctctgatttttcctccatcctgcttaccacctccctgggtacttacagccttctcttgggaacagccggggccaggactgggtcacctatgagctgaatcagcatctcctcctgagtcccagggcccctgcagttcccagtctcttctgtcctgcagcccttgcctctttcccacaggttccactttatatccaccttttccttttgttcaatttttatttttattttttttattattaaatgatgtggtctatggaaaaaaaaataaaaatctgacttagttttt

SEQ ID NO: 23076 - DNA, 2497 bp, Homo Sapiens
ggcaagatggctcccctgcatgtctccggctgatcgctgccgctccgccaatacaatagagccagccactaccagcagcctggccctcttcctccttctccagagagaccaatccagccgaactcggggtttgcctgaggagaaggaggaagtgaccatggacacaagtgaaaacagacctgaaaatgatgttccagaacctcccatgcctattgcagaccaagtcagcaatgatgaccgcccggagggcagtgttgaagatgaggagaagaaagagagctcgctgcccaaatcattcaagaggaagatctccgttgtctcagctaccaagggggtgccagctggaaacagtgacacagaggggggccagcctggtcggaaacgacgctggggagccagcacagccaccacacagaagaaaccttccatcagtatcaccactgaatcactaaagagcctcatccccgacatcaaacccctggcggggcaggaggctgttgtggatcttcatgctgatgactctcgcatctctgaggatgagacagagcgtaatggcgatgatgggacccatgacaaggggctgaaaatatgccggacagtcactcaggtagtacctgcagagggccaggagaatgggcagagggaagaagaggaagaagagaaggaacctgaagcagaacctcctgtacctccccaggtgtcagtagaggtggccttgcccccacctgcagagcatgaagtaaagaaagtgactttaggagataccttaactcgacgttccattagccagcagaagtccggagtttccattaccattgatgacccagtccgaactgcccaggtgccctccccaccccggggcaagattagcaacattgtccatatctccaatttggtccgtcctttcactttaggccagctaaaggagttgttggggcgcacaggaaccttggtggaagaggccttctggattgacaagatcaaatctcattgctttgtaacgtactcaacagtagaggaagctgttgccacccgcacagctctgcacggggtcaaatggccccagtccaatcccaaattcctttgtgctgactatgccgagcaagatgagctggattatcaccgaggcctcttggtggaccgtccctctgaaactaagacagaggagcagggaataccacggcccctgcaccccccacccccacccccggtccagccaccacagcacccccgggcagagcagcgggagcaggaacgggcagtgcgggaacagtgggcagaacgggaacgggaaatggagcggcgggagcggactcgatcagagcgtgaatgggatcgggacaaagttcgagaagggccccgttcccgatcaaggtcccgtgaccgccgccgcaaggaacgtgcgaagtctaaagaaaagaagagtgagaagaaagagaaagcccaggaggaaccacctgccaagctgctggatgaccttttccgaaagaccaaggcagctccctgcatctattggctcccactgactgacagccagatcgttcagaaagaggcagagcgggccgaacgggccaaggagcgggagaagcggcgaaaggagcaagaagaagaagagcaaaaggagcgggagaaggaagccgagcgggaacggaaccgacagctggagcgagagaaacgtcgggagcacagtcgggagagggacagggagagagagagagaaagggagcgggacaggggggaccgagatcgggatagggaaagggaccgagaacgaggcagggaaagggatcgcagggacaccaagcgccacagcagaagccggagtcggagcacacctgtgcgggaccggggtgggcgccgctagctgggaaaacactagagctgcaggtaccagccactcggccccagggggttatggccacagagggataggcacagtctccaccaccctggagccaagggtctttcacatcacctatccctacatacataccaaatggaaaagtggccatccttttccccccaaacacacccccttaacctatctcttgggacttagcccgaccctccctctcatttcccattaagtctgagaggcaagagctaggttaggcaaggaggtggttggccagagatggggaacagccaggtgccccagtcctctgatttttcctccatcctgcttaccacctccctgggtacttacagccttctcttgggaacagccggggccaggactgggtcacctatgagctgaatcagcatctcctcctgagtcccagggcccctgcagttcccagtctcttctgtcctgcagcccttgcctctttcccacaggttccactttatatccaccttttccttttgttcaatttttatttttattttttttattattaaatgatgtggtctatggaaaaaaaaataaaaatctgacttagttttaaaaaaaaaaaaaaaaaaaaaaaaaaaaaaaaaaaaaaaaaaaaaaaaaaaa

SEQ ID NO: 23077 - DNA, 1471 bp, Homo Sapiens
gagagagagagagagagagagagagagagagagagagagagagagagagagagagagagagagagagagagagagagcagcgggccgcctcaggcagccccggccgggccgcccgggtccccggcagcggggtaggatggcgctaaagcggatccagaaggaattaaccgacttgcagagggatcctcctgcccagtgttctgcaggacctgtcggtgatgacttgttccactggcaggccaccatcatgggcccgaatgacagtccttaccaaggaggtgttttcttcctgaccatccactttcctacagattacccgttcaagcccccaaaggttgctttcacaaccaaaatttatcaccctaatatcaacagcaatggcagcatctgccttgatatcctgcggtctcagtggtctccagcgttgactgtgtcaaaagttctcttgtccatctgctcgctgctctgcgaccccaaccccgatgaccccctggtgccagagatagcacacacctacaaggccgacagagagaagtacaacagactagcaagagagtggacacaaaaatatgctatgtaagtgccttggaggttttacatgagacactgtccaagagaagctggcagagaggtcttcccttaaaactttgggctgttggctgagccattcaaagagcatcatctgttcttcaaacaaatgttggtcacccactctctccagctgcagcatgttggtgccattttcagcaattacggctttgacagtgccacctctttgatgccaaatcagcaaccattgttgttatgatctgcagtcttcctggtgacactggaatctctctctctgccgcctcagtttgtctgctggtctcttggggggccaggccctgcacgtctctcctacccggcctcaaatggtgctgctgcccatgatggtaccacaccagggcctcagcctggcccctcaccacataccctttgccttttagaactcagtgccatcctgggtgcccagggcagagcaggctttgttcgcacctcatctgctgcagaaccacatcctgaggagtctcagcttatcctggagggaattgggaacagtgtcactgggaagtgaaggcctagccctgtggcttccaccagtctcctcctgcagtgccacgtggtggcatttctcgcctcacaccaagaagcagcaagtggaaaatttcaggatacaaagcacataacaccccataagagatgattatgtttttagaagcaagagcaaaattatgaaacctctagagatttgggtcatgttactccatttgatgaagattctcactaccgcccgctcctcccataggagcctacactaagtccaagtgtgagccattcacagactagaacacaaggagggagagagactcttaaacgtaaataaaaatgcaattcactcacaactctaaaaaaaaaaaaaaaaaaaaaa

SEQ ID NO: 23078 - DNA, 2591 bp, Homo Sapiens
  misc_feature (2074)..(2074): n is a, c, g, or t
  misc_feature (2077)..(2077): n is a, c, g, or t
  misc_feature (2585)..(2587): n is a, c, g, or t
cccgcgcccctgctcccgggccatggcgctgagggagctcaaagtgtgtctgctcggggatacaggtgtaggtaaatcgagtattgtgtggcggtttgtggaagacagttttgatccaaacatcaacccaacaataggggcatcttttatgaccaagactgtccagtaccaaaatgagctacataaattcctaatctgggatacagctggacaagaacgatttcgtgccttagcaccaatgtactatcgagggtcggctgcagctataatcgtttatgatatcacaaaagaagagacattttcaacattaaagaattgggtgaaagagcttcgacagcatggcccacctaatattgtagttgccattgcaggaaataaatgtgatcttatcgatgtaagagaagtcatggagagagatgcaaaggactacgccgactctattcatgcaatttttgtagagaccagcgcaaaaaacgcgataaacataaatgaactctttatagaaattagtcgaagaattccctccactgacgccaacctgccatctggcggtaagggcttcaaactccgaagacagccttcagagccaaagcggactgcatgctgaccgaacctcagcctctcagacttgatgatgaagtaggtggtcctgaaagttaacaggagggctggggtccctgccaccagttttcacctagccagtcttgagtcttctccgtggcaaaaaggattcacagaaatggaccagttctgttctccaaagactgcagcaatggatatttcagtctgtgaacttctattatgtaaagaatctctagtgtacaaagggactacatcgttggcttttgaccttgctgaaaaggaacatataattgtatggatggtaggattaggttgtgagtagttttgtaatcagattttatgtacatttgtaaggggaaatagcactttgtggtcttagggaaacaaagtggcatatccctttattatgatttccagatgggatctggtgggaggcgggtgggtagaagggaaggcagagaaacctttaaagattgtaagctaagtgctctatacctttatacaataccaatgtgcttgagtctcccgttaagaggctgaaaactgggcaggcatacgcaagactgggtgcgagattcaatggaatgtcaaatgaaacttagaatttattaatgtatttacataatttataatctttaagcaatggccccataaatatagactacaactttacatatgctaagcaatagatacttgcttttccccaccaaaatacttgggttaaaaaaaaattgacagcatttataccaccttcttcacttccactcttcttcctttttaaaccattgctagtcattttagaacatatgaaattcagtttattccgggcagcttctctaccatcaccatcttgatcatgagagcttatttaaaaaggtgccaataacgtgtttggtggcacacacatgacaaggtcagaagcaaacccaggatgagctaggcatctgctgctatcattgttaatttactgtacgtatcctaggctaacatgttcaatgaaaagtgctttagagatggcagagatgaaatcatttccatcagtcctataaataacccattttagcttcagacaataattgtcctccctacacttaaactatcctactatatgttaaatgatacaactccctctaacagtggtaacagaaaccaaggaaattataatctccacaaggtctgtttcttttcccttaagaaccacaaaagtgctaattttccctttacaaatgttacataaaatcttgattacaaaactactcaacaacttaatcctaccatccatacaattatatgttccttttcagcaaggtcaaaagccaacgatgtagtcccctttgtacactagagattctttacataatagaagttcacagactgaaatatcattgctgcagtctttggagaacagaactggtccatttctgtgaatcctttttgcacggagaagactcaagactggctaggtgaaaactggtggcagggaccccagccntcntgttaactttcaggaccacctacttcatcatcaagtctgagaggctgaggttcggtcagcagccctcgttccgaatggcgcctgcctgtgctggcccatggaacggagacagcattgggctgactgtgggcatgaggagggataaggctgatttggaccccaggcttctgccctggacagcacttgtgtctgcagattatttaagtggcttttgatctgtaaataaaatcagtgcactgtgaatcacaaaaaaaaaaacccagcccctttccctgctgtgtggattaggtgtcaagacacctagttcttccctggggccacccggctggcctcactgcttatattaaggctcctcccaactctcattttcctttggaaaacaagacttttttccccatggttaccgctgagatactggggctgtagtagtataaaagctcacagttccttctgagtgctgaaaagagtgcatgagttgcttcgaaataaaagggtcaagcattcccannnctga

SEQ ID NO: 23079 - DNA, 669 bp, Homo Sapiens
atggcagcaaggcccaagctccactatcccaacggaagaggccggatggagtccgtgagatgggttttagctgccgccggagtcgagtttgatgaagaatttctggaaacaaaagaacagttgtacaagttgcaggatggtaaccacctgctgttccaacaagtgcccatggttgaaattgacgggatgaagttggtacagacccgaagcattctccactacatagcagacaagcacaatctctttggcaagaacctcaaggagagaaccctgattgacatgtacgtggaggggacactggatctgctggaactgcttatcatgcatcctttcttaaaaccagatgatcagcaaaaggaagtggttaacatggcccagaaggctataattagatactttcctgtgtttgaaaagattttaaggggtcacggacaaagctttcttgttggtaatcagctgagccttgcagatgtgattttactccaaaccattttagctctagaagagaaaattcctaatatcctgtctgcatttcctttcctccaggaatacacagtgaaactaagtaatatccctacaattaagagattccttgaacctggcagcaagaagaagcctccccctgatgaaatttatgtgagaaccgtctacaacatctttaggccataa

SEQ ID NO: 23080 - DNA, 726 bp, Homo Sapiens
atggcacagcacggggcgatgggcgcgtttcgggccctgtgcggcctggcgctgctgtgcgcgctcagcctgggtcagcgccccaccgggggtcccgggtgcggccctgggcgcctcctgcttgggacgggaacggacgcgcgctgctgccgggttcacacgacgcgctgctgccgcgattacccgggcgaggagtgctgttccgagtgggactgcatgtgtgtccagcctgaattccactgcggagacccttgctgcacgacctgccggcaccacccttgtcccccaggccagggggtacagtcccaggggaaattcagttttggcttccagtgtatcgactgtgcctcggggaccttctccgggggccacgaaggccactgcaaaccttggacagactgcacccagttcgggtttctcactgtgttccctgggaacaagacccacaacgctgtgtgcgtcccagggtccccgccggcagagccgcttgggtggctgaccgtcgtcctcctggccgtggccgcctgcgtcctcctcctgacctcggcccagcttggactgcacatctggcagctgaggagtcagtgcatgtggccccgagagacccagctgctgctggaggtgccgccgtcgaccgaagacgccagaagctgccagttccccgaggaagagcggggcgagcgatcggcagaggagaaggggcggctgggagacctgtgggtgtga

SEQ ID NO: 23081 - DNA, 8686 bp, Homo Sapiens
gagtctttgaggacacagcctcgctggaggcagtttctggtgccagtgacggggtggcccgtgagctgatgacgaggactggcttttaatccttggtggtgattaagagaaagcttattggggcctgggagcagctccccgccgacccccaccaccatgtcgggctccacacagcctgtggcacagacgtggagggccactgagccccgctacccgccccacagcctttcctacccagtgcagatcgcccggacgcacacggacgtcgggctcctggagtaccagcaccactcccgcgactatgcctcccacctgtcgcccggctccatcatccagccccagcggcggaggccctccctgctgtctgagttccagcccgggaatgaacggtcccaggagctccacctgcggccagagtcccactcatacctgcccgagctggggaagtcagagatggagttcattgaaagcaagcgccctcggctagagctgctgcctgaccccctgctgcgaccgtcacccctgctggccacgggccagcctgcgggatctgaagacctcaccaaggaccgtagcctgacgggcaagctggaaccggtgtctccccccagccccccgcacactgaccctgagctggagctggtgccgccacggctgtccaaggaggagctgatccagaacatggaccgcgtggaccgagagatcaccatggtagagcagcagatctctaagctgaagaagaagcagcaacagctggaggaggaggctgccaagccgcccgagcctgagaagcccgtgtcaccgccgcccatcgagtcgaagcaccgcagcctggtgcagatcatctacgacgagaaccggaagaaggctgaagctgcacatcggattctggaaggcctggggccccaggtggagctgccgctgtacaaccagccctccgacacccggcagtatcatgagaacatcaaaataaaccaggcgatgcggaagaagctaatcttgtacttcaagaggaggaatcacgctcggaaacaatgggagcagaagttctgccagcgctatgaccagctcatggaggcctgggagaagaaggtggagcgcatcgagaacaacccccggcggcgggccaaggagagcaaggttcgcgagtactacgagaagcagttccctgagatccgcaagcagcgcgagctgcaggagcgcatgcagagggtgggccagcggggcagtgggctgtccatgtcgcccgcccgcagcgagcacgaggtgtcagagatcatcgatggcctctcagagcaggagaacctggagaagcagatgcgccagctggccgtgatcccgcccatgctgtacgacgctgaccagcagcgcatcaagttcatcaacatgaacgggcttatggccgaccccatgaaggtgtacaaagaccgccaggtcatgaacatgtggagtgagcaggagaaggagaccttccgggagaagttcatgcagcatcccaagaactttggcctgatcgcatcattcctggagaggaagacagtggctgagtgcgtcctctattactacctgactaagaagaatgagaactataagagcctggtgagacggagctatcggcgccgcggcaagagccagcagcaacaacagcagcagcagcagcagcagcagcagcagcagcagcagcccatgccccgcagcagccaggaggagaaagatgagaaggagaaggaaaaggaggcggagaaggaggaggagaagccggaggtggagaacgacaaggaagacctcctcaaggagaagacagacgacacctcaggggaggacaacgacgagaaggaggctgtggcctccaaaggccgcaaaactgccaacagccagggaagacgcaaaggccgcatcacccgctcaatggctaatgaggccaacagcgaggaggccatcaccccccagcagagcgccgagctggcctccatggagctgaatgagagttctcgctggacagaagaagaaatggaaacagccaagaaaggtctcctggaacacggccgcaactggtcggccatcgcccggatggtgggctccaagactgtgtcgcagtgtaagaacttctacttcaactacaagaagaggcagaacctcgatgagatcttgcagcagcacaagctgaagatggagaaggagaggaacgcgcggaggaagaagaagaaagcgccggcggcggccagcgaggaggctgcattcccgcccgtggtggaggatgaggagatggaggcgtcgggcgtgacgggaaatgaggaggagatggtggaggaggctgaagccactgtcaacaacagctcagacaccgagagcatcccctctcctcacactgaggccgccaaggacacagggcagaatgggcccaagcccccagccaccctgggcgccgacgggccacccccagggccacccaccccaccaccggaggacatcccggcccccactgagtccaccccggcctctgaagccaccttagcccctacgcccccaccagcacccccatttccctcttcacctcctcctgtggtccccaaggaggagaaggaggaggagaccgcagcagcgcccccagtggaggagggggaggagcagaagccccccgcggctgaggagctggcagtggacacagggaaggccgaggagcccgtcaagagcgagtgcacggaggaagccgaggaggggccggccaagggcaaggacgcggaggccgctgaggccacggccgagagggcgctcaaggcagagaagaaggagggcgggagcggcagggccaccacagccaagagctcgggcgccccccaggacagcgactccagtgccacctgcagtgcagacgaggtggatgaggccgagggcggcgacaagaaccggctgctgtccccaaggcccagcctcctcaccccgactggcgacccccgggccaatgcctcaccccagaagccactggacctgaagcagctgaagcagcgagcggctgccatcccccccatccaggtcaccaaagtccatgagcccccccgggaggacgcagctcccaccaagccagctcccccagccccaccgccaccgcaaaacctgcagccggagagcgacgcccctcagcagcctggcagcagcccccggggcaagagcaggagcccggcaccccccgccgacaaggaggcagagaagcctgtgttcttcccagccttcgcagccgaggcccagaagctgcctggggaccccccttgctggacttccggcctgcccttccccgtgcccccccgtgaggtgatcaaggcctccccgcatgccccggacccctcagccttctcctacgctccacctggtcacccactgcccctgggcctccatgacactgcccggcccgtcctgccgcgcccacccaccatctccaacccgcctcccctcatctcctctgccaagcaccccagcgtcctcgagaggcaaataggtgccatctcccaaggaatgtcggtccagctccacgtcccgtactcagagcatgccaaggccccggtgggccctgtcaccatggggctgcccctgcccatggaccccaaaaagctggcacccttcagcggagtgaagcaggagcagctgtccccacggggccaggctgggccaccggagagcctgggggtgcccacagcccaggaggcgtccgtgctgagagggacagctctgggctcagttccgggcggaagcatcaccaaaggcattcccagcacacgggtgccctcggacagcgccatcacataccgcggctccatcacccacggcacgccagctgacgtcctgtacaagggcaccatcaccaggatcatcggcgaggacagcccgagtcgcttggaccgcggccgggaggacagcctgcccaagggccacgtcatctacgaaggcaagaagggccacgtcttgtcctatgagggtggcatgtctgtgacccagtgctccaaggaggacggcagaagcagctcaggacccccccatgagacggccgcccccaagcgcacctatgacatgatggagggccgcgtgggcagagccatctcctcagccagcatcgaaggtctcatgggccgtgccatcccgccggagcgacacagcccccaccacctcaaagagcagcaccacatccgcgggtccatcacacaagggatccctcggtcctacgtggaggcacaggaggactacctgcgtcgggaggccaagctcctaaagcgggagggcacgcctccgcccccaccgccctcacgggacctgaccgaggcctacaagacgcaggccctgggccccctgaagctgaagccggcccatgagggcctggtggccacggtgaaggaggcgggccgctccatccatgagatcccgcgcgaggagctgcggcacacgcccgagctgcccctggccccgcggccgctcaaggagggctccatcacgcagggcaccccgctcaagtacgacaccggcgcgtccaccactggctccaaaaagcacgacgtacgctccctcatcggcagccccggccggacgttcccacccgtgcacccgctggatgtgatggccgacgcccgggcactggaacgtgcctgctacgaggagagcctgaagagccggccagggaccgccagcagctcggggggctccattgcgcgcggcgccccggtcattgtgcctgagctgggtaagccgcggcagagccccctgacctatgaggaccacggggcaccctttgccggccacctcccacgaggttcgcccgtgaccatgcgggagcccacgccgcgcctgcaggagggcagcctttcgtccagcaaggcatcccaggaccgaaagctgacgtcgacgcctcgtgagatcgccaagtccccgcacagcaccgtgcccgagcaccacccacaccccatctcgccctatgagcacctgcttcggggcgtgagtggcgtggacctgtatcgcagccacatccccctggccttcgaccccacctccataccccgcggcatccctctggacgcagccgctgcctactacctgccccgacacctggcccccaaccccacctacccgcacctgtacccaccctacctcatccgcggctaccccgacacggcggcgctggagaaccggcagaccatcatcaatgactacatcacctcgcagcagatgcaccacaacacggccaccgccatggcccagcgagctgatatgctgaggggcctctcgccccgcgagtcctcgctggcactcaactacgctgcgggtccccgaggcatcatcgacctgtcccaagtgccacacctgcctgtgctcgtgcccccgacaccaggcaccccagccaccgccatggaccgccttgcctacctccccaccgcgccccagcccttcagcagccgccacagcagctccccactctccccaggaggtccaacacacttgacaaaaccaaccaccacgtcctcgtccgagcgggagcgagaccgggatcgagagcgggaccgggatcgggagcgggaaaagtccatcctcacgtccaccacgacggtggagcacgcacccatctggagacctggtacagagcagagcagcggcagcagcggcagcagcggcgggggtgggggcagcagcagccgccccgcctcccactcccatgcccaccagcactcgcccatctcccctcggacccaggatgccctccagcagagacccagtgtgcttcacaacacaggcatgaagggtatcatcaccgctgtggagcccagcaagcccacggtcctgaggtccacctccacctcctcacccgttcgcccagctgccacattcccacctgccacccactgcccactgggcggcaccctcgatggggtctaccctaccctcatggagcccgtcttgctgcccaaggaggccccccgggtcgcccggccagagcggccccgagcagacaccggccatgccttcctcgccaagcccccagcccgctccgggctggagcccgcctcctcccccagcaagggctcggagccccggcccctagtgcctcctgtctctggccacgccaccatcgcccgcacccctgcgaagaacctcgcacctcaccacgccagcccggacccgccggcgccacctgcctcggcctcggacccgcaccgggaaaagactcaaagtaaacccttttccatccaggaactggaactccgttctctgggttaccacggcagcagctacagccccgaaggggtggagcccgtcagccctgtgagctcacccagtctgacccacgacaaggggctccccaagcacctggaagagctcgacaagagccacctggagggggagctgcggcccaagcagccaggccccgtgaagcttggcggggaggccgcccacctcccacacctgcggccgctgcctgagagccagccctcgtccagcccgctgctccagaccgccccaggggtcaaaggtcaccagcgggtggtcaccctggcccagcacatcagtgaggtcatcacacaggactacacccggcaccacccacagcagctcagcgcacccctgcccgcccccctctactccttccctggggccagctgccccgtcctggacctccgccgcccacccagtgacctctacctcccgcccccggaccatggtgccccggcccgtggctccccccacagcgaagggggcaagaggtctccagagccaaacaagacgtcggtcttgggtggtggtgaggacggtattgaacctgtgtccccaccggagggcatgacggagccagggcactcccggagtgctgtgtacccgctgctgtaccgggatggggaacagacggagcccagcaggatgggctccaagtctccaggcaacaccagccagccgccagccttcttcagcaagctgaccgagagcaactccgccatggtcaagtccaagaagcaagagatcaacaagaagctgaacacccacaaccggaatgagcctgaatacaatatcagccagcctgggacggagatcttcaatatgcccgccatcaccggaacaggccttatgacctatagaagccaggcggtgcaggaacatgccagcaccaacatggggctggaggccataattagaaaggcactcatgggtaaatatgaccagtgggaagagtccccgccgctcagcgccaatgcttttaaccctctgaatgccagtgccagcctgcccgctgctatgcccataaccgctgctgacggacggagtgaccacacactcacctcgccaggtggcggcgggaaggccaaggtctctggcagacccagcagccgaaaagccaagtccccggccccgggcctggcatctggggaccggccaccctctgtctcctcagtgcactcggagggagactgcaaccgccggacgccgctcaccaaccgcgtgtgggaggacaggccctcgtccgcaggttccacgccattcccctacaaccccctgatcatgcggctgcaggcgggtgtcatggcttccccacccccaccgggcctccccgcgggcagcgggcccctcgctggcccccaccacgcctgggacgaggagcccaagccactgctctgctcgcagtacgagacactctccgacagcgagtgactcagaacagggcgggggggggcgggcggtgtcaggtcccagcgagccacaggaacggccctgcaggagcggggcggctgccgactcccccaaccaaggaaggagcccctgagtccgcctgcgcctccatccatctgtccgtccagagccggcatccttgcctgtctaaagccttaactaagactcccgccccgggctggccctgtgcagaccttactcaggggatgtttacctggtgctcgggaagggaggggaaggggccggggagggggcacggcaggcgtgtggcagccacacacaggcggccagggcggccagggacccaaagcaggatgaccacgcacctccacgccactgcctcccccgaatgcatttggaaccaaagtctaaactgagctcgcagcccccgcgccctccctccgcctcccatcccgcttagcgctctggacagatggacgcaggccctgtccagcccccagtgcgctcgttccggtccccacagactgccccagccaacgagattgctggaaaccaagtcaggccaggtgggcggacaaaagggccaggtgcggcctggggggaacggatgctccgaggactggactgtttttttcacacatcgttgccgcagcggtgggaaggaaaggcagatgtaaatgatgtgttggtttacagggtatatttttgataccttcaatgaattaattcagatgttttacgcaaggaaggacttacccagtattactgctgctgtgcttttgatctctgcttaccgttcaagaggcgtgtgcaggccgacagtcggtgaccccatcactcgcaggaccaagggggcggggactgctcgtcacgccccgctgtgtcctccctccctcccttccttgggcagaatgaattcgatgcgtattctgtggccgccatttgcgcagggtggtggtattctgtcatttacacacgtcgttctaattaaaaagcgaattatactccaaaaaaaaaaaaaaaaaaa

SEQ ID NO: 23082 - DNA, 2563 bp, Homo Sapiens
cccacgcgtccggcggcctccatctaagatctcttccccttgtccatagcctagatcgagctccctgtgtgcaccgcgcgctgcccgaggcgcaggtcaaccagaatcaagatgtctgggactgaggaagcaattcttggaggacgtgacagccatcctgctgctggcggcggctcagtgttatgctttggacagtgccagtacacagcagaagagtaccaggccatccagaaggccctgaggcagaggctgggcccagaatacataagtagccgcatggctggcggaggccagaaggtgtgctacattgagggtcatcgggtaattaatctggccaatgagatgtttggttacaatggctgggcacactccatcacgcagcagaatgtggattttgttgacctcaacaatggcaagttctacgtgggagtctgtgcatttgtgagggtccagctgaaggtgaggggatggagtagacctgctgcccggaaggatcagtgggtggtaggagaaggatggttcatatcatgaagatgttggttatggtgttagtgagggcctcaagtccaaggctttatctttggagaaggcaaggaaggaggcggtgacagacgggctgaagcgagccctcaggtgagcgcggggctgggagtctaacctgcgtcatttcagctcttgcttcagagcagatttcgattttttttggaagaggtaacacatccacatggttcaaaaatccaagcagcgtggaaggtaattctcacccctgccctggttcctgtctgccgttttcccactttcgttagtattttttcaatgtttctgtttcaggcttcccttgctgggagtaagtggtagaatcctgtactctctcttctccgtgcactcagtcatgtgtgccggaggccttcccactcctactgcgagtgcacagacagcaccctcctctccgtgctcctcagcagtcctccgctacgcacaggagttttgggaatgcacttggaaactgtattctggacaaagactacctgagatcactaaataagcttccacgccagttgcctcttgaagtggatttaactaaagcgaagagacaagatcttgaaccgtctgtggaggaggcaagatacaacagctgccgaccgaacatggccctgggacacccacagctgcagcaggtgacctccccttccagacccagccatgctgtgataccggcggaccaggactgcagctcccgaagcctgagctcatccgccgtggagagcgaggccacgcaccagcggaagctccggcagaagcagctgcagcagcagttccgggagcggatggagaagcagcaggttcgagtctccacgccgtcagctgagaagagtgaggcagcgcctccggcccctcctgtgacgcacagcactcctgtaactgtctcagaaccactcctggagaaagacttccttgcaggagtgactcaagaattaatcagtaaataccttgaaatgcttagactcttgaagacaactctgaaaagtgggctgtgactcccgatgcaggggatggtgtggtcaagccctcgtctagagcagacccagcccagacctctgacacattagccttgaacaaccagatggtgacccagaacaggactccacacagcgtttgccaccagaaaccacaagcaaaatctggatcttgggacctccaaacttatagcgctgaccaacgcacaacaggaaactgggaatctcataggaagagccaggacatgaagaaaaggaaatatgatccatcttaactgaggctcaggccacataattggactctgtcacaaagggactttggaaaactactttttggtcatgaaattgttcatcgctgctggagaatgaacgtcattgcgatttatcttgcttcattctgaaccttatcaagaggatctgactgagagcccactgcagttagagctgagcacttttgaaaagcttgtccatcactctagtagggagaggctctggacagatgaataccttttcttcggcttgtgaggcttcccactatttattactgaactattatgttaatgaagatggacattttaggaatcaccaaacaatataatagcctcaagcaatataggccagacttggtcctaagcacctgcctcagcagttgtctacattcagttgttttgcattaacgtctgccttctttcctttacggtccatgcctttaatgttgtccacattaagcactgtggatcacgacaggaaaaaggttggagcaatgcttttcactactttgtatcaatccaggctacaatcttcatttaatataaataatttatggatttatgacattacaatcctgcattgtttcaagactgacattttttcctaaggaaggaaataatcatctaagaccacgaaaaaaaaaaaaaaaaaaaaaaaaaaaaaaaaaaaaaaaaaaaaaaaaaaaaaaaaaaaaaaaaaaaaaaaaaaaaaaaaaaaaaaaaaaaaaaaaaaaaaaaaaaaaaaaaaaaaaaaaaaaaaaaaaaaaaaaaaaaaaa

SEQ ID NO: 23083 - DNA, 2238 bp, Homo Sapiens
cgttgccgggtcgcaggtcccgccagtgcgagcgcaacggaggtcgaaggcgttcagactcttagctgaacgcggagctgcggcggctatgctgtggagcggctgccggcgtttcggggcgcgcctcggctgcctgcccggcggtctccgggtcctcgtccagaccggccaccggagcttgacctcctgcatcgacccttccatgggacttaatgaagagcagaaagaatttcaaaaagtggcctttgactttgctgcccgagagatggctccaaatatggcagagtgggaccagaaggagctgttcccagtggatgtgatgcggaaggcagcccagctaggcttcggaggggtctacatacaaacagatgtgggcgggtctgggctgtcacgtcttgatacctctgtcatttttgaagccttggctacaggctgcaccagcaccacagcctatataagcatccacaacatgtgtgcctggatgattgatagcttcggaaatgaggaacagaggcacaaattttgcccaccgctctgtaccatggagaagtttgcttcctactgcctcactgaaccaggaagtgggagtgatgctgcctctcttctgacctccgctaagaaacagggagatcattacatcctcaatggctccaaggccttcatcagtggtgctggtgagtcagacatctatgtggtcatgtgccgaacaggaggaccaggccccaagggcatctcatgcatagttgttgagaaggggacccctggcctcagctttggcaagaaggagaaaaaggtggggtggaactcccagccaacacgagctgtgatcttcgaagactgtgctgtccctgtggccaacagaattgggagcgaggggcagggcttcctcattgccgtgagaggactgaacggagggaggatcaatattgcttcctgctccctgggggctgcccacgcctctgtcatcctcacccgagaccacctcaatgtccggaagcagtttggagagcctctggccagtaaccagtacttgcaattcacactggctgatatggcaacaaggctggtggccgcgcggctgatggtccgcaatgcagcagtggctctgcaggaggagaggaaggatgcagtggccttgtgctccatggccaagctctttgctacagatgaatgctttgccatctgcaaccaggccttgcagatgcacgggggctacggctacctgaaggattacgctgttcagcagtacgtgcgggactccagggtccaccagattctagaaggtagcaatgaagtgatgaggatactgatctctagaagcctgcttcaggagtagaacccacacttgttctggcctggtgttcagtgcgactgcagtcagtgttgagtggtgccatgtgggccgctctattccaaaggaatcatggattagacccaagggctgagctcctctagggcaggacctgcaccctgtgtgttggcaccagcatcgggtcttggactggggcagaatccccagtggaaccggaagagctggactgatgagaaacatcagaagaacacatactaccttgttttcctaatgccagaagggtgaccagtgaagattcaccgtcaaaccatgaaagtcctttcttggatccactttatcttgattagtctgcattttactagttcactggatccctcctctaggggcctggggactttcactgatgctcttcctgattctagagcaaaggtgtgggaaggggaaatggaggaatgccctcctgtctgtgtcgttctctgtgccacagctacagatgcagaaggtttctctggatagcacacctctgaatgtaaatcatgataaaatggatatttggaaacttactcctaagctgtgatgtagggtgtatttctacttctggactgcctcaatatcaagggctgagacttttgaatgttgaatattcgttgggtttcatgttaagacgcctgtggtccaggagtgctattcagtgtttctgttcctgataaacactttgaatatttttttgtgtttttgtttccttttctgaagctgttcctccttttaaatatttttaatcacattgataaaatctatccttcatccacctctggttctactatagttgatttttattttaaatgtttaattgtatttgattaaacacttaactggattttggaataataaaactctcgtccaatttggcttttaaaaaaaaaaaa

SEQ ID NO: 23084 - DNA, 2238 bp, Homo Sapiens
atgtctttgaaaccaagagtagtagattttgatgaaacatggaacaaacttttgacgacaataaaagccgtggtcatgttggaatacgtcgaaagagcaacatggaatgaccgtttctcagatatctatgctttatgtgtggcctatcctgaaccccttggagaaagactttatacagaaactaagatttttttggaaaatcatgttcggcatttgcataagagagttttggagtcagaagaacaagtacttgttatgtatcataggtactgggaagaatacagcaagggtgcagactatatggactgcttatataggtatctcaacacccagtttattaaaaagaataaattaacagaagcggaccttcagtatggctatggtggtgtagatatgaatgaaccacttatggaaataggagagctagcattggatatgtggaggaaattgatggttgaaccacttcaggccatccttatccgaatgctgctccgagaaatcaaaaatgatcgtggtggagaagacccaaaccagaaagtaatccatggggttattaactcctttgttcatgttgaacagtataagaaaaaattccccttaaagttttatcaggaaatttttgagtctccctttctgactgaaacaggagagtattacaaacaagaagcttcaaatttattacaagaatcaaactgctcacagtatatggaaaaggttctaggtagattaaaagatgaagaaattcgatgtcgaaaatacctacatccaagttcatatactaaggtgattcatgaatgtcaacaacgaatggtagcagaccacttacagtttttacatgcagaatgtcataatataattcgacaagagaaaaaaaatgacatggcaaatatgtacgtcttactccgtgctgtgtccactggtttacctcatatgattcaggagctgcaaaaccacatccatgatgagggccttcgagcaaccagcaaccttactcaggaaaacatgccaacactatttgtggagtcagttttggaagtgcatggtaaatttgttcagcttatcaacactgttttgaatggtgatcagcattttatgagtgcgttggataaggcccttacgtcagttgtaaattacagagaacctaagtctgtttgcaaagcacctgaactgcttgctaagtactgtgacaacttactgaagaagtcagcgaaagggatgacagagaatgaagtggaagacaggctcacgagcttcatcacagtgttcaaatacattgatgacaaggacgtctttcaaaagttctacgcaagaatgctggcaaaacgtttaattcatgggttatccatgtctatggactctgaagaagccatgatcaacaaattaaagcaagcctgtggttatgagtttaccagcaagctacatcggatgtatacagatatgagtgtcagcgctgatctcaacaataagttcaacaattttatcaaaaaccaagacacagtaatagatttgggaattagttttcaaatatatgttctacaggctggtgcgtggcctcttactcaggctccttcatctacgtttgcaattccccaggaattagaaaaaagtgtacagatgtttgaattattttatagccaacatttcagtggaaggaaacttacatggttacattatctgtgtacaggtgaagttaaaatgaactatttgggcaaaccatatgtagccatggttacaacataccaaatggcagttcttcttgcctttaacaacagtgaaactgtcagttataaagagcttcaggacagcactcagatgaatgaaaaggaactgacaaaaacaatcaaatcattacttgatgtgaaaatgattaaccatgattcagaaaaggaagatattgatgcagaatcttcattttcattaaatatgaactttagcagtaaaagaacaaaatttaaaattactacatcaatgcagaaagacacaccacaagaaatggagcagactagaagtgcagttgatgaggaccggaaaatgtatctccaagctgctatagttcgtatcatgaaagcacgaaaagtgcttcggcacaatgcccttattcaagaggtgattagccagtcaagagctaggtttaatcccagtatcagcatgattaagaagtgtattgaagttctgatagacaaacaatacatagaacgcagccaggcgtcggcagatgaatacagctacgtcgcgtga

SEQ ID NO: 23085 - DNA, 4381 bp, Homo Sapiens
catccacagagatgttacagttgaagagatgggggtagagaagactttgaaggaaaagaatgtagaatgaggatagaagagaggaaatcccaacatttaacaggtttgacagatgaaaaagtgaaggcatatctttctcttcacccccaggtattagatgaatttgtatctgaaagtgttagtgcagagacagtagagaaatggctgaagaggaagaacaacaaatcagaagatgaatcggctcctaaggaagtcagcaggtaccaagatacgaatatgcagggagttgtatatgaactaaacagctatatagaacaacggttggacacaggaggagacaaccagctactcctctatgaactgagcagcatcattaaaatagccacaaaagccgatggatttgcactgtatttccttggagagtgcaataatagcctgtgtatattcacgccacctgggataaaggaaggaaaaccccgcctcatccctgctgggcccatcactcagggcaccaccgtctctgcttatgtggccaagtccaggaaaacactgctagtagaagacatccttggagatgaacgatttccaagaggtactggactggaatcagggactcgtatccagtctgttctttgcttaccaattgtcactgcaattggtgacttgattggtattctcgagctgtatcggcactggggcaaagaagccttctgtcttagtcaccaggaggttgcaacagcaaatcttgcctgggcttcagtagcaatacatcaggtgcaggtatgcagaggccttgccaaacagacagaattgaatgacttcctactcgacgtatcaaaaacatattttgataacatagttgcaatagattctctacttgaacacataatgatatatgcaaaaaacctggtgaatgccgatcgttgtgcacttttccaggtggaccataagaacaaggagttatattcagacctttttgatattggagaggaaaaggaaggaaaacctgtcttcaagaagaccaaagagataagattttcaattgagaaaggaattgctggccaagtagcaagaacaggggaagtcctgaacattccagatgcctatgcagacccacgctttaacagagaagtagacttgtacacaggctacaccacgcggaacatcctgtgcatgcccatcgtcagccgaggcagcgtgataggtgtggtgcagatggtcaacaaaatcagtggcagtgccttctctaaaacagatgaaaacaacttcaaaatgtttgccgtcttttgtgctttagccttacactgtgctaatatgtatcatagaattcgccactcagagtgcatttaccgggtaacgatggaaaagctgtcctaccatagcatttgtacttcagaagagtggcaaggtctcatgcaattcacccttcccgtgcgtctctgcaaagaaattgaattattccactttgacattggtccttttgaaaacatgtggcctggaatttttgtctacatggttcatcggtcctgtgggacatcctgctttgagcttgaaaagttgtgtcgttttattatgtctgtgaagaagaactatcggcgggttccttatcacaactggaagcatgcggtcactgtagcacactgcatgtatgccatacttcagaacaatcacacgcttttcacagaccttgagcgcaaaggactgctgattgcgtgtctgtgtcatgacctggaccacaggggcttcagtaacagctacctgcagaagttcgaccaccctctggccgctctctactccacttccaccatggagcagcaccacttctcccagactgtgtccatcctccagttggaagggcacaatatcttctccactctgagctccagtgaatatgagcaggtgcttgagatcatccgcaaagccatcattgccacagaccttgctttatactttggaaacaggaagcagttggaagagatgtaccagaccggatcactaaaccttaataatcaatcacatagagaccgtgtaattggtttgatgatgactgcctgtgacctttgttctgtgacaaaactgtggcccgttacaaaattgacggcaaatgatatatatgcagaattctgggctgagggtgatgaaatgaagaaattgggaatacagcctattcctatgatggacagagacaagaaggatgaagtcccccaaggccagcttgggttctacaatgccgtggccattccctgctatacaacccttacccagatcctccctcccacggagcctcttctgaaagcatgcagggataatctcagtcagtgggagaaggtgattcgaggggaggagactgcaacctggatttcatccccatccgtggctcagaaggcagctgcatctgaagattgagcactggtcaccctgacacgctgtcccacctacagatcctcatcttgcttctttgacattcttttcctttttttggggggggtggggggaacctgcacctggtaactggggtgcaaacctcttcaagaaggtaacatcaaataaataagtcaagcagaggacttcctgccaatctcttctgtgaggcatcatagacactgagcaaccaggaccacccccacgttcagaaatcagctggccaagtgactccatttgacttgcaaaccagccttttctaataggctaatattgctgaggccttaaaggaaatggacaaaaattatccagaaggggtacttttccattgtatctttctaataagggtttaaaatggtactattatggtattgtacttgggctttaacatcaatgttgctttgatgttgttggatataaataggaatttttacacattactattgtgaatggtgaatgttcatgtatgacctacttgtaattaacttgagttgtagtccacagcctcaggacaaatgtcgttgaggttacagagtaagaaatgatggcaaaacgtcaaactcttatttcagagcttcatgaatttagttagactaaacataattctttaagttcaacctaaagggctgagatcaataaatttaacactagacgaagtagacttcctgtctttttgagaagagatgaggtatatgttacaataaatctcagaacttcaagtagcagttcaaaagatgtcagtttttaaaattgtttttgttgttgtcttggcagttttactgaaccctttgcataaagaacaaaataaaagctcggcattgtaatttttttaatggacaagtcttatggatacgaagggtacatttttcataatgattcctttatattttcactttgtgtcattgcagaattttagactctcattcacaatgaaaagtttattttaaacattgtttaattaaaataccatacagttctcttttaaacatcaaaccataaaaagtgtattttgtaattttactctgacctgccgcagtcacctctcacttatctcttccacgtactgcacggtcgtatttcatgagctttctgtccatagcacagaaacagagcagaaagtagtacaatcatgttggaccttctttctgttctctttactcttctcacagatcagatcactccatagaagcctgtgggtttcgatggtttcttctatacacctttttggttgaccagtattactatacaatgtaagtgttttaaaaaatacgaaagtaatactctgcaccccttcctacaaagatgataaagcagtcacttctggcgcattttaataatttaaagatttttagtgcaatggcacggtaacctccaaacctgaattagacagagactcactcaggaagtgacaggcccatcatatcaaataacttattcacttttcatgtggcaggaaactggaatatcgcttttaataaaatggaaaaatatgcttctacatatttaccaccataggcgttttgttcatatgagcctggtttgtgcaaaattaaatcagaggcttctacaacatggtttatttatgttgtagcaaagttggctctacataaacattgttcttattttaaaattaacactatgtgttcagttttcttgtgggcttctgaaagttgccatcttccctccgtggagctccatttgctattttcattatacactatgaggtaaaatgtaataacaaaagagagagaagtaccactgtggctagatatatacacacacatatatatatggatggatgtaatatatgtagaacacacacatagatgtatataggatacacactcatgtatgtaaacgtatacatatgtgtatatatgatacatacacatacacacacacgagagacagaaggaaagagaggaagagagaagcaaacatgtaggaaaaaatataaatc

SEQ ID NO: 23086 - DNA, 6878 bp, Homo Sapiens
actcactatagggctcgagcggccgcccgggcaggtcagaattttgatttggctgctgggctgctaccttgaaatccaagccctaaaaatgccagcttctttggacttagaagatgacctggataaatgataaaaattaagaaagagattttgaagttttcttattgtcctcttggcatatgcttctggaataatattcaccatggttttggatgaccttccaaacttagaagacatctatacttccttgtgttcatcaacaatggaagactcagagatggattttgactctggactagaagatgatgacacaaaaagtgatagtattttggaggattccacaatttttgtggccttcaaaggaaatatagatgataaagacttcaaatggaaattagatgcaatattgaaaaacgtgcccaatttgttacacatggagtccagcaagctaaaagtacagaaggtggagccctggaacagcgtgcgtgtgacattcaacatcccccgggaagcagcggagcggctacggatccttgctcagagcaacaaccagcagcttcgggatttagggattctctccgttcagattgaaggggaaggtgctattaacctggctttggctcagaaccgaagccaagatgtgagaatgaatggacccatgggagctggaaattcagttaggatggaggcgggatttcctatggcaagtggtccaggaataataaggatgaacaaccctgccactgttatgatacccccgggtggaaatgtgtcatcttccatgatggcaccaggccccaatccagagctgcagcccaggactcctcgccctgcttctcagtcagatgcaatggatccactcctctctgggctccatatacagcagcaaagtcatccctcaggatctttagctcccccacatcacccaatgcagcctgtctctgtgaacagacaaatgaacccagctaattttccccagctgcagcagcagcagcaacaacaacaacagcagcagcagcagcagcagcagcaacaacagcaacagcagcaacaacagttgcaggcaagacccccacagcaacatcagcagcaacagccacagggaattcgaccccagtttactgccccaactcaggtgcctgttcctccaggctggaaccagctgccttctggagcccttcaacctcctccagcccagggttctctgggcacaatgactgcaaaccaagggtggaagaaggctcccttgcccggcccaatgcaacagcaactccaggcaagaccatccttagccacggtacagacgccttcccaccctccccctccatatccctttggcagccagcaagcctcacaagcccacacaaactttcctcagatgagcaacccaggccagttcacagctcctcagatgaagagtttgcagggagggccctctagggtcccaactcccttgcagcagccccacctcaccaacaagtctcctgcctcctcaccctcctccttccagcagggatcccctgcatcctccccaacggttaaccaaactcagcagcagatgggaccaaggccacctcaaaataacccacttccccagggatttcagcagcctgtcagctctccgggtcggaatcctatggttcaacagggaaatgtgccacctaacttcatggtgatgcagcagcaaccaccaaaccaggggccacagagtttacatccaggcctaggaggaatgcctaaacgcctcccacctggcttctcagcaggacaggccaatccgaactttatgcaaggtcaggtgccttcgaccacagcaaccacccctgggaattcaggagcccctcagctgcaagcaaatcaaaatgtccagcatgcaggtggtcaaggagctggtcctcctcaaaaccagatgcaggtgtcccacgggccgccaaatatgatgcagcccagcctcatgggaattcatggcaacatgaacaatcagcaggctggtacttctggggttcctcaagtgaacctcagcaacatgcaaggccagccccagcagggcccaccatctcagctgatgggcatgcaccagcaaatcgtgccctcccagggccagatggtccagcaacaaggaaccttgaaccctcagaaccctatgatcctttcaagggcccagcttatgccacagggccagatgatggtgaaccccccgagccaaaatcttgggccctcgccccaaaggatgaccccacccaagcagatgctttcccagcagggcccacaaatgatggcgccacataaccagatgatggggcctcaggggcaggttttgctccaacagaacccaatgatagagcagattatgaccaatcaaatgcaggggaataagcagcagtttaacactcagaaccagtccaatgtcatgccgggaccagcccagataatgaggggaccaactccgaacatgcaaggaaatatggtgcagtttacgggacagatgtcaggacagatgctgccccagcaagggcctgtgaacaacagtccatctcaggttatgggcattcagggacaggtcctgcggccaccagggcccagcccacacatggcccagcagcatggtgatcctgctactacagcaaataacgatgtcagtttatctcagatgatgcctgatgttagcattcaacaaaccaacatggtcccccctcatgtgcaggccatgcagggaaacagtgcctcgggaaaccacttctcaggccatgggatgtctttcaatgcacctttcagtggagctcccaatggaaatcagatgtcctgtggtcaaaatccaggcttcccagtcaataaggatgtcacgctaacgagcccattgttggtcaacttattgcagagtgacatatctgcaggccattttggggtaaacaataagcaaaataataccaacgcaaataaaccgaagaagaagaaaccccctcggaagaagaaaaatagtcagcaagatctaaacaccccagatactcgcccagctggtctggaagaggctgatcagccaccgttgcctggagaacaaggaattagcttggataactcaggccctaaactgccagaattttcaaaccggccaccaggttatccttctcaaccagttgaacagaggccacttcagcagatgcctcctcaactcatgcagcatgtggcacccccaccacagccaccacagcagcagccacagccacaactgcctcagcagcagcagccaccacctcccagtcagccacagtctcagcagcagcagcagcagcagcaacaaatgatgatgatgctcatgatgcagcaggatcccaaatcagttaggcttccagtctctcaaaatgtccatcctccaaggggccccctgaaccccgactcccagagaatgcccatgcaacagagtggcagtgtgcctgtcatggtcagtctgcaaggacctgcctccgtgccaccatcacctgataaacaaagaatgccaatgcctgtgaatactcccttgggaagcaattcaaggaaaatggtctatcaggagagcccgcagaatccttccagctcgccactggcggagatggcctcactccctgaagcaagtggcagtgaagcaccatctgtcccaggaggcccaaacaacatgccttcacatgtagtacttccccagaatcagttaatgatgacagggccaaaacctggaccatcgcccctttcagcaactcaaggtgcaactccccagcaaccccctgtaaattccctgcccagctctcacggccaccacttcccaaatgtggctgcgccaacccagacatctaggcccaaaacaccaaacagagccagccccagaccctattatcctcagacacccaacaaccgccctcccagcacagaaccttcagaaatcagtctgtcaccagaaagactcaatgcctccatagcaggactcttccctccacagattaatattcctttacctcctaggccaaatttaaacaggggctttgatcaacaaggcctaaatccaacaactttgaaggccatcgggcaagcaccttcaaatcttaccatgaatccttccaattttgctaccccacaaactcacaaattagattctgtggtagtgaattctggaaagcagtctaattctggagcaacaaaacgggcaagtccaagcaacagtcgcaggtctagtcctgggtccagtaggaaaaccactccaagccctgggaggcaaaattcaaaagcccctaaacttactctggcctctcagacaaatgcagccctattgcagaatgtggagttgccgagaaatgtattggtcagtcccactcctctggccaatccccctgtacctgggagctttcctaacaacagtgggctgaatcctcagaattctactgtgtctgtggctgcagttgggggtgttgttgaggataacaaggagagcttgaatgtgcctcaggacagtgattgccagaattcccagagtaggaaggaacaggtaaacattgaactaaaagcagtccctgcccaagaagttaaaatggttgtccctgaagatcagtccaaaaaggatgggcagccttcggatcctaacaaacttcccagtgtcgaagagaacaaaaatttggtgtctcctgctatgagggaagcaccaacatcgttaagtcaacttcttgacaactctggagctcccaatgtgacaattaaaccccctgggcttacagatctggaagtaacacctccagtagtttctggggaggacctcaaaaaagcatctgtcattcccacactgcaggatctgtcttcttctaaagaaccttctaattccctaaacttacctcacagtaatgagctgtgttcatcccttgtgcatcccgaattgagtgaggtcagttctaacgttgcaccaagcatccctccagtaatgtcaagacctgttagctcttcctccatttccactcccttgcccccaaatcaaataactgtatttgtcacttccaatcccatcacaacttcagctaacacatcagcagctttgccaactcacttgcagtctgcattgatgtcaacagttgtcacaatgcccaatgcgggtagcaaggttatggtttctgagggacagtcagctgctcagtctaatgcccggcctcagttcattacacctgtctttatcaattcatcctcaataattcaggttatgaaaggatcacagccaagcacaattcctgcagccccactgacaaccaactctggcctgatgcctccctctgttgcagttgttggccctttacacatacctcagaacataaaattttcttctgctcctgtaccgcctaatgccctctccagtagtcctgctccaaacatccagacaggtcgacctttggtccttagctcacgagccacccctgttcagcttccttcccctccttgtacgtcttctccagttgtcccttctcatccccctgtgcagcaagtgaaagaattgaatccagatgaggctagccctcaggtgaacacctcagcagatcagaacactcttccctcttcacagtcaaccacaatggtttctccccttttgaccaatagtccagggtcctctggcaaccggcgaagcccagtctcgtctagtaagggcaaaggaaaagtggacaaaattggccaaattttgttgaccaaggcatgtaagaaagttacaggctctcttgagaaaggggaagaacaatatggtgcagatggagagactgaaggccaagggctagacaccacagctccggggctcatgggaacagagcagttatccacagagctggacagtaaaaccccaacgcccccagcacccactctgctaaaaatgacctctagccctgtgggcccgggcactgcctcagcaggacccagcttacctggcggtgctctccccaccagtgtacgctcgatagtaaccactctggtaccctccgagctcatctccgccgtaccgaccacaaaaagcaatcatggtggcatagcatctgagtcacttgcgggtggcctagtggaggagaaggtgggatcccatccagaacttctacccagcatagccccgtcgcagaatttagtctcaaaggaaacttcaaccacagcactgcaggcctctgttgccagaccagagctggaggtaaatgctgccatagtctctggacaaagcagtgagcccaaagagatagttgaaaagtccaaaatcccaggccgaagaaactcccgaactgaagagccaactgtggcctctgaaagtgtggaaaatggacatcgtaaacgatcttctcgacctgcttcagcctccagctctactaaagacataaccagtgcggtgcaatccaagcgaagaaaatccaagtaaacaagcaggactgcgacttgatacttggaaatgtgtgtgacttttacaaagagcaattttgagctgtgacttttttaaatcaatttctgtacagttagtaattttaataatgtggcccttttcctagtccctgcaacctgtttcataaagtgcaatggggaaagcaggactgttgagcccttttggtgttgcgagttgaagttcaaggtttctaaaatgttgtcttgtattgaaaggagctaatgccattataaatgttactagttttcacatttcctaagcagcctagagtacagggtgagcatttttagatctcctaatgtattgtgccgtggaagtactgtgtgtgaatagcagtagtgggggcaaaagcaatcttctcatttggaaatgttgtaaataattttattatatagtgttttggatgtatttgttgtagaaatggaccagtgaataaagagaatctaaggatttgtacaatgtg

SEQ ID NO: 23087 - DNA, 2076 bp, Homo Sapiens
aggttgctcagctgcccccggagcggttcctccacctgaggcagacaccacctcggttggcatgagccggcgcccctgcagctgcgccctacggccaccccgctgctcctgcagcgccagccccagcgcagtgacagccgccgggcgccctcgaccctcggatagttgtaaagaagaaagttctaccctttctgtcaaaatgaagtgtgattttaattgtaaccatgttcattccggacttaaactggtaaaacctgatgacattggaagactagtttcctacacccctgcatatctggaaggttcctgtaaagactgcattaaagactatgaaaggctgtcatgtattgggtcaccgattgtgagccctaggattgtacaacttgaaactgaaagcaagcgcttgcataacaaggaaaatcaacatgtgcaacagacacttaatagtacaaatgaaatagaagcactagagaccagtagactttatgaagacagtggctattcctcattttctctacaaagtggcctcagtgaacatgaagaaggtagcctcctggaggagaatttcggtgacagtctacaatcctgcctgctacaaatacaaagcccagaccaatatcccaacaaaaacttgctgccagttcttcattttgaaaaagtggtttgttcaacattaaaaaagaatgcaaaacgaaatcctaaagtagatcgggagatgctgaaggaaattatagccagaggaaattttagactgcagaatataattggcagaaaaatgggcctagaatgtgtagatattctcagcgaactctttcgaaggggactcagacatgtcttagcaactattttagcacaactcagtgacatggacttaatcaatgtgtctaaagtgagcacaacttggaagaagatcctagaagatgataagggggcattccagttgtacagtaaagcaatacaaagagttaccgaaaacaacaataaattttcacctcatgcttcaaccagagaatatgttatgttcagaaccccactggcttctgttcagaaatcagcagcccagacttctctcaaaaaagatgctcaaaccaagttatccaatcaaggtgatcagaaaggttctacttatagtcgacacaatgaattctctgaggttgccaagacattgaaaaagaacgaaagcctcaaagcctgtattcgctgtaattcacctgcaaaatatgattgctatttacaacgggcaacctgcaaacgagaaggctgtggatttgattattgtacgaagtgtctctgtaattatcatactactaaagactgttcagatggcaagctcctcaaagccagttgtaaaataggtcccctgcctggtacaaagaaaagcaaaaagaatttacgaagattgtgatctcttattaaatcaattgttactgatcatgaatgttagttagaaaatgttaggttttaacttaaaaaaaattgtattgtgattttcaattttatgttgaaatcggtgtagtatcctgaggtttttttccccccagaagataaagaggatagacaacctcttaaaatatttttacaatttaatgagaaaaagtttaaaattctcaatacaaatcaaacaatttaaatattttaagaaaaaaggaaaagtagatagtgatactgagggtaaaaaaaaaattgattcaattttatggtaaaggaaacccatgcaattttacctagacagtcttaaatatgtctggttttccatctgttagcatttcagacattttatgttcctcttactcaattgataccaacagaaatatcaacttctggagtctattaaatgtgttgtcacctttctaaagctttttttcattgtgtgtatttcccaagaaagtatcctttgtaaaaacttgcttgttttccttatttctgaaatctgttttaatatttttgtatacatgtaaatatttctgtattttttatatgtcaaagaatatgtctcttgtatgtacatataaaaataaattttgctcaataaaattgtaagcttaaaaaaaaaaaaaaaaaactcgagactagtgc

SEQ ID NO: 23088 - DNA, 184666 bp, Homo Sapiens
gaattctctccctcccatctgtggctgagattaaagatctgcacctgaagcactgaagaatgtgtgggtaattaaattaccctgccgattcctggagatgctgattacctggagatgacctcagagattatcctaaattaactcctacaagacacacattgcagcgggaggtgaggtaggggaaggattgtgcacctgaggctagcaaaggtttccactctgtttagagatgatgtcaccagtgcgtttacatttgcgttgtgttcacacattgagtgctactatgtacaagaccatgtgtcagacactgaggtaacaggtatagctactagatagagttcatagctatggaggcaagcagattcactgactgctaattctaacatgatgtgacagtgcaactagaaaaacataaacaagcactatgtgagcacaaagaaggtgcacatcaactccttacaggtacctgtaaaagccaaagggtaacagttggattgcaccttgaagaggatgcacttttttttttttttaagacagaatctcactctgttgcccaggctggagtgcagtggggcaatctgggctcacttcaacctctacctcccgagttcaagcaattctcctgcctcagcctcctgagtagctggtactagaggcatgcgccatgatgctgggctaatttttgtattttcggtagacgtgaagtttcaccaagttggccaggctggtcttgaactcctgacctcaaatcatccacccacctcagcctcccaaaatgctgagactacaggcgtgagccaccgcgcctgacctggatgtaagattttgataggtacagaacaaggaaaagactttccaggccgggcacagtggcttatgcctgtaatcccagcactttgggaggccgaggtgggcagatcacgaggtcagcagttcaagaccagcgtggccaacatggtgaaatcccatctctactaaaaatacaaaaattagccaggcatggtggtgggtccctgtaatcccagctactccggaggctgaggcaggagaattgcttgaacctgggaggtggaggttgcagtgagcaaagaccgcgccactgcactccagcctgggtgacagagggagactccgtctcaaaaaaaaaaaaaaaagactttccagaaggagcagcataaacacaggcatgacatgtttccataatggcaagtggccctaaatgactagaatataaggtagatccagtaggaaaggacttagaaggggctttggaaggtgagtctggaaattaaaactggggtaaacgtgatggaccctgaacatcattatactgcttaagatgctaatcttaatcctgaaggtaatgggaaaacctcctaaggtttatgttattttctttctacttaggctatttaaaaagtggagtgacggccaggcgcagtgactcatgcctgtaatcccagcactttgggaggccgaggtgggcggatcaccaggagttcgagaccagcctgaccaacatggtgaaaccccgcctctactgaaaatacaaaaattagccaggtgtggtggtgggcgcctgtaatcccagctacttgggaggctgaggcagaagaattgcttgaacccgggaagtggaggttgcagtgagcagagatcgtgccattgtactccagcctgggcaacaagagcgaaactcagtcacaaaaaaaaaaaaaaaaaaaaaggagtgacatgcttagatctctgttttggaatgacaggttttttgtttctagcatcaatccaaggttcatggcttgagaaggtgtactgccagcaatgccattaaccagcaaagggaatgcaggaagaggaacagatctggtgggcatcagtttggatgctctgagtttgagctgcctgtgaaaactgcaggtggtgatatgcaattaacattcacatacggagttcaaaactagagacacaaatttgagagtcatcacagaaatgtgaagtgtgttttctataactaaagataaccatgctaacatagccatgtgttacattagcattttttttttttttgagacggagtctcactctgttgcccaggctgaagtgcagtgcacaatcttggctcactgcaacctccacctcctgggttcaagcgattctcctgccttagtctcctgagtagctggaattacaggcacctaccaacacgcttggctaatttttgcattttagtagagatggggctttaccatgttggccagctggtctcaaactcctgacctcaagtgattcacccaccttggccccccaaagtgctgggattacaggtgtgagccactgtgcccggccttacattttgtgttttttcctgctgcttgtatgtgtgcaagtctgtgtatcatcaatgggtatatgtgtacctgcgctgacaacaaaaaatgagatgcatatcagctactacacaaagctgttataaggatgaaatgcagttagccagtgctcagtaaagggcagttgctttactactactaggtggggtggtgtatgtgagaatctgtatactgccattagtaggctttagtatgtagtgtgcatatggaattcatgcattagtgtgtagtatgtgtgggacccactcacctgagcagcttctctccccacttacagtggcatctgttgaggattcctgtgagggataaggcagggagtgaacttgttacaaggcagggacagggaatggaatgtgtttatgtgtctaagctgaggcatccaggtcagaggtgctggttgttgaggaagctggcctgggagggcacaaaggcagccaaagctggtgcctggccacaaatatgagctgggattaccgtacatggagatgggggaagggatggacactcacagggacacttagccagaaaaatacacaaagcagacctagttaaaactcaagaactggccaggcacggtggctcacgcctgtaatcccagcactctgggaggccgaggcagacggatcacgtggtcaggagatcgagaccatcctggctaacatggtgaaacgcagtctctactaaaaatacaaaaaattagccgggcatggtggcaggcacctgtagtcccagctactcgggaggctgaagcagaatggcatgaacccgggaggcagagcttgcagtgagcggagatcgcgccactgcactccagcctgggtgacagagcaagactccgtctcaaaacaaaacgaaacaaataaacaaacaaacaaaacacaaaaaactcaagagccctcccgcccctccaaaaatacaaaaactcaatagctggccgggcagggtggctcatgcctataatcccagcactttgggaggccaaggcaggaggatcacttgagctcaggagtttgagaccagcctgggcaacatggcgaaacaccatctctactaaaaatacaaaaaaattagctgggcatggtggtgcaggcctgtagttccagctattcaggaggctgaggtaggatgaggcagaagaatcacttgaacccaagaggcggaggttgcagtgagcctaaattgtaccactgcactccagcctgggtgacacagcaagattccatctaaaaaacaaacaaacaaacaaaaaactcaagagcccaacacacatatgtaaaaaactggacggccgggcgcggtcgctcatgcctgtaatcccagcaccttgggaggctgaggcgagtggatcccctgaggtcaggagttcaagaccagcctgggcaacatggtgaaaccccgtctctactaaaaatacaaaaattagctgggcgtggtggcaggtgcctgtaatcccagttactcaggaggctgaggcaggagaatcgcttgaacccaggaggcagaggttgcattgagccgagatcgcaccattgcactccagcctgggggacaagagcgagacttcgtcacacacacacacacacacacacacacacacacacacacacacaaaactggacacaactggccaggcgcggtggctcacgcctgtaatcccagcactttgggaggccgaggtggacggatcacgaggtcaggagatcgagatcatcctggctaacacagtgaaacccgttctctactaaaaatacaaaaattagccaggcatcgtggtgggcacctgtagtcctagctactcaggaggctgaggcagcagaatggtgtgaacccaggaggcagagcttgcagtgagctgatattgcaccactgcactccagcctgggcgacagagcgagactctgcctcaaaaaaaaaaaaaaaaaacctggacacaacttactgagatatgaaactatatggatatttgcggagatgtccctaatataccctaaagccagagacaactgataaagactctatacaaatcaaataggcagttatgcagttacaaaactcttctctatacacaaggtctcccaaagtccctaacaggtacccaactagtagaaacattcatacaaacccagggaaggaacacagaattggtaaagtaatggctgatatgcaacaacactgtacagccacaaagtatgggaagatgctcaagcttggggggcggggggtacaaataggtaagaaatttggattggcatgaaagagatatctgacaatgggagtgaagtgggaagggaggctgggacacatctttggagccaattgcttttctggtaggtctttgtaatgtgagatgagggatggggcacacctaccaaagaggctgagcccctccttcagtccactggccactttgtacactgaggggtgagactcactcttaaaaatctgtagaacactgtcgaggagaaatggaggagtttggggtaacttggacttttgaagggaataagaattgaggactgataaatggaatggggacaggggatatcctcctgagatcacgtcttttttttttttttttttttgagatggagtctcgctctgtcgcccaggctggagtgcagtggtgcaatttcagctcactgcaacctctgcctcctggattcaagcaatcctgcctcagcctcctgagtggctgggattacaggcgcacaacacacccagctaatttttatatttttagtagagacggggttttaccatattggtcaggtctcaaactcctgacctcaggcgatccacccgccttggcctcccaaagcgcggggattacaggcatgagccaccgcgcccagccgagatcatatcttgatgtaaggtttgtcccttacttttctttgcctcagtttctccctatagaaaagaaagctagtatctttatgcttttcttcctctctttccctcaaaaccccccttccctttccttcaaggagagagatcttaatagccccaggattagggaaactagagcctcattaggattattggggcattaaacttaatccttctccctccccagagacagcagcatgcctccacctctttacctgtaagtgtcttgatctatgttcaccagatgagtcctgaggacagaaaacaaaaaagcaggaagcagtctgagttcgttccacaactccacttcctttgtccccctctctgaatattgtcccagtcttcttcccaaagtctcattagcccttagattctcccgggtgtcctagagcacttgacccactgggtcacagccacatccacaccccacccccactttacttttcaggcctcccaatcccacattactttggttggggttggggtgaatcacctacaacataaatttcttaaagcccaggatggggacgctgacattatagtcttccagttcaaccccgattcttcttcgacccaggaacttcagcagccctccaagtgctcgaacctgggaggggatcagcagtggaatcggggtaaatcttaaatctcctgggggctgcagagcaccagggaaagttactattttccagggctaggccagtacctcccagaattcagccctagcacttgtgccgcctcccagcccttatcccccaggaccaatctcactgtgaggaggcagtcaaagggaataatggaagagaggaagaggattttctcagtggcagtcatggcgtctgggatgaaggagtagtttccagaaaggaggcgttgtttgcttatctccagacctatttgagggaggcaagcaaagggaacggtcttgtagctcaattttttcaccccattttaagaatgagacaatagaagcaagagagattatttgacttgcccaagctcacacaggcagttaatggaaagctagagcaagaaccaaattttcagactcttagtctaattctctttttattctacatataatataaagatacttgtctgaaagcacagcctgagaaagataaatggctgaggaaagtagacatctgtctggaattgaggattttggtcaaaataatggtattaatagaactagtaacactaatgccttaatatctaattaggatagtacactcctgttcttattgtaaacctaggaaagttatagaagtgccttatggatcataataagggtcactgaggcagtgccttttggtttggtgataaaaggctttaacttaatggggagaattccaacaataaaaccctgtccaaaaagtgtcaccactcctcaggggaggccctcatccctagacatgacttaagcagaggcttcccaataagctgcaggttattaaagggtagggagcaggagagatcttggggggacaggtcatagggcatgaggagcacaaaggtttaggatgacataaggcagaggggagatctgtgatgatgaaggtagagttgggggaaagaatgggacaccggaacagggagttaggctaagcaaaaggaaggagataccaaaatccacacttggcaaaaatatgatttcaggtcttttaggctctctgtgctcctgggaggctgtgggggaggaaagaaaaggctatcattctttacatctcagtccttctacctctgtctgacactccctctcacccaattctagccccctggaatattccatatattagtccttccccattttccctctatcctttaccaagtccttaccaagctttcccagaaatcgagtcatattctcatcctgtttggcactcgtaacaacagactggggattgatctcatccagaacttggaaggagaacagagatcaaatgagttaaaggatctttgtctttgactaagagaaaacccatagccctcctcttcctacccctctccttctcaaaaacatttcctccctaggagtagggagtgctctgcacagtgggaacacaggtagaagttgagatttagaaaagtagttaagagtggtgggatggtgagagggaagtgggatgttctggatgttgtcactaggctgtaaacccctggagaacagacatgactgatttgcccagggctgaatctgaagcacctgaaacattgtaaatacgtcatatatatttgtggccaggcacagtggctcatgcctataatccctgccctttgggaggccaaggcaggcagatcactggaggccaggagctcaagacaagcctagccaacgtggtgaaaccctgcctctactaaaaatataaaaattagccaggcgtgatggcagattcttgtaatcccagctactcgggagactgaggcaggagaattgcttgaatccgggagacggaggttgcagtgagccaagatggcaccactacacttccagcctgagtgacggagcaagacactgtctcaaaaaagaacaaccaaacaaaccaaaaaacaacctcacaaatatttgttaaataatgaaatgaattcataaaaacaaaagagggagcctctgtgaagcaactgtaaaatatattgagtcagtgctatagtttggatgtgatttgtccctgccaaatatcgtgttgaaatttaatccccagtgtgatagtgttgtgaggtagggcctagcaggaggtgtgtgggtgatgggagtggatcgctcatgaacagattaatgcccttcctggagtgtgttggtgggtatgagtgagaggttctcactctattagttcctgagagagctggttgtcaaaaagagcctggcatctccctcccccttgcttcttctctgccatgtgacctctacacaccctgccttcccttcttccatgagttgaagcagtctgaggctctcaccagtgaagatgcccaattttgagctttccaaccatccagaaccataagccaaataaaacttttttttttttttaacaaattactcagagtcaggtatttccttacagcaacacaaaatatgctagacagtgaggtgagttaatgtaagtaaaacatggctgggcgtggtgactcacacctgtagtcccagcactttaggaggccaaggtgggcggatcacaaggtcaggagtttgagaccaccctggccaacatggtgaaacaccatctgtgctaaaaacacacacaaaaaactagctgggtgtggtggcacacgcctgtagtcccagctactcgggaggttgagtcaggagaattgcttgaacccaggaggtggaggctgcagtgagccaagattgcgccactgcacttgagcctgggtaacagagcaagactctgtctagaaaaaaaaaatatgtgtgtgtgtgtgtgtgtgtgtgtgtgtgtgtgtgtgtgtgtaacacatctgcaatcccagagagcagaggaattcatggttccatccccacctctctggagaagcttgaggctctcgtggtctggggcatctggcatgaagtggatagtggagtcactagtatcatagtaggcaatgcccaagtatcctgaattccacagcacacacagatggatctgtccagcaaggaagaaaggaaatcactattagaatcactcataagtgtagggtttaccatgtcttatataatttaatcattttctcaaatctctgagataggcatcatcacccccatttagtgaatgtgaaacagccactcaggaggtaagagacttgcccagctcttcccaaccctgttttttttttctttctttctttgagacggagtcttgctctgtcgcccaggctgaagtgcagtggagcaatctcagctcattgcaacctccgcctcccgagttacagtgattctcctgcctcagccttcccagtagctgggataacaggcacgtgccaccacgctcggctaatttttatatttttagtagagacggggtttcgccatgttgcccaggctggtctccaactcctgagctcaggtgatccgcccgcctcagtctcccaaagtgctaagattacaggtgtgagccaccgcgcccggctcccaaccctcttttattctaacttcccatcaactctccattcaagtttctactcccctcagagacctcggccagctcctcctcctcctcgacttcctcctcctcggcctccctggggcccggcactggggccgggctggggaagccggaggaggccgccccaggtctcggtccctgcggtgtcctccttgggttcgctcctaaggaggccatgagcttggaggctctgcggatgcaaaaagtgagggcggttcggaagcaacgattcacagaggaggccggggtagggtggcgcgcagaatgcaaagcactaagtacttctgctacagggctgcggggcagggctgaggggcgtggagagctgtggacacaggaggtgaattctcgggtatttaactaaagtacagattgtgggaaactccacgcgccccaccctcattcctgtcacgcggaggttaccctttggaaggaaggggtctgagggccctgtggggcgagtcgtgcacgtcttatgtctctgcctctgccaaccacgcgccaggaccccagcctcacgcgcttatcttcctcctcccccagctgccgccatcgcagcgttttcccgccttttcagtaacctgagtcgctacaggtgggagaacgccccgctgaccgaccgccacgagcctgcaaaaggagcgcgccggcgcgtgagcgaggtgcgcgcgcacgcgccccgccctcctagccgctgttgattggagaggcccggatccagcctagagatccgacagggcgaggaggagaagcggactgccgtagctgaagagtctggacgctgattggcctatttgccttcggggcgggtccagaacgttcaaacttcccgccctctgccgttgcttagcagccgggcctctagcactcactgtttctgggatttgattggcgcagtgggaagcccgcgagaaggtcggaccagggtccgtagtcccagtccctggaaggggtttgggaccgttgcgggggttttgagggggaggccaaacttaaagagccagaggcgcttattttttttcctgcaacaactcttaagttaatatttgtaccctctgagttaatatttatacagagcttagaacagtgcctggcaaacaaagtaagacctaaatgagcggtgtttcaaataaataagcggaaacaagcaggacttctgtctcagccctaccgtgcctgtttcctgggtacagggtatgaccacccccataatggcacgacagggcctaatttattatttaaacccttcaagcagaggtggaagcattcgaattacatcaaattctggcagagagaagtagttctgatcagaacactcacacccctactgggacatgcccataccccttcgcacttctacacacccctgaagacagagaggtatctatcattcatgcattcggcaactatttagtgcctattttgggccaggggttggactcaaagcggtgaacataatgaagtcactgctccataaagcttatttgtgcgtctgtgtgtgtgtgtgtgtgtgtgtgtgtgtgtgtgtgtgtgtgtgttgcgggggtggggttatgagggagaaagaaaaaaaatatatatatatatatatataatccctttaaatgcaccatcctccccagctttgttcctagtaccctgagatggggagattcctccccagccccccaacccaagaagttaggaaagatggtgggggtgagatgacctagctgtgctaaccagtaattggaaaatcccctccagcaagaaaggtgggggaacagagttaagggctgggttaatggttacccctggcaaatctgttgagcaatggagctatagaaacttggaggaggttggtgacagctctggggagtgtcagggagggacccaccttccaatctggggtgtgaagagattagggactagtttaccaagcccaggaaggggagggagtggaaagagaagcccagagagggaaagaggagctactgagataggagaaatgcagggacagggaggtgagatggagggaaacctctgttgcaggatttgggggtacagccctggctctgctggatggttccaggagagggcagcgttgcctgtcacctggtaaattaaggcacgataccctgtgggtagtcatgccagccagccaaagtcaatattgatatcaaggcagctgtagctataaagctgtaggagagaaaagagaggccgggagaggctgccaaacctgtttgatcttcaagctggccccatttacctaaggcttctcttggacacagaccagttggaacaggagaggaccctgagaagtagagttgttttgatcccctcccctcaatgggaaggggtcctgtgtgcagattttgagggtcaccatgagggaattcacacccacacagaggcatggaatcatacccttacaggatgttacagttcaagggaacgaacaccaaagatagcctttctgtcgggaggagagaaaaaggccctcccacaagcaggagaaaacccacagaagaggaagcacaagaggaaaccaccaactgctggtttccagcagcacatcacgtcactccaccccactcctcccccaagtctctccctttctttaagtttcaagctctgttttagttctgtgttcttgcactccaccatggttttctggaactgtaggtcttttgttggacagagggtgatgaggaggatagagaagggatggttggacaggagagaaattcaggatatggaggctggaattctgggtttattttttcagcaggtcataaaggtttaatagaaatcaaggttactggagagagagctgctcctcctatgtcctccctgcttatttatttaggtgtccccaaggactctactcccactattctgtctgatctttctttatccccatgacaggaccagctaacaacacccctaccccaccccctatacacatacttcaggatcgggccatgataatcccacccctctgccccatctccaaggcaacctgtcagtgagacgaggacaaagggcacaggaaggggccccaataggaaacataagtggaagcacaaagctgaccaagctacaggaacagacccctccctgcaacaaagccccttgcctcggctttatgtttccttcgcaaaagacttcgtcatctcccttcccatccctaactctactttctttttcttttcttcttcttctttttttttttttttttgagatggagtttcgctcttattgcccaggctggagtgcaatggcaccatctcagctcactgcaaccttcacctcccgggttcaattgattctcctgcctcagcctcccaagtagctgggattacaggtgcccaccaccccgcctggcaaatttttgtatttttagtagagacagggtttcaccatgttggccagtctggtcttgactccctgacctcaggtgatccaccccccttggcctcctaaagtgttgggattacaggcgtgaaccacctcacccggcccctaactctatttcctatgcccaatcccaagtgtaggccacaaggactgcaagtcctagtgctgagctgggcccggagacagtagactgcggggggcacaggacctactgagacaccagtctgggcagctcagggagtgctggcgtcaccccttccctaatcccaggctgcatggctaacggttcctatctgcagtcccagccttccacttccgagttcttctctcagaccacagtcccagcaacccagaatttggattggagtctggaagaaatgcagaatgattaaacgaccacctttccatttgaagtccccatccctgaatcttcacgggtgtgcccaagctgttagtgtcaagttttttatatgagggtcagtcgggttgtactcagattaatgaagcagggaaactgaggcagaaaagagtcctgtgttcaggagaggtcggagaaacaaggaggttttcaggactcctccttaacacccccatccccatcctgtgggagatccgaggattccccttccggactcactccctacatcgtcgagtcccgcccccctccagtcccctccccaggttcagggcggggccggtcggtgagtcagcggctctctgatccagcccgggagaggaccgagctggaggagctgggtgtggggtgcgttgggctggtggggaggcctagtttgggtgcaagtaggtctgattgagcttgtgttgtgctgaagggacagccctgggtctaggggagagagtccctgagtgtgagacccgccttccccggtcccagcccctcccagttcccccagggacggccacttcctggtccccgacgcaaccatggctgaagaacaaccgcaggtcgaattgttcgtgaaggtaagaacacttctctcctcagccacccaaattcctggaagccaactctcacctttcccccggtccagccttaactccccaatcccttccctccttgactcccacccccaatcccacgtgcactctttggttgaggggtggttttgagaggggaagacattaacttgttagcaagtaatgagaattctaggatcaaccctgaaaagtttgtaaaagtgcaagtttctagcagactaaaggaagggaagtggagaaaaaggagaattcccaaaagtgagactggggtggggttagagggcgagctggtgaagggacagtgggggcccagcagggtttagaagggacagaggggaacctcagttaggacatgtgtccctacaagatctgagggtgagtagtgcagtaggagaggtgtgtgtgtgtgtgtgtgtgtgtgtgtgtgtgtgtgtgtgtggatggagacgcttcagggaagacggtgtgttgagggaggcctgagagtgagagcaagtaaattgggaagctttggaggggcggaacaaaacaggagactgggatcggagtttgaaaagcagagctggagaggtgatcgggtggcattgaatatccccaggactggggaaagggacagaaggggaggtggcaagaagacgtgagtttaacgtagctaccacaaggatgggtgggagagagatcagacggaggagaagagctcggttagggcattttgggatttgggggttggagaagtagaagacttgccccaactctctcctctctctgcgggtgtgggtaaggagagatggtcctatggcatttgggtagcaaaactgcaggcagcaggcttctcggtgtcacccagcccccctctgattgcagcggccgctcccctccctaccgctgctgcattcatttcccagtcttgggacctcctggctgtgcccctccctcccttccttaacagtgtcctcttctccccgctccgtttgtgtctctccgttggcacgcacgtctccccactctccactttcctgccgcctttctttccccttccccccttttgtttctctcatctttgtgtgtctctgcctgtgtctccctctcccttctgcttgggtttctcgggcagccattccctctccctgggcccagggaagtcggagcctgcttgggtccgcccccttaggtgtggtccccacctcactctcacattcgcctccggggctatttttactcgtgggtgaggctgtgccgcagagattccggccctgtgtcctgtgagaggatggttattgcagtcagaggacttgtgctgggagaccctggcaacaggttaggggtagccttagctgcccaggcctcatcctcactgtcccttcccccacatccttgacaggaaggaagccggagacagagagatgaatcaccctcagcttagggggaggtgtcccttgggccaatgaggtcaccacttgctaattagagggcagcccctctctgtagggccctccacatctctagcgcgaggcccagggccccttgactagactccccacccaaagacaccttggattggaggtgtagagaaccaaaactctggctcccaaaccccacccacctctcctgtcttcagactctactcccttcaggaacccagaaatccaggcttctagcctacaactctggcctcactgaagttccacacccttccctctctaggattcagatcctcccaagttctccaggacctcctccctctacctacctcccacctgtcctcagtgtctggggaaccagaagcctgcctttgcaaaacagtttcccattgatctgccttaggtttgacccaggcccaagggcaaagagcccatagtgaggggacagtgtatgtgtcatgactaggcagaaaacagctggtctgggagtgggaatgcagggactggcctagggatgggtggggtgcatcaggcataaccttgggttggggttacttttcaggctggcagtgatggggccaagattgggaactgcccattctcccagagactgttcatggtactgtggctcaagggagtcaccttcaatgttaccaccgttgacaccaaaaggtaggcctgcttatgttccttgaaacacccctggtgtacacatgtgtgcaaacacacacccacccgagtccttctgtcatgaacatttttgccctccccctggagtccctttcttatcccacgtcctccattccccctttctggttcttcctgacccccatttccagtcctgattcctgatcctttctccaggcggaccgagacagtgcagaagctgtgcccaggggggcagctcccattcctgctgtatggcactgaagtgcacacagacaccaacaagattgaggaatttctggaggcagtgctgtgccctcccaggtataggggcactcagaaagtggagaggtggagcagggagattctgggaaacagacagtttgcagaaatggaaaacagagatggtggtggggctggggcaggagagctagctgaggttcctcccaggaagacatcttacctcatttttcccattggctttcaggtaccccaagctggcagctctgaaccctgagtccaacacagctgggctggacatatttgccaaattttctgcctacatcaagaattcaaacccagcactcaatgacagtgagtcttgtgggtcagaggcctgggtcctgggaggaatagagaggacccagcgggtaggagacattaggggcacctggacgttcagatatcagggagatgaagcagatgttcgtaaatttcccccagcttcccatttttgctttacctctatatttccctgcattttcattggccaagacttttaagcttttctcatttgttccctagcctcttctgccccactgaggacgttagttggctgctggcctgttttctggcagaatagggtcatgcttaagaacagtcatcactctagatccagactacctgagtacaaatccaactagccgtataattttgagcaatcatttcacctctctgtaagtccatttccagatccacaaaattaggatgacaatacctatttcatgggttgatataaatttttttttttctttttttttgagatggagtctcgttctgtcgcccaggctggagtgcagtggtgcaatcagctcactgcaacctctgcctgccgggttcaagcaattctcctgcctcagcctcctgagtagctgggattacagacgtgcatcaccacgcccagctaatttttgtatttttagtagagacagggtttcaccatgttggccaggctggtcttgaactcccgacctcaggtgatccacctgcctcggcctccaaaagtgctgggattacaggagtgagccactgcacccggcgatataaatgagtttgtaaaatgtaaagtgttcactttgggaggccgaggctagcgcaccacctgaggttaggagttggagaccagcctggccaacatgactggtctctactgaaaaaaatacaaaaattagccagttgtggtggcaggcacctgtaatcccagctactcaggaggctgaggcaggagaatcatttgaatctaggaggcagaggttgcagtgagccgggatcatgccactgcactccagcctgggcaacggagcaagactccgtctaacataaaataaaatgtaaagtgcttagaataacacatagaaaagtaactacatgagtgttagctattattattttggactcaccattagtatccacccccaacgggccttttcggactatgtcaatcttttcctgaagttctaatcagttccctctcttgcacagatctggagaagggactcctgaaagccctgaaggttttagacaattacttaacatcccccctcccagaagaagtggatgaaaccagtgctgaagatgaaggtgtctctcagaggaagtttttggatggcaacgagctcaccctggctgactgcaacctgttgccaaagttacacatagtacaggtgtgtggttattgcgggaggagaggatgaccactggagtggccctttaaggagctcccacatgggcttcccctgacaaccactctaaagacgatttctttcttagggtggttttcataaattgctaccaatggcagaccccaccccagtcctttgcagcagtcattgctaacaagaccactgcttgagataattatattccatgatgtaagtcatgggtgcaaacagactagcaaagaggaatacatcccagtattacttttgaagaatgctcttcctgtctcggtatcactgccaaattcccagattagacagagcaggcttttcctaaagtcaaagctttaactttctttataacttcagtcttcacttcctcttgtggaagatcaaaactgctggttcccatgtttttgtcatagtctcaaagctatggtttagtttgtgcaacatgggcctgacatcagtctgccacacaactatgtagtgaacatctgtgtactaagcattgaaagatacacaagtgtatggtgactgggccttgctctcaaagggttgaaatctgagacaataaaatattcacatgaaagttaagaatatatgatgaaaagtcagatgggccgggcgtggtggctcacgcctataatcccaacactttgggcggccaaggctggtggaccacctgaggttaggagttcgagaccagcctggccaacatggtgaaaccccatctctactaaaattacaaaaattagccgcacatggtggtgggcacctgtaatcacagctatttgggaggctgaggcaggagaatcacttgaacccgggaggcggaggttgcagtgagccaagatcgcgccattgcactccagcctgggtgacagcaagactccatctcaaaaaaaaaaaagtctgatgaaaaatatagagacaaaagtcacctgtgtcagtgcctgaagtggtatagggggaaaaagtcactgtggaaattcaagaggagaattttataagtaaattatatctcaagttttaaaaactcaggaaaaatggctggttattaaaagccaggatttcagtaagtgagaaggaaggctaacgacagtacaagacagtgaggagttgagctggttttatcatgtcggcctggggagaagggaaagccaaggtggcttccctgggtctaacatgttggtccctctcctctccccatcctcaggtggtgtgtaagaagtaccggggattcaccatccccgaggccttccggggagtgcatcggtacttgagcaatgcctacgcccgggaagaattcgcttccacctgtccagatgatgaggagatcgagctcgcctatgagcaagtggcaaaggccctcaaataagcccctcctgggactccctcaaccccctccattttctccacaaaggccctggtggtttccacattgctacccaatggacacactccaaaatggccagtgggcagggaatcctggagcacttgttccgggatggtgtggtggaagaggggatgagggaaagaaatggggggcctgggtcagatttttattgtggggtgggatgagtaggacaacatatttcagtaataaaatacagaataaaaatcaagtgtttttacgcaatgggggtttaaagtgtgggcgacatggaatgaggggtgggtcagtgatcttgagctcagggcagaagccaggaattaagaagggaaatgtttgtggtggggctgctatgtttcgtgccggtccgccggtccgccgttgcgctgttctgaggtctacgaagcgtttgcagccccgtcgccagggccggccagatctgggtgggcctgggcagcgctcgctgggcggtgccgatttctggcaaggggggcgcagtctggatgtaatgggcgcggcttagcagggcggaatgggcgtggcccgaagaagccccgccccgtcccgcttagacaatgccccggagccgccagaccgtcgcgcccctgccccatcgtagtatatgagctcgcctacacaaggacccccgctaaaagccagagctcccagtccccgaggcttgaagacggggactcccttctccaccaactctgtcctcggggggtggggccccagccgagatcacagcgcgacaggagtgggggtggccgctggaggtgagtcttgcgtggggggccctgaaccgtgtgggggccggagtttgggggtgccgggcccatgcctgcaccagacagagagtatggggagccggtatttgggcgcggagctaggcggggtggactttgggacatagacggggaaccgggtcctggagccgggagtagtgccagcgccccggaaccacgccccctgttaccccgcccctcgcatttcgttttagacctctcccagtccttcgggactcggtctggtttatactaggtcgtgctaggggcagcgtgaccagccagggcggagagaggatgcttaactccttaggctcgaactcctcccttcctacccacctctctcccttctcgttcgggtattcaggacttccattccccagcccctgcctctccagctttctccttctgtcccataacccctgcgggtcccgggctggacttccagtccctgcggtagcgagcagctgagggttaagggggcggggctgctgcatttttggggagtgagcgcatcctagtggctgccaagaggggcgcccgacagggacctcacaagcccccaagcaggggcaacaggtgttttggagattagagaccctagccttgttcctcaggctcctcttaaagaatctgacccctgagggtgctgggtagagtgaggtcgacaggagcggaaggtctggagtgggtggggcggagtgggagggacgcctagagatggcaggaggaagacctgggcgctcttaaccacccccaacgcccttgtctgcatgtctttttctctgtctcctccttttctgtttcttctcccagacaggtgaagaaacaagaaaactaagaaatccgagcggttggagggggagtctgtgtggatgggatggggacgccgggggaggggctgggccgctgctcccatgccctgatccggggagtcccagagagcctggcgtcgggggaaggtgcgggggctggccttcccgctctggatctggccaaagctcaaagggagcacggggtgctgggaggtaaactgaggcaacgactggggctacagctgctagaactgccacctgaggagtcattgccgctgggaccgctgcttggcgacacggccgtgatccaaggggacacggccctaatcacgcggccctggagccccgctcgtaggccagaggtgagcgccgtggcgcgggtgtggtatggggaaaggcagaaggaactggatgtcggggctttggggaagaattgaggatgggggtgtcacagctccgtgccctcttctcctatcctaaggtcgatggagtccgcaaagccctgcaagacctggggctccgaattgtggaaataggagacgagaacgcgacgctggatggcactgacgttctcttcaccggtgaggctggggggaggcataggtcttggcacagggaagtagagtttgggagactcggccgtctggagccttgtttctaactcactcccgccctcaaacctccgcggcctcccggactcaggccgggagtttttcgtaggcctctccaaatggaccaatcaccgaggagctgagatcgtggcggacacgttccgggtgcggagcgggaccagcctagggagggagggggtgcaggtgggggtcggaagggcctgggcgcccgctgaggaaatgagaggcagagagcagcctatgtttgaagataccccatcacccctcccgcgcccctgaatacctcccttcgctctccctaggacttcgccgtctccactgtgccagtctcgggtccctcccacctgcgcggtctctgcggcatggggggacctcgcactgttgtggcaggcagcagcgacgctgcccaaaaggctgtccgggtgaggagggggcggggccaacgaaagtgggcgcagttctgggcccgggaggccgggagctgggaggcttaggaaattagccctaacccctgccctcaatgggctgtccatcttacatgaaagaacacaggagaaaataagaagttacaacagcaggactgggaacaggggtgattaatttgctcttccggagtttcaggaaaccccaaaggtggcacctaaactgtgactctaaggatgggtaggacagataggaggggctggggaaggtagggggttgaaaataactgcatgtgattccaaggtggaaattagcaaaggtaactaaagtacttagtgtctgacatatcgtaagctctatgtgcttgctgtcattattttccacaaatgtcagtccgtccccagcccttagtggtggttgagcaggcagacacagctgtggagaggttctgagactcgaacacttcctctttcctctaggcaatggcagtgctgacagatcacccatatgcctccctgaccctcccagatgacgcagctgctgactgtctctttcttcgtcctgggttgcctggtgtgccccctttcctcctgcaccgtggaggtggggatctgcccaacagccaggaggtgagagagggcaggaactccaacaccaagcaccatcagagaaaagagtttcaggctttcctagtgggaggaaggaagggtaccttctctagaagcctgggtggggccactctgagctggctggaagagtggcctggctcagcctgaggtctcactcccctctccccactccatgtcttccctgtgcaggcactgcagaagctctctgatgtcaccctggtacctgtgtcctgctcagaactggagaaggctggcgccgggctcagctccctctgcttggtgctcagcacacgcccccacagctgagggcctggccttggggtactgctggccaggggtaggatagtataggaagtagaaggggaaggagggttagatagagaatgctgaataggcagtagttgggagagagcctcaatattgggggaggggagagtgtagggaaaaggatccactgggtgaatcctccctctcagaaccaataaaatagaattgaccttttagactgggctgtgactggtgtcttactggggcaaagggatagggcagggctgaaacctgagtttggggtcagtgcagggaagaaggcctcttattcaaaaatcttgttaggtacttatcaactcattgcccaaccatgtcataggtacttgagcacaagatgaacaagacagaatttctatcatgggaagtgtgtccagggcagagaaaagagtgtatgggtggattgctcactgaatttatctaaatgttagatgattcagagactggtagattaccagtccacccctatttgataaagaaaaagaaatgacacttccagggacattcattttcattcattcatttaatgaggcttagcaatgatatcaaaagggtcagtctcctgacgttggggagctcacagtacatgcaaatttcttacaaattgaaatacaggttgtcatggaacaatttacagaaggctgtttctatgagggaaataaagggggtgtgccctagggcatcaaagtatatgcaaggggtggccaaggagggtcaccttcccagaaaaggccatacttgaactaaggataaataagaattagccaggcagatagtgtgaaggagggaaaggggtaatacaggaagaaggaattgcactgggcaaagacattttggggctagggagaattctctaaggctggcattttctaagatgtgcatgtggaatgacacaggtaagcctggagagtggacaaagtgctgtagtaccttgtatccaaagccaaggcacgtgggcacagagctgaagctaaggagagtacttcagttctgtaataagggctgtcaggagcagttatctcttgagtaggatctctctgacttcagggaggaaagcaagggtaggaggatgaggtggggctatgggtaatccaggaaggaagtgagcagagtacattcacgtggcagcgctgggcatggaatacagtgtgggtttgacagtgatgttaagatagaaagactggacttcatggctcattgtgtgggagtaagagagaaaggaggtctgcgtgactcccagtttctgggttgggcaactgggttgttaaagagaatacagaggagaattaagtgagcagcttcagagatgacaatgagttgggtttgacattcagagtgcgaaatgcctgaggtcagtcaggcagaatgtctaagtggaagtttgttaatcccaaatctgagatctgagccagagagagttctgagtgtcatttgcagaggagggggctgaggactgactgttgatgagagtgtcccagaagaagagaaagggacaaacctagaatggtgggaaatactgtagggatatggagcaaggaagaggagtccaaaaagaaaacaccagcaacaaagaaaaacagcttaaagaatcaggccgggcgcggtggctcacacctgtaatcctagcactttgggaggccggggcgggtggatcacgaggttagcagatcaagaccatcctggctaacacagtgaaaccccgtctctactaaaaatacaaaaaattagctgggcgtggtggcgggcgcctgtagtcccagctactcaggagcctgaggcaggagaatggtgtgaacccggcaggcggagcttgcagtgagggagatggtgtcactgcactccagcctgggcaacagagcgagactccgtctcaaaaaaaaaaaaaaaaggagctagggcttgattgggtatagagaggacactggtggtgagggagacatggaggttataggagagatgggagtaagtttagaagtaagaccagtggcagagacagcctggaacccaggtctcccaactcccagtctagcacttatttctataccatggtgccttcctcttccaggtgaggaaccaaggaggggagagggattatggggagctgggatcccctagcttgggaggtttggagtaagggcttcccttcaaactacaactgcatagatggtggaggcatcagcagggtccgctgtggacagccggcggggcctgctgagggctagatggtccagatccgcatagagcaggctctggaggaggaaggggaggaagacaagatggtctccacagtcttccttggggttcaggcctttttttttttggtccattttcctcagagattctggctatccccttcccatccccatgcccttaccggttcctggtccaggtcccctggaatcttgggctcttcctcctttactggcctctggggctcggttttcacaagtggagctatgtgggggggacagagctgaaggatggagagaaggtgaccaacgtgtctgctcccagcaagggctcagactcaggaattgaggggtggggagtgggcatgtaggagaaagaaaatggggtggaattagtctcaccaaatctagggagtggtcgaatcggttgcgggggcaggcgcctgtaagggacatatgagtctttgagaaccaccagtcttgtctcactggttctcctgggactcgccacgccaaggacagcccagcaacttgaaggctcagaccggaaacaacttagactctaccccaccgacagtccagcccaggctctaactctgctgcacttccagctcatctgctctggtggggctctactcaccagccagcggcctcgctcccacctttgacctctcccattcttcgccaagccaggaccagagctctaggtctagctctttcttttgcgaaggttctggtcctgccccttccacctctggtcactccccatttaacgaggccgggtccctcctgctcacctgtgcagccaccagaccaggcccaaagctcccagtccgagcaccaacccagcgcccagcagcgggatcaggagctggggatacacggaccctgggggaaaggcgtggcggggagggatgctgaggtcaggggtttgacgagggacagccagcagtcccgctcaagaacccccagccaaggccctcttccctcctccgggtatgtgtcggagttaagtacccttgtgcgcacaggcctgcacctaccatgggtaggcccgggggccttgcaataggtcctgtcccccagcacgtgaagcactgtacggctctcgtcctcgtggcggcccttgcagaaaaaagtgcccgagtctcccgcgctcaagaggagctccagccgccggataccagagtccagggagcgtaggcggccgacgaaaggctggaggggaggcacggtgggggtcccgctcgaagaggcccacaggatcggtcggcgtcctttggacaggcccttgcaggccgggaagctgggtgcccagacccagcggatgggatgagagactcctccgcaggagagattcacccggtccccagggcggccgtccagagaagctaggagaggccggaggctgtggttagggcacgtccacagggcaagacgaccctccatcccgtctcctctttctcttctctgttctgcactccagccatcctggatcttcccacacacaacccaccctactaggcggcccttatcttgcttcagcccctctgcgtctatcacaactctcccagggatcgcttacccccagggttcccttgggccctcgagagcagcagcggtagcagctgcagaaacacagccatggttaggatgtggtgaggagaagctgcgagcgaatcagcggcgtggggccggttggggggggaccggagggaagttaggcgtggggagaacggaggggctggggggctccgataagagagggggcggggccaccagctgcccagatccctttgggaatcctcgcaggcaaactcggagtcttcaaatggttctcacttaaaatgtgtgctcgggccatttacacaaatgctttggcctgcttaacttttcaggtgcgcctgtaatcccagctacttaggaggctgaggagggaggatcgcttgagctcaggaggtcgaggttgcagtgaactgtgatcaggccattgcactccagcctgggcgacagagccagccagaccctgtctcaaaaacaacaacaacaaaaactcctgttttgtaggggattgtgataacgaaataaagtaatacatgtaaactgcttagaatacataggatcactatgtaagtgcttgccattattattactatttctattctttttttttttttttttttttgagtcagagtcttgctctgtggccaggctggagtgcaatctcgactcactgcagcctccggctcctggattcaagtgagtctcctgtctcagcctcctgagtagctggaactacaggtgcatgccaccacacctaatttttgtattttcagtagagatggggtttcaccatgttggccaggatggtctcgatctcttgaccttgtgatccacccacctcggcctcccaaagtgctgagattacaggtgtgagccaccacacccggcctactatttctattcttattttagcttctacctcacctctctgtgcccatgctgttcctcctggcttggtaccctgcccaagttggcaggttttgactggggaggtgctttggagcaggtgcacacagccacacctaggacaattgctgctgctggactggagcaacaaggccacaccaagcgcaagtggagcacgggtgacatcctgagaaccttcatgggagcctgaggcagccctacttagcagacctgtggtggctctcctggatgagtagccccagcccctgcctctgctgctgtggcatcacagaagccatcagtgagtcacttattgctgagcaggtattggaaagaccgagtgggggctgaatggagattaatttgacccattcctcccccaatttccaccagcatgcccctatcaatgcccagcagggacccagggacccaaattcagcaattaatttgggccacatccttttgtccattttccaggaaccagcagaagctgccaccatggacactgtaaatcacagaggcctttgatgatgctcattcagaggactgagcagcaggactcttagctggggaccaggaagggcatcttggcctgaaaccaagaaccacaatggcattggccactagtggcacctgccttcccccatccctctctcccatccctactccccactcagtcctgctcagtgccttcccaccccttgtcttttctctggtcagctgcgtagtaagtgagaagggaggggctaccagaggcagggaagggaggagcctttgggtttataaattccaaaaaggccactcaactcctagagctggatccttgaaaatctactctatcagctgctgtggttgccaccattctcaggaccctcgccatgaaagcccttatgctgctcaccctgtctgttctgctctgctgggtctcaggtgagcacctgggggccccaaagacctggtttgcctggtcaggacctttacaccctgctctacccacttcccggccctacccaccactcgggatcccaacacccccagccccaactggctcagctctcctgtgccaccaagaccaggcttccctatgacagcctccttgctctatttctcaaaaagccaggtctccatccatcctccccacctccaagaaagacccatttctctcacctgccagggctctgggtcccctgttccccactccaaggtgtctcctccttggaaactctggtatccagttccccaaccagccccacttcaatatgcaactctccagagtctagcttacctgccttctcctctatctgctgtgctcagtaaggtgtcctctcgaagacctaggcatccagccccaggctccttttgtaacctaccctccccatctactccatcagggactcacatgttcagtctctcagccatggcctttcctagataccccctactcccctcctgggttgcatacctcctcccatacaggggatacaaactttctagatggttgcagtgacatctaagagcctccatggaaacagagcgttttcttgagccttctgaagaggggacaactgggccacttacctccagggtgaagtggatttcactgaggtacacttaccaggctcttccaccctcggaccctgcgtcaccaaatcttgcctgcccaaaccttgaattaactgaagcaggaaacttggggtgccaccttctgtatccaccctctccattttgataaggtgctaagatggaatctggtgatctgtctctcaggtatcattcctttctgctgaagagctactggggtgagaggattctattcaggtctggttcctcttgccacactcttgccagctccaggaggtgaagagtaaattgtaaattgctaaagctggccacagatggctttctcgccagcctcaagttccaaggcatttctgacagtgttgtaaccctcatgattttcatttttattatttctccttctttcaagtttccatctcctccttcaccatccacattctttccccatggtatcttcctcacattccatctatctccagccccatgtttttcttcatagttctgtccctcttgactcacctccaaacggggtggagtgacggaagatatgtagggcatgggcctttcacaaagcaacagctctacccttacctgccgcccactttccattttccctgcatcactcacctgctctgtgcttgctagaccaaacagccaaacaggttggagcacctacgggatgggctcttctccaccctccacccctgcccccagctcagcttatccccaggtaagtcagagaccccatcacctcagcctgacttgtgtcttcccagctgacattcgctgtcactcctgctacaaggtccctgtgctgggctgtgtggaccggcagtcctgccgcctggagccaggacagcaatgcctgacaacacatgcataccttggtaacatccccttccttagtggggtgaacagggaggtgggagcctctatgaccaggactgaggcccaaatgggtctaagactgagatggagaagcagaggattatagcaatgataatatttggccaaagatggttgtgtgccaggcaacatcctatgtctttgcatgcctttttttcaattaatgttcatgacaaccctgtgatgtgggtgctattattatactgagaaaacggcctcaaaaagagacagtaacacagccgggcatggtggctcatgcctgtaatcccagcactttgggaggccaaggtggttggatcacttgaggtcaggagttcaagaccagcctggccaacatggtgaaaccccatttctactaaatatacaaaaattagccaggcatggtagtgggcgcctgtaatcccagctactcgggaggctgaggcaggagaatcgcttgaacctgggaggcggaggttgcagtgagctgagatggcaccactgcactccagcctgggcgagagtgagactctgtcttggaaaaaacaaaaaaacaaaaaacagagacagtaacaggtccatggccagcaagtgatagaaccaggactgggggagtggtgggtaaggatgtgcagaaggaagatcagactaagaaaagagaaggggagggccagggacagagttgggaaggaaggaagcctaggtgggtggatggggtggggaggtggacacaggcatgccaggtgcccatcctggccgattccctgcccattcccacccctaggtaagatgtgggttttctccaatctgcgctgtggcacaccagaagagccctgtcaggaggccttcaaccaaaccaaccgtaagctgggtctgacatataacaccacctgctgcaacaaggacaactgcaacagcgcaggaccccggcccactccagccctgggccttgtcttccttacctccttggctggccttggcctctggctgctgcactgagactcattccattggctgcccctcctcccacctgccttggcctgagcctctctccctgtgtctctgtatcccctggctttacagaatcgtctctccctagctcccatttctttaattaaacactgttccgagtggtctcctcatccatccttcccacctcacacccttcactctcctttttctgggtcccttcccacttccttccaggacctccattggctcctagaagggctccccactttgcttcctatactctgctgtcccctacttgaggagggattgggatctgggcctgaaatggggcttctgtgttgtccccagtgaaggctcccacaaggacctgatgacctcactgtacagagctgactccccaaatccaggctcccatatgtaccccatcccccatactcacctctttccattttgagtaataaatgtctgagtctgataaaatgtacatttattataagaagacctaagggtcaggtcacctcccaggaaataatactctcaatctccctcccttacacaggaatccttcagggaggttccctgggaggctgggctggggaaaatggagaaacaggtttttcaggtcttcatcctcccttccagtgtctccaggtggcacacaacaactcatatcctaaatttaggccacacccctgatgtattgccaagaagaaggtgcggcctggcttgagggctctccagaaaggataggagaggtacatggagatggggcctgagaccctgtttcttcagtttctctcaggttagagtcaaaggcctcacctagcctagttagtaagtagggcatcaagcagtttttacctatcacagtttttacatttcttttctcaattcaaaatagtcctattgggagccaacttgcaaatgggaaataggggagcaaacccagactcatgctcacaaaaccctggcaaccccactcaatgaatctcattgctaaggaagattcaacccagcaacaggatccaggagccacagaaggcagataagccattgccctttggggtttagttggttaaggagtgcaccactgtaattaagcccgctgttgcttggtaacccccaaactagaacctggatgccccatattacgcttttagccctcccatcaaccaaagatagatgtaattttccagtcagctgtagagtggttcatagattttaatgactcacagaaggatgtttgtcttctcacattagatgttcagatgtcccttgttcccttgctcccttgttcccttctctactcctactccccctatccgctccacagtcctggcaagagacaggtcagggcggtagctgctgcagccaaaatgcctgcaggggccacatggcttgccacggcgctgttgcacaggtctcccaggtagcagtccctgtgggctggataagtcacgtctcccaccgactctgtctccacttgattgcaatgatgggctgcgacgcaggctggatgttggtgaatcaaggtcactggggctgagagagagaatgaaactggggtgttggactcctggcttcaggacttgccttctggggcagagcagatgtgatttcaaggagcccaaagggattttcagccccctcaaaaaacacctccctgaaaccaagtgatcaaagttaatgcattgaccttgtaaactcctgatgtgatgcagcaagaaggatgcaacatcacttctgcagtattcttgcttaaaatgcatgacctcaatctcatcatggcaaatatcagataaataaatatcgagggacattctataaaataatttttagtatttcaagtatctgtaattttttttttttttttgagacggagtttcactcttattgcccagctggagtgcaatggtgtgatctcggctcaccgcgacctccacctcttgggttcaagcaattctcctgcctcaggttcccgagtagctggtattacaggcgggcaccactacacccggctaattttgtatttttagtagagacgagatttctccacattgatcaggctggtcttgaactcccgacctcaggttatccacccgccttggcctcccaaagtgctgggattacaggcgtgagccactgcatccggcacgtaatttttgtttaatctaaaaatgattttatttaattttagagaaaagatcttgctctctcactcaggctggagtgtggtggtgcaatcatacctccctatagcctcaaactcctgggctcaagtaatcctcctgcctcagcctctcaggaaactgagattacaggtgtgtgccactatgcctggctaattttttaaaaacattttttgtagagatgggggtctcactttgctgcccaggctggtgtcaaactcctgacctcaggtgactcttcagccttggcctcccaaagtgctgggattacaagtgtgtgccaccaagcctagcctaaaaattattattattattatttttgagacagggtctcattttgttccccaggctggagtgtagtggcgtgatcatggctcattgtagcttcaatctcccaggctcaagcgatcctccctcttcagccccctgagtagctaggactacaagcatgtgccaccacacccaactaattttttaatctgtttgtttgtttgtttgtttgttttttgtagagacagggtctccctatgttgcccaggctggtctcaactcttgggctcaagtggtcctcccaccttggcctcctaaagtgctgggattacaggtgcgagtgactgcactggccctaaaagtaattttttaaactccaggtataaaataatttatcagggctcttcaaatgtgtcagggtcatgaaagacaaagaaaaacagaactggcacagatcagaggagactaagaagacatgagagctaaatgcaatgtaggatcttgctaaatcaaataaagtctgtagattagttagtagtattgtatcagttattttgtgattttgataattgtgctatggttatgtaagatgttagcattaggagaagttgagtatttctgcaacttttctgtcaatccaaaattatgttaaaataaaatattaaaaacatgtacacacacacacacacacacacacacacacacacacccctccctggtccttaactaatgccgaaaatttgaagtttggttttaactttggcctttcagggccagagctcttcatttgtgagctaatgggcctatgagattcttttaggagaataaggaggtggggaagtgggggcacaaggactgtgggcctctcaggggctccgtgccaggagccagaaggggtacagactgctctcctctaacagctgcaccatctgcccagagccagactgagcctggagggttctggaagccagaaggattgacatggggctggaggcagggaaaggctgctggaagagggagaaactgaggactcacggtttccaggtagcttgatctgttccaggcctggctggggtctgccctcgccacaggtggtcacggcctctttgcaagaactgctggggcttccaccacagttgtagcaccgcattcggtttcctggcaggagaaaagaggcgctggacctgggccctcggtggagccggctggcagaaggcctgtgtgagaagctagctggccgcctccttacccaaggcagcccctagcagggagctgagcaagatcccaacaaactggggtttcatcgcagtctgcccgtgtcaggaccgcctctacctcctgcccacccccctccccagcccggctctgcctgccttatatcccccgtgccttgagctttatagggctataaaaaaggaagaaagagtctcccccagcaggcaccaagggccccagtggggacagggaggggccccacagcatgctctcagcatcctctggagtcctcaaactcctttatcctcagcagcagtctgtggaccaacaagaacccctgaggatccctgataccctttcacagggtccttgagggtcctccttttgcaactatctgtgtaaggtcagattttcttcatatactggacttcaacgaaaacaacatatcccaacagactgaatgcagaagcagataggaaaacccaggcatctcccacgaagcctgacactagattcacaaaaatgtaaagcaatgctcagcttctcactgtgctgtggagaaataatagttatttttcacaaaactgtattttgttagcatgtaatactttattatttttattgtttaaataaatcaataaatacctactttaaattttctgttttaatttttaatgtagtaaatattgatataacctcataaagaaaagctcttcagagtcttaagtaactttgaaaagtgtaaagaggtcctgagatcaatatttttgaaaagagctgctctcctgggcacctgtgtctcccctatcttcactccctgttcctagtcttactcctcctggtacatgctggctctgattccccagatgggccttcctccttcccagtctcttcaaccccagccttccaggctgtatcaccacccccctaccccaaatcccatccatgccttcctttctagtgatttctccccagtgcaagcacatcagcaggccctccagccccacccgtggttatttctttcctccaaggtagtaaagctggcagggataattacagggtaggaatgttgaagcttggggggatcaaagggatctgaagctgggtggggtccgcccttacacagctgggctttgtgtgtgcatgtgggtgtgtgggtgggggtattgttgattctacactcaaacagatccacgccggggctgtttaggagggtgactttgagagacatgaaagcactgagggggaaagacagagaaaacaaagacagagagaagctgagagagccagggagcagcttgagacatggggagggagggggaggagtaggagggaaggcgacagacacaactcaggagcaggagaggaagctaagttacagagacaacatgctgagagagcagaggagaccctccaggcaagggcagactccttgcaggggcaggctgggggcccccgctgcctgctgggtcaggctggtgaatctggtcatggttccgccccccagattcactccctaggtgtgtttgtttactggttcctcactgtcttgctcaaatgctccaactctacaaatcccgggatctcggggtgcagatcacctctcccagattcctgagcctgtgtctggccatgggcacctccagcatcttcctctgcgtgctgttcctctgtggggcactgggtaagggtgggctggggaaccttcagtggtcagggggctgggggtggggacaagggcatgtggaggaacctgagggctggggaggagaggggtgtgggtgctggaagaggccaagaagagagctgggggagtgggggacttcagggagaccagccactgggaaggccagcctgatgaggtgggaaaggaagagtttcctttcaaggcatttgagaataactgtctcccccttgctgcatctttgatccgcccctgtctcccctatcccttatttcacgtgttgcttctgtgctgggccctttggtcaatgtcaatttctattttcctatctgtctctggtgccatttacttaactttttcactgaccccctcaactttcctgctgctgggtctggctttttgtctcactctttttatgttggtctctgattcttgtggcttctgttcatgtctgcgcatctctcaatccctgtacccctcttgcctccatctctgtttcttttcctgcatcgtctccctctttttttttgagacagagtctcgttctgtcacccaggctggagtgcagtggcatgatctcggctcactgcaacctcagccacccagattcaagagattctcctgcctcagcctcccaagtagctgggactagaggcatgtgccaccatgcccggctaattttttgtatttttagtagagacggggtttcactgtgttagccaggatggtctcaatcttctgacctcatgatcagcccgcctcggcctcccaacgtgctgggattacaggcgtgagccactgcgcccagctattttttctacttctgtcagctttcctcccttattccacagctttcctctctctgcttcatgtgtcacctctctctgtgatccctctccggatctggcctctgcctgccccacagggagggtttgcctctcctgctctcctaatctctgctgcctcaacaggtctcaccatgtcccctgcccggggaaggctccgctgctacatctgtggcttcaccaaaccctgccaccctgttcccaccgagtgtcgggacgatgaagcttgtggcatcagtattggcacttcaggtaggactctggtccaatggcccttctccaggaggctccctacctccatccatccggcctttcctgtggcccccgcctcagcatgcctctttcatcccacagaccagagtgagatcactgagtgaaaaagctgcctctcaagggcccagtgccctctgccaggctatgccacctactggctgcactcctacactctgtggcaccactgctgcgagcaggacctgtgcaacatagccgcttccccacagcagctcaccagcctcctcgcctccctgcccctctttgtggccagcttcgctgggagaggacacctcctccactagcttccgtggatctgcagcccccaacccaggataccccccgccatcactgcggccctggaaacacctgcacagacactttgagacatgcccgagaacctaattttgtacagagaccccagatctctcagcagacccctcacagacccctcacaaggcctggggaggcacctgcccagagtccaacctcataaagaacacctattctgcgtcttttgtcttttctagatgcccattgctgatgccccgtgtcagcccaggtcactggcaaggcaggcattttgatgacactgtggatctcaggcaaggggatcaaaggagcatcaggtatggtaaggaggagagtcttgctaggaaagactaatgtggtaggtcgggaactcaggatggagggcttgggggactatgaagagtacctttaataaaaggtctatctaggagtccagtaatactgcagatactgcagtgtgtgtgtgtgtgtgtgtgtgtgtgtgtgtgtgtgtgtctgtgtgtgtgtgctctaagagcaaactgtagctgcttggtgggttgggctggagctggaacctggaccacggcactcccctcattctccatctgtgtcattttcgtcctttttcttgccaatggcttagtttaagcccctgcagcctgaaggctttaggtgagacttctgagaaagcttttttccagtaaggcccaagcttgagcagagacacaaaagggcacccagtggagctgcttgtgagggtgtggctggagctcagctcatttctgcctgagactagggaatggccaagttgggagcatcaataccctccctcgcttcaccagcccagactcgcccatggttcacagacatcccagcatggccccggcccaataaataacatacccccactgggcctgccagcctgagtagacactccctctgcccccgagaaatagggtgtgacctcagggcagcaggaaggaagtgccagagtggcgatagctgctcacatgctctgaatgccccggtaaggcgccacagggaagagtgtgtgcctaggataaggaaggataaggagggggccccgggtgggagctgagcacaggcatctctatcctgactcagttccctccccttgcatgtgaggaagtctggggttgattaaatatgcctgttccctctcttctttgtgaggatgagacatggggtagtgggggtctggcttaatttagagatgggttgaggctttccattttctctgtccctccatcctcccactttgtgcttctatttttctccctctgtccatctctttccactttctctgacttgagtctcttcccttctctctcttcccccgttttccccatttgtccttcagctccactgcaatggattccccaccattgctcaagtctccagattcctgtctcctccctgtgcacacccatcctccttgcccccaccagcaacctcaggctcccctcaaccccacagtactatgggctcagggccatccctccactgctgctacaagacaggagaccaaacctttttgtaggttacatcacagaataatgctcctcctttccttcagtcccccacccctccccatacacagcttggtggctgctggaggccagctggatggtgaagtcgaactctcagtcccgccccccttgctaaggttgtcgaggaatcttccaggtgccagatggccagcgagacagcaggtcacacttcccagcagatgtcaccaaaatcacctgggcttgtgggcaggtgggctgtggggttttccagagagacagattaaggatacctctacttttcacatcctcaggaacgagggcccatccccaacccaacccgtgtttcctctccatccccagtcccctccaggatttaagcctctgttccctagctgttcctcacccaagacgggccaaatggatgttctcatagacctggatttcgggtttgaactgaggaatcgaggcatctggggagaaggagccatcagggatacagaagagaagtcagcagacaacttagagccgtgttcctcgccccctcccctagaggaggtggggtacagaggcagggtgtgagcctagccctttgcctcccacccatgtgccctcttctttccccggggagggagggactcacctctgcctggagccccacggaccctctgcctccagagcacgatgctgagggccaggatgacaactccctggcccattgtgagcagcagcatcagaatccaaggcatgtcccagcccgtggaaggggcacagagggcaggagaagcatcgatggaggctgtagtaagggccagaccagagggatgggagggaggtagtgaggggccctgtccctgtgccccaaagagaggcttcccctccacagtctggtgggctcttccaacagaagactttgtaagcttccctgcccacaatatcctccaccctactctgcccctttccaggcctctcaccctgacccatagagaatggcggccaggcacagtggctcatgcctgtaattccagcacattaggaggccaaggcgagcagaccacttgaggtcaggagttcaagaccagcctggtcaacatgatgaaacctcatctctactgaaagtataaaaattgaggccaggcgcagtggttcacacctgtaatcccagcactttgggaggccgaggtgggtggatcacctgaggtcaggaggtcgagaccagcctgaccaacatggtgaaaccccatctctactaaaaacacaaaaaagaggccgggcgctgtggctcacacctgtaatcccagcactttgggagaccaaggcgggcagatcacgaggtcaggagattgagactatcctggccaacatggtgaaaccccggctccactaaaaatacaaaaattagctggacgtggtggcatatgcctgtaatcctagctactcgagaggctgaggcaggagaatcacttgaaccagggagtcagaggttgcagtgagccgggattgcgccactgcactccagcctggcgacagagagagactctgtctcaaaaaaaaaacaaaaaaacacacacacacacacacaaaagttagccaggcgtggtggcaggcacctgtagtccagctactcaggaggctgagatgggagaatagcttgaacccaagaggcagaggttgcagtgagccaagatcgtgccactgcattccagcctggccaacagaacaagtctccatcccaaaaaaaaaaaaaaaaaaaaaaaaaaaggccaggcgtggtggctcacacctataatcctaacactttgggagactgaggcaggcagatcatgaggtcaagagatcaaggccatcctggccaacatggtgaaaccccgtctctactaaaaatacaattttttttttgagatagagcttcgctcttgttgcccaggctggagtgcaatggcgtgatcttggctcactgcgccctccacctcccaggttcaagtgattctcctgcctcagcctcccgagtagctggggttagaggcatgtgccaccatacccggctaattttgtatttttagtagagacagaatttctccatgttagtcaggctggtcttgaactcccaacctcaagtgatccgcctgcttcggcctcccaaagtgctgggattacaggattgagctaccatgcctggcctaataataataaaataaaataaaataaaataaaaagtagagaatggcaatgccccctgctcacgcatgggcaaccaactacagagcagaccaccagccataaccacactttcccctcacaccctttatagtaattcaccctttctttcaagaaaaaatagccagatgtgatggctcatgcctgtaaccccagcactttgggagaccaagataggaggatcatttgaggccagtagtttgagaccagactgggcaacatagcaagatcctgtctctacaaaaaatttaaaggtgcggtggctcatgcctataatcccagcactttgggagactgaggcaggcagatcactagaagtcaggaggttgataccagcctggccaaaatggtgaaatctcgtctctactaaaagtacaaaaaattatccaggcatggtggcgggcgcctgtaattccagctacttgggaggctgaagtgaaagaacatccctttccgtctccttcctcagtttacctgccaggctaaagctgacccctttgttgtgagtcatgaggcagcggatgattcttggtcttcggctcctgggctcagaaagcccctccccaggacacaccaagagcagggcagcctcactgccccagaaggactgaacacggcccctcacgggacccttcccttcctgccaggtcacagagtccatgcgtctgctggggaccacagagcacaggaggacattgcagggggatccatctgcagcccttgcagataactgggatcctgtaggggagagagggattcctcagttcttcacctggacttcctgggccacagtagcccctggtctgcatgcccccactcacctttgagcaccaagacgtcgtacaccctccagttctggtagttgtggtgctgacctagcacagcgcaccagtaccgcccggcatcttcctctttggatccctccaaccacaaagaatagttccccagcagtctgagcctggattcccttcctggttttccagggtctggggctggcctgcccacttggacttgggctaccagggtggtgaaggagcctgctgcagggctgcagaaccatgacaggtgttcgtccccatgtagagtagatggtgagggacatggcagctctactgcctcccccaaggccacatagatggcctgcatgttgtctgtgggaagagggttgtatgaggccagagacctccatcagatcaataaccccccatttgatcttcaaccctggcttccttcccttctggggtcccccagcacaggcctggctggtgaccacatttctcaagtgacagctacaaaaataagacaggtggagagaagagggtaagggctttcctcctctctcccccagccagtgagggggtctgagggcaagagggaaaaggctgaaagttggcaaatgcccacatctcttctactcatttctacttttctggaagcatttactcattcttcttattttataaaggaaactgcataacctggaccctcgttgcctctgggtcttccctagtgtcagaggcaggaggaggttggttggggtaattctatcttcttgagtcagatgccttcgccaggctcctaggagaaagagcagtagtccctccccaaccttgcaaatagctaaggaatcccgtacctcttgccccttacctgcagcctggggagttccacataggaacaggaggaggaataagactgccatggggagagcctgccaagttctcttgctccaagacctggtgtccccagggaggaagcagagtccagataaaggcccacactcgctggtctggagtgacaaggggctctggaggggatgggaatgctggggcgataaagcccagcagcatgtctactagggataaagtgaccaccacttttctatcctggagagaaaaggacccagcccaggccactctgaagatgacctttttgctcttctgattccacatcagctaaggggctcaaataaagactttccatgcaaaaaaccatgcagagaagtggtcctgcctgtctagctcttgtcagtctggaagtacattctgaggtctctttcactcctaagaaaggtcagccatgagttgggtggatcacttgaggtcaggagttcgagaccagcgtggccaacatggcgaaaccctgtctctacaaaaaatacaaaaattagccaggcgtggtgacatgtgcctgtaatcccagctacttaggaagctgagaggcaccagaatcgcttgaacccgggaggtggaggttgcagtgagccgagatcgtgctactgcactccagcctgggagacagagcgagacttcatctcaaaaaaaaaaaaaaaaaaaaaaaagaaaaagaaaagaaaagaaaagaaatgtcagctatgagtgaagaaactgagtttgagtttttatgttggtcctccacagaacccagcacaagactgtgtatcgagtcagtgtcccgtaaatgatttggaatgactttccctgtggttgtctggcataccccggacctctcctgaaaccctaataagtgtattaaattattactcagggacaaggctaacgggctgattcatccttctgaacggcaaaaactcctaaggcagatcttcatgcagttattacagttttaatgtgtaatttatttatttttaaaattattttgatgaaatattccatacataccaaaaactatatgaagtacaactatataatggataaatgcttaacagagtagaagactggacagcaatgagaatgaacaaacctagtgatttgcaacaaagttgaatctcacaatataatgagagtaaaagaagcctggccaggcatggtggctcatgtctacaatcctaacacttttggaggccaaggtgggagggttgattgaagccagaagtttgaggttgggcaacagagcaagaccccaactctgaaaataaaggccagacgccgtggctcacgcctgtaatcccagcactttgggaggctgaggcaggcggatcacgaggtcaagagatcgagactatcctggccaacatggtgaaaccctgtctctactaaaaatacaaaaattagctgagtgtggtggtggatgcctgtagtcccagctactcaggaggctgaggcaggagaatcgcttgaactcaggaggcagaggctgcggtgagcagagatcatgccactatactccagcctggtgacagagcgagactccgtctcaaaaaaataaataaataataaataaataaataaataaatagaatattccaggccggactcggttgctcatgcctgtaatcccaccactttgggaggatgagacaggcggatcacctgaggtcaggagttcaagaccagcctgaccaacatggagaaaccccatctctactaaaaataaaaaaattagcagggcatggtggtacatgcctgtaatctcagctacttgggaggctgaggcaggagaatcgcttgaaccccagaggcagaggttgtggtgagccgagatcgggccattgcactccagcctgggcaataagagcgaaactcggtctcgaaaaaaaaaaaagaaaaagaaatagaatattccaggccaggcacagtggctcatgcctgtaatcccagcactctgtgaggccaaagcaggaggttcacttgagcccaggagttcgagaccagcctgggcaacatggtgagaccttgtaaaattagccgagtatggtggtgtgggcctatagtcccagctactcaggaggttgaggcagaaagatggttgagcccagcaggtggaggatcagggcagtgagccgtgattgtgccactgtgctccagcctgggtgaaagagctagaccctgtctcaaaaaaaaaaaaaaaaaaaaaacagaaaaaaagaatattccgtttcagtcagagatcctctatgctgtgtaaccacaattctgaattttctctttcttctccacttgctttatcattaaattttatgtgtttttgaatctaatatactagtatcacgtatacattcttctgtggctttctattttcactcagcatcatggttttaagatccagttcatgcataacagtaatgattcatttattttctttttacaaatattccgcatatcttactgtgctgaattttcgtatccaggaccatggtgtagctttccatttattgaaaagcttttcgtttacctctttctttttttattttttcaattattattgttattattttgaggcagggtctggctctgtcacccaggctggagtgcatggagcgatctcaaactcccgggctcaagcgaccctcccaccttggcctcccaagtagctgggactacaggtgggcaccaccacaccctgctaggtcttttttttttcccccttggtattttgtgtagagatggggtctcactatgttgcctgggctggcttggaactccagggcgcaagcaatcctctctcagccaccccaagtgttggaattacaggcatgagccatggcctggaactcctggacgcaagcaatcatccctcggccacccaaagtgttggaattacaggcgtgagccaccgcgctgggccagtttacctttatttatttatttagagacagagtcttgctctgtcaccaaggctgaagtgcagtgggaagatctcggctcactgcaacctctgcctcccgcgttcaagcgattctcgcgtctcggcctcccgagtagctgggattacaggcgcgcaccacccatgccaggctaatttttgtatttttagtagagatggggtttcaccatgttggccaggctggtctcgaactcctggcctcaagtgatccccccgcctcggcctcccaaagtgctaggactacaggcgtgagccactgcgccgggccgggccagtttgccttttcaataactttttatagttttcttcataaaaccttgcatttcttgtactagatacattcctagacaccttatgttttcggttactcttatcaagtactcctaatctcacccctcgtttccgctgtcgctctagagtctgccaataatgagacagaaaaaaattattgaaccatgcccggtaattttctgattctccgcgttctagtggtcttccactagtttcggaccactgctgtacccgtagctccaactgcgcgaaactcttctcaggaagcactgaaaatgtcgcaactcgcccggaggcggagccggtacgggctgacgtcaagggcacacaacacctcagaggcagggagggcggggccggcagggggacctgctgctggaagagcagcggcccgagccggggccatggcgaagctgctgagctgcgtcctaggcccccggctctacaaaatctaccgggagagggactctgaaagggccccggccagcgtccctgagacgccaacggcagtcactgccccccattccagctcctgggtgagtcgagttcctccccaccgaagaacgtggtacagtccaaaccctttacggccttttgctccccagaagtgcccataatgggaaataaggggagcctgcttgtcaagccagttatccgcaaaatctgcgctctgtgtgcttcctgagttaaagtcacgcctacggactggccgcctcctttctttttcgctctttaccgctttctcattccgactgccactctttgttctttcctctccgcgtccccccgaccctgtgtgtcgtggttcgtgccggtcccagttgagtcttgagtcccgggaagagaccctgcgcggactggggagccgttgaattttgctgtcagactcccagtttcctcttcttcagtgcctcttcatgcctcccccggctctgtttttatcttccctttaccctcgccttgaatttcagaatgacttttacagatcctgtatccgtcggtcctcccctcaacccccgcccaacctagcctggagacccgagtcattgtattctggagagctggcgggtggtggtaggctgttctaaatattctcttcctttttatcagttgtctcattgtgttactgtctcctacaaactgcccgctcctacccacattctcttcttagtcaactactcttatttctgatgcttttctttccttcttagattgtctaggtgtcttttctttcttctcaaactaacccttctccccacatgcacgcgcctgcaatccatttgaaactaggctgtggaaaaggagcaaaaatcgtccaatgctgctttcacttttgcttccaaatccagctccctgtgtttgttcccatggtcaggggtgggaaattaggttcagagtgagggtgaggaagaggagtttctgtgggggccagggatgtttcaagagagatagtcaacgagactagaaccagaggacacacagcagggcttctgaaagggaagggaaaggacctgccagtgggcagggtccttaaggaggccatctgttttggcaggatacgtactatcagccccgtgccctggagaaacatgctgacagcatcctggcactggtatgtctaccctggcatctgggactctgcatctttcagacccacctgtcctcttgaacttagccctccctaacttgggagcaacagtgccctggggttgggggatgccctgggctctgcagcagacctctccaacacagacacacaggcacactctaaatgtgcatacttggcactcccctttggtatgtagcactgctttctctgggggcaacctgagccgtaaggaaaacatgtttactcttgggaccatctgcaggtgctaagtcctgcagttccccagtgacctgtcctccctggcaactaacctctttggctgcagggacagctgttctttctggcacagttcctgtggtgacgtttgcgcatctcttggggaccaggccaggggctgtcctgagcagggccaattgaaaaggcttgattaacttgagtagacagagagactgcctttaaatgtgatggaattatgtctggagatggaagacataattcttccataattccagaggaagaaaatagagcctgtaccaaattttcccagcctccattacattgacacactacttttcaacaaatactgagcacctactgtattcatggtgtcatacaccaaatatgatatgatatccctcaggttgtccatcttgctcagagtgtatagtatatgcctggaatggcaggtgtgtgtgtgtgtgtattgattgcctgtccctgtctctctgctgcaggcttcagtattctggtccatctcttattactcctctcccttcgccttcttctacttgtacaggaaaggtcagtgtggtttcaaaggtggtggggtagcaaatgggcaggttgttggcagatgagccagctccctaaagaggagaggggacctgtgaagatggcttggcttccctcttccatcaggcatcttcttcctcttagggtatggctgttccaaacagggagtgtggggtggaggttggggctgaactgggaagaggagctgagggacattgcggagagggtctcacattgtccctctcccttcccaggttacttgagtttgtccaaagtggtgccgttttctcactatgctgggacattgctgctacttctggcaggtgtggcctgcctccgaggtaggtggagaggaaacctggtttgaatcttatctgtcactgtcactggttaaaaattaagtaccttgtgcaaatacattttagtgatgggcctccgagagggaatcattgagaatggtttaaggcatgatcttttccttaaaagacttgggttataaatatgaaaaaataactgaaaagtaacaaaaaggtttgcttttttttttttaagagatagggtctcaccatgttgtccaggctggtctcaaactcctgaactcaaagtgatcctcccacctcagcctcccgaagtactgggattatagatgtgagccactatgcctggctgcttttatctagaaaagatgcatataccctacaacaattctatatatgtatacatactaggaaaactcctgcacatgtataaacaatatagatgtacaagaatacagcatacaacattgtttgtaataatcctaagctggaaacaactccagtggctacaaatagtaggatggataaaatatgttctgtgtggccgggtgtggtggctcatgcctgtaatcccagcactttgggaggcagaggccagtggatcacgaggtcaggaatttgagaccagcctgaccaacatggtaaaaccccgtctctaccaaaaatacaaaaattagctgggcatggtggcacgtgcctgtaatcccagctacttaggaggctgaggcaggagaatagcttgaacctgggaggcaaaggttgcagtgagacgagattgcgctactgcactccatcctgggcaacagagcaagactccgtctcaaaaaaaaaaaaaagttccatgcaatagccatgcaagagaacactatatagcaatgcaaatgaacaaactgtagctacgctcaacaacgcagatgaagccaggtgcagtggctcatgcctgtaatcctagcagtttggtaggctgaagcaggcagatcaccagaggtcaggagttcaagaccagtctgtccaacatggtgaaaccccgtctctactaaacatacaaaaaaaaattagccaggtatggtggtgagcacctgtaatcccagctattcgggaggctgaggcagtagaattgcttgaatccaagaggcagaggttgcagtgagccaagattgcgctactgtactgcatcctgggcaacagagcaaggctccatctcagaaaaaataaaatacaaaaaattaactgggcatggtggcacatgcctatagtcttaactgcttgggaggctaaggcatgagaactgcttgaacctgggaggcagaggttgcagtgagccaagatagcaccactgcactccagtctgggtgacagagcgagactctgtctccagataaacaaaagcaatgcagatgaatttctcaaatgttgtgttaaatagaagaagctaaccacaaaataatgtatgcagtatgttttcatttatataaaattcaaaagggatgtgcatgtttgaggtagaacaccgaagacaacaagggcatggttttcttttcttttttttttttttttgagacggagtctcgctctgtcccccaggctggagtgcagtggcgcgatctcggctcactgcaagctccgcctcccgggttcacgccattctcctgcttcagcctcccgagtagctgggactacaggcgcccaccaccacacccggctaggtttttttttattttttagtagagatggggtttcaccgtgttagccaggatggtctcaatctcctgacctcgtgatccacccgcctcggcctcccaaagtgctgagattacaggcttgagccaccgcgcccagcaagggcatggttttctcaaaagttaggagagtgattacctggggtgggggagaacagagtgggggagagccctgctgagaggtggctgtgttctctttgttgacctaggtgatagtcacatgaatgtttgctttgtattttttaaactgaatatatgttttatgtacatatgttgtatctcgcaatttaaaaaaataaagaggacagatcacctacccctagtgggtacataagatgacaaccaggtgatgggcgatgcttcaacatgggggtggtggggtcagggctggatggtcgcagttgggtccaggaccttctgcctgaggtgttctgccccctgatctctgcaggactgggctctctcctcagagaggccttccctgaccaccctgtctaaaagtagctcccactgctcagttttgtcttagttttttattttatttatttttaatttagaaaaaatacagaaaaaattagctgtgcatggtggcgggcgcttgtaatcccagctatttgggaggctgtggcaggagaatcacttgaacccgggaggcggaggttgcagtgagccgagagcacatcattgcactcccgcctgggcaacaagagcaaaactctgtctcaaaaaaaagaaaaaagaaaaaatacagaaaagtccagagaacaaaatataaaagcctttttaaattttttgatgtatagttttgtgatttttttttttatatatagttttgtgatatttgctttaaatgctttctgtcaacaaaatactaaagcaccacagttagggttggagttcccattggaatcctttcagtcccatcttcctctttcctcagaagtaataattgtcatttggtgtgggttttttttttttctggcacatacttttatgaaacatatacctcagttcctcaagtctaagctgccatcaattgtaaaatgaattctaatttcagagttttcaagggttaaaaaatatacattttagaatctatgaaatatggtatctataagcagtatgtattattttgcacattttacatttttggcataaatgttgtacaaatcattctgcagcacacatcattctctcatcatatcgttttgggggaataccattgatgacacataaagttctggttcattcttgttgtattttctctgtagcacttatccctctctgaaatgttgtttattgtcttctcctggctgtacctaaccccaaccagaatgccagctctctgagagccaggagctgtgtatctcatttcctgctgagtctcccgtgtgtagtacggtgcctgtctgacacacgacacctgccaagtcagtgaggagagaagttagggtttgaggtggctcagcagtgaaaggagagtggatgcaatcactgactgtgtaagtgaaaagagagaggagagagagtcagcactgagagttgcttctgctttagaaaggaaagcagaaaggaggcaggagaggaactgttcaggaactggaaggagtcaaggatgggcccaggaagcagaggcaggaagaatcttgagggacagggagaatgctgagtagtacagttgaagagaatgaggatagaagagtcaggaattcagtgaggaagtaattatgggcaggagtcggagactctgaagccagatggcaaggggctagaatatacagaaaagaggcagaaagcaaacattggagaagagtggcagtgaaaaatagagaaatttgatattcgcaagggagaatagtattatatgatagtgtttaatagtgtcatttaataggttatatgacagtgtttaaagactgaggaagaggaacattctggaagatggtaggttaaggattgtctataaagacacaaactgcagaagctagggagaagaagcgtcctgtagccagttgctggatttggaggaagggggttggctcacatctatttctccgcatcctatgccctcagttcctttttctttcactttttcttacagggccttcttctagcccatctccaattcttttcctaaaacctaggctttctgcttcccagttttcctagcactgtttcctgtcctttttctaccaggcattggccgctggaccaacccccagtaccggcagttcatcaccatcttggaagcaacacatcggaaccagtcttcagaaaacaaggtgagaggccctaggaaaagtgccacacaggcacccaatagcagctttctcagttgtccctcagagcaccagacactggcttctgcaggaagaggaggtgtgttttaccacccaccacactgggtgtttgcttgcacattgctgtatcccttctcacctccattagtgaactgtccacctgaggaatttttcctccctaccacttctaatggaatattctgctagaacaatcttccccctccctcacctgtaagaactggctaaactagaaacattccacaatgtttcttttttctttttctttttttttttttgagatggagtttcgctcttgttgcccaggctggagtgcaatggcacgatctcggctcactgcactctccacctcccaggttcaagtgattctcctgtctcagcttcctgagtagctaggattacaggcacgcaccacccacaccctctaatttttgtattttttgtggagacggggtttcaccatgttggccaggctggtctccaactcatgacctcaggcgatctgcctgccccagcctcccaaagtgctgggattacaggcgtgagccaccactcctggcctctttttttttttttcttctttgagacagagtctcactcttactcaggctggagtatagtggtacaatctcagtttactacaacctccaactcccgggttcaaacaatgctcatgcctcagcctcctgagtagctggaattacaggtgcacaccaccacgcccagttaattttttttttttttttttgagacggagtctcactctgtcgcccaggctggagtgcagtggcgccatctcagcttactgcaagctcggcctcccgggttcatgccattgtcctgcctcagccccctgagtagctgggactacaggcgcctgccaccacgcccggctaatttttttatttttagtagagacggggtttcaccatgttagccaggatggtcttgatctcctgaccttgtgatccgcctgcctcggcctcccaaagtgctgggattacaggcgtgagccaccgtgcctggccaatttttgtatttttagcagagacagggtttcatcatgttggccaggctagtcttgaactcctgactgcagacgatctgcctgccttggccttccaaagtgctgggattataggtgtgagccactgtgcctggcccacagtgtttctttttttttcttttgagatggagtttcgctcttgttgcccaggctggcgtgcaatggcatgattccagctcactgcaacctccgcctcctgggttcaagcgattctcctgcctcagcctcccaagtagctgggattacaggcatgcgccaccacgcccagctaatattgtatttttagtagagatggggtttagctgtgttggtcaggctggtctcaaactcctgacctcaggtgatccacctgccttggcctcccaaagtgctgggattacaggtgtgagccactgcacccagcccacaatgtttcttagaaggtagttttctctgtatcacagcagctcagttctataaatgtttaattttgttgtatgcattgaataccatgctatccttgtttgtggatgggacaaggtggacaggtgtgtccactcctatgcctgggagtacagcatggtgccaggagggagaaaagctagggctcagtgtcttgggaattatgccaagccggctggtgctggactgtgattatctttgaggatgggctttggggccccataaagctcttttctgttatgggaggtttctaggatcaaacagctatgaccaccatcatcacattcctggctactccacactatggagctgcgtaatgatgccctgtactatgctactggctgaagcatttggcacacaccctttctgatcctcacaacagctgagtgaggtggcattattacctttatttgtaaatgtgagaaaacagaggcaaaaagaggttaagtgacccattcggagtcatagagcaagaaagtggctaagtccagatttgagagcaggtctgagcaaagcctgcctgaaatttgcttttagtcatcttgttttgttttgccatttacctttttgtataatttttctattgctctctgttagtcaaattatttttgaaatgtcaaaaaatttctgtgcagaaaataaaaaccctcaaaatagagtgctaggagctcagggggtgggggacgaatatagtcaagtattaagacacagctaggccaggcgcggtggctcacacctgtaatcccagcactttggaaggccgaggcgggtggatcacgaggtcaggagatcaagaccatcctggctaacatggtgaaaccccatctctgctaaaggtacaaaaattagccgggcatggtggtggcaggcacctgtagtcccagctacttggaggctgaggcgggagaatggtgtgaagccgggaggcagagcttgcagtgatccgagatcgcgccactgcactccagcctgggcgacagagtgagactccatctcaaaaaaaaaaaaaaaaaaaaaaaaaaagacacagctcccactgccgtcaaaaaacgtggagctggtgaggtggttcatgcctataatcccagcactttcggaagccaaggcaggaggatcgcttcagcccaggagttggagaccagcctgggcaacatagtaagaccttgtctctaaagaaaattttaaaaattagctgggcatggtagcacatgtctgtagtcccagctactccagaggctaaggtaggaggatcacttgggcctgggagtttgaggctgcagtgagctatgattgcaccaactgcattccagcctgggcaacagcacgagaccctgcctcaaaaaaaaaaaaaaaggcatgtggactggctcagtggggtggcccgaggttcggatgggctgtagggcaacactgatccatggctgcaggagttgaggaagggatgtagttgtgaggatggaagtcagagcttccttcaacgggtggccccacatggcagaggagcccactgtgggcgtgacttccctcctctctgtctcactcaaccttgggtctgtcagtgtgatctgctgggagatttctaagcttctaagacagcaccctataagggacccaggtggggaatagaccgtgaccagccagcgacccctactacccgtcactcaaaagcactagcaccttcagccactcctcctgggggtgggtcagacttagttttttagaaaagcagagtgttaggttcttagcttggaagagggcagacaggccagtcctgatacctgatggggcataccatctcccctgattttctggtcctgttagaattttccatctgagaattgggagggtattgacctccgcttggtttccccatgatgtgtggggatcagacccctggataacgaaggtgttgttgagggtgggtaggagagcctcccctgagttctcagtacccctttgcctctcgtgcccactgcagaggcagcttgccaactacaactttgacttccggagctggccagtcgacttccactgggaagaacccagcagccggtgaggccccagttcttttgctgtatctctccccttagaaccattccagaaaatctctgctctgccctcccacctccatgccctctcaggtcacagtgcctgccttccaatgccattatgtcgttcctagaccccactgttctccagacctcagacatccagcttgctgctcctgaccctatccttccctgcatctttcccttcctcaggaaggagtctcgagggggcccttcccgccggggtgtggccctgcttcgcccagagcccctgcaccgggggacagcagacaccctcctcaaccgggttaagaagctgccttgtcagatcaccaggtgggaaacagcagcgaggagaggcccactggggtggaggggccatttcaggagtgctctgggagtgggcgctccattgtaaaatagctgtcactcattgggcctagtgctgtatggtttgtgtagatcatttatggcaaagtcatttttatccatatttatgtttgaagaaaagaggctcagagaggtctggagtctcaaatgtagtaagtaaagaactgggatatgaacaaaagctccttcagtgaggctgaaaaggagcagtgggggtggggtgggggtggggaggacacacacttgtagctagggcaggctctggtagcatctgtgtacccatcgtggcccctctgccctgttgttattccaccttggctccgggcccctgtgtgcctcagtgtctgcacctgtgatgaacctgccctgcaaggttgctgaggagattaagtaaggtaacatgttctgaagggctcctgccttgcctgggtgcttgagagcacatggtaaatcccaaataaagctcagtcgtgggtactgatgatgtcagaaggaacggaaataaccacctatatcttatagtggaacagacactgggaattttcttttgctgggagttaggaggcagcttctagaataccaaggaacagggtggacttagtggttggttgttgacagtgtgctaattagtcagggaggcaagccatatttgaggttttgaattataaccatcattttttaaagcattatttatttggggacctttaatatgttgtacttatattttaacagaatcataatctgatgataactttgcatttacttattatgtatagacagttacatcataaaactctcagaattctgtacatacaggatatgtgtgcactgagccacaatataaaatgtttatcttacaaaggttgcagtaagaaaagtttgcaaaacactagcctggtacatatttcattaaggcttgaaagaggaaagtaaagctgtgaaggtcaggggtaaagcaggccttacagtctgtgagtgctagggctgggatggtccccagcacagtccccaggcctcaccagggttggggtttgttaacctgtgttccccacagctacctggtggcgcacaccctagggcgccggatgctgtatccaggctctgtgtacctgctgcagaaggccctcatgcctgtgctgctgcagggccaggcccgactggtggaagaggtgaggcttccctgcccgcacatcccctaaagccctcccctctcacccccacccaccccgccccacccctgtgatgtggcctcctgacccttgcatcttggccattgcgtcttccgtactcagtgtaatgggcgccgggcaaagctgctggcctgtgatggcaatgagattgacaccatgtttgtggaccggcgggggacagctgagccccagggacagaagctggtaagagggagcagagagcccagaggtggggtgagtgtgaggaaggcagtagaggtctggggaccccaatgctatagcacctccctgaaggaaccactactggggataatctcatgtcctagctccacgctaaagaccttgtgatgtagtgaaaccctgtgatagagaaacagatgaagtaggagagacgttcaaggacgagaaactaatattaatagttaccactttgacagcacttcacacttatatatatttaattctcatatatatatgaagcatatatatttaattctcaaaagaatcccgtgagataggtactgcttatattagcccattttacaggagatgaaactggggcacagaaaacctttcctggacctcacagtaagtggtagagctggtatttggacccaggcagcctggcctcaaagtctcctacctccatgaagcagccgtggaaagagcgctaagccaggagtctagggagctgggttctagtcctggctctgcccatctgttatgagagttcatgcaaatcccaccattcgtgggtttcagcttggggcgccatggcattacagtttatctgaccataagactggagctcagagagggatagggagagcaatcagcataccacacaatagcaatggtcacagaagataacagacccgaaaacgagaaaggaaaaacatctccatagtccccttcctgaaagagatccagctggtaatcttccaaggaaaagacatggctgggtggtcgagcaggtcagcctctgaggagtatttgtaatccctttgcttctcctcttatggaccctgtggaatgagaagcttccattccccttggagaaaacagaaacctgccctttcctcttccctgcaaagctcttcatgggctgccctccctgcccaaagggagtttttcagtcccaacttggccccccagcccttccttcctgcctccttcctaggtgatctgctgtgaggggaatgctgggttttatgaggtgggctgcgtctccacgcccctggaaggtaggacggtgactcagcctccttatctccgccctttgaaagggaatgtccctgcctcccacactgacctgacctcccctggcctctgctttctctgggtgaggttttgagtctctcagctttagggaaaagtccactcgccatttgctttgataaccttacatccctcccctggcctgtgtccctagctattatgcttttcattctgttccattcccccaccacacaccccacacaatcacatgctgctccctgtgctgcctcagaacctctggtgtcatctcctatttctgggaaggcttggagttatttgcatctaagctggggggtacttctgctcttccttcccccagggatggagaaagggctgtgggccacaaggtctcagtccttcctccccctgtgttacagctggatattcagtcctgggctggaatcatccaggctttgctggaagcacggtgagaccatctcaggaatcccttccttttcctgaattatgtctgtttccctctggtcagccattggagggaggagaggggctgtggatttcttgaaggcctcccactcacctgagggctggggtctaggaggttgtgaaggcagcattgggagccatgcccccatccccacagtgcggggctagcaggagaggaggaggtagatctcattgtacacatccgtcttctggagagaacaacctctcctaccatcccttccttctacaccttctctgcctgtcataggtggctgcaggaggggtccacgttgggagggacaggtgagctggcctttggtgctgacacactcctgactttgccctttctcctgcagggggtgccattcccgcagaatgaggctaatgccatggatgtggtggtccagtttgccatccaccgcctgggcttccagccccaggacatcatcatctacgcctggtccatcggcggcttcactggtaccagcctccctcccatcccccactgtagacacattcatgaccacccagccccacccgggagaggtggggaaatggggtggggtggaggctcaaggaagaagagagaggaagtagaatctctgagtgggcctggaagaagctatcctatttgcatacacttcacctttccttcccctcttgtgcccagtcattaaaaggaaaagcagacccaggtcctgggtggggagatcagggaaagtgaatgtttcctgcccattatcttcagtgcactatctccagtgttctatccccatcctctccagatagttccctaaccaagtgaagtaggttaagaaaaaaacaagggataacatagggggaatggggttggcctatagggtcagtgggatgagagcatgggtggtggggagaaaggagcctttctcagttcttactcttcttccctgccctggtaccagccacgtgggcagccatgtcctacccagatgttagtgccatgatcctggatgcctcctttgatgacctggtgcccttggccttgaaggtcatgccagacagctggagtgagtgcagctcccaggcctgcccttcctgggaaggggtgggctggaactgggaactgttctgagatggctcccttttcttgggtggggagtaagtcgccccattgttggaagcaggaggactcctttgtctgggggcctcagttttctttctccgtgaatagtgaggacctttatgttgggcaagggctttgtctctgccatcccttcacctttatcccactctagggggcctggtgaccaggaccgtgaggcagcatctcaatctaaacaacgcggagcagctgtgcaggtgagggccggccagcgtccggcattgaacacctgccccccatacagctctgctgggcgctcaaaccctgaaactagtactaaagtgcaagttggtaaaaggccactggctcacatcctgagtgaccctgccaccacctcaactggcctaacccctcccaggtcccctgggactctggaccacctcaggatctggcaaccaaagggttaaggcctggcacggcaggggtctcccagcagggccagactgaaccatgccccttaaataatcccctctcacccctgagtgaagggctaggtcaagggctgtgctatagcaaggggagggtaagaatgctaccagtgcagggataggggtgggccagttgtcacccgtctccctctgagctctcccttcccactgctctgttctctgaagataccagggtcctgtactgctgatccggagaaccaaggatgagatcatcaccaccacgtgagtgcgtgggaatctcggccctcaggaaccccagagatggccaggaacttgtcccttctacctctgcccaccagaaacctgggtatctagacccttcctcctaacctccagcccctccagggtacattcttctcacccccagggttcctgaggacatcatgtccaaccgaggcaatgacctcctgctgaagctcctgcagcatcggtgagagccagggtgtgtgcgcgctgggggcagtgtacacacacagatactgataccagcacagggaaggagggaggaaggttcagggatggtgaatgaaaaaaaatcagccctgacctgtcctggcacttcctccgtaggtatccccgggtgatggcagaggagggtcttcgagtggtgaggcagtggttggaggcctcctcacagctggaggaaggtgagaagggatccagtgaggcttggggcgggggcccagcaaggtcaggttgctgactggctgtcatctctctccctgaccagcctcaatttatagccgatgggaggtggaagaggactggtgtctgtctgtcctccgctcctaccaggcagaacacgggcccgacttcccctggagcgtgggtaaggagctcctggggcaggagagagggtgggaagggcctaggaaggggatgaatacccagatgtgtggcctattttgagcgcctcctctctgcaggggaggacatgagtgcagatggacggcggcagctggctttgtttctggtgagctaaggagtgggaagtgggaagggttcttgaatggccagggctcacatagggggactggggataccctataagcattggaagtggcagcttttgtagagtgggtggtggatgcggaagtggagggtggggagggagtccagtggctgcccctcccaacagtgctctgtaccccacctgtcccacctcctttcctcaggctcggaagcatctgcacaactttgaggccactcactgcaccccactcccagcccagaacttccagatgccctggcacctctagggaccaactgggactcattatggaagaatggggtgagaggagacatgaggaaagaccctcttatttgtgattctctgtgttcatgttgctgtttatagtttgtggaaagtgggggaccatcccccttctcaccactgttcctcttgcacgtttcccctcattcatgtggctgtacttaaccttctccaacatacatcctgcattacatgaatggattattcctaataattaataaaaaggtattttttctactatctggctaattgtataacttctcaagtgtccagggagccaggggcaggtagtggggagagcagaggccccaaagagctgggctttgggaaaccctaactctagacaatctagctaatctaacccttcccatctctgtgtccccctaggccttcagcccctaacctgagctttcctcaggcagcaggtccccaaacctccccggtccctgatgtgcctactgttatcacaactgtgcagcctccctggcccctcccgcctccttcttcagttcttcctgcatacaaccaccccaggagcccatggttgccccctcctgcttacggctcatgagctttctaggatccgatttcacctacccagtgcttctgctggtttccaggttcaacctgcatggtgttactagcagtacccccaattttcattgctcacctcttgttatcttggtgaagagtgaggaagggcctgctccccacgtcttatgcagcaaaccctgcacacccaccttgccatgtcatcaagtctctgtcctcacagcctttttgcagttcaacaaacacaggccctgccagggacggagggccaggtgccaaggactcatgtcttctcagagccatactttgccttttggacggctctgttaggagaagatgcttaggttgtacctgaggaaattggttccctataactgccatctatctctaactttggaccttgtggaacacagtgaataaatccctcttccacccattggtttgttgcctggcagttttttttatttttttggagatggagtcttactatgttgcccaggctggagtgcagtggcacaatctgagcttgctgcaacctccacctcccaggttcaagtgatcctccagcctcagcccctctagtagctgggattacaggtatgcgccaccatacccagttgatttttgtatttttagtgaagatgaggtttcgccatgttggccaagttggtctcgaactcctgacctcaggtgatccaaccgccttggcttcccaaagtgttggggattaaaggtgtgagccactgcgcctggccgctggccactttcttcatttggaaacttctcttttccagatgaaagaccccaaagtttatcgccctgagtccatttttgttttgttttgttttattttgttggggatggttttttgtttgttttttgagatggattctcactctgtcgcctaggctggagtgcagtggcacgatctcagctcattgcaacctctgcctcccaagttcaagcgattctcctgtctcagcctcccaagtagctgggattacaggtgtgtgccactacacacagctgatttttcgtattttagtagagacaggtttcaccatgttgcccaggctggtctcaaactcctgagctcaggcaatccacccacctcagccgactccattctttttttttttttttttttgagacggagtctcgctctgtcacccaggctggagtgcagtggcacaatctcggctcactgcaagctccgcctcctgggttcacgccattctcctgcctcagcctccctagtacctgggactacaggcgcctgccaccacgcctggctaattttttgtatttttagtagagacggggtttcactgtgttagccaggatggtctcgatctcctgacctcgtgatccacccgcctctgcctcccaaagtgctgggattacaggcgtgagccaccgcgcccggccaactccattcttttgagcaagatacttaacgtgggcgacaatgttctaatgtcctagatggagtctctggctaaatttctgtgtcttctccaaacccagtgcatgaagctcttcttgaaaccccagggcagaggctgtgtgtgcccccattagcgctgcaactccttaagggaagatatactgagtctccactggaagtggagatctgagacttaatcaggtgatgtgatgcctgaaatttggagttagaagaggcaggtgaccacagctccataatgctccaccgttagcaaacaggtggatagctgatactggtgccctctcctctatcccattccaggggggcaaacgatgggaagtgtggaacatgaagctctggagccagctgcacagttctgaatcccatcctcccagatccaacagaagagttaatcccctgaaaactaaatttttgttcagctaagggaagctccttaaatgcaaagaggagctgggcatggtggctcacatctgtaatcccagcactttgggaggctggggcaggaggatcacttgagcctagaagttcaagactggacagggcaacatagggagactccatcagtacaaaaaatttaaaaattacccaggcatggtggcatgcacccgtgttccaagctactctggaggctgaggtaagaggatcgcttggctgaggatcacggtaggttgaggctgcagtgagctgtgatcgtgccaccggactccagcttgggtgacagagtgagactctgtctcaaaaaaaaaaaaaaaaagcaaataggggtgcccagtctcacctcccataccctggggacaaaggacacccctccctggacatggccattagggactctgctgaactgcccctactgccactttcccccatcttactgcatgtaattgtagacaacagtggatgacctgaggggcccttagatacctgaaattgggtagggaaagaaaggtaggctcaacatgtgaattctgaacccccccatccaggggcctcagcctacttcagattactccctatgcaataaggttcagagcagctgtgtttgttttcagaactaatccccacccaggggtggaagcaggcccctgtccactcctcaccctatatagcaaagttccagcagttccaggggatgatcagcagagatgcagaccttcccagttgctggggcgctggaccctgctatactggacacaaggtgaggcctgaaagtccaggcaccctgaggagctgggcaaactagcagaaaagatggcgctgggagaaaggaaagttagactctggacgggaaatctggaaagaagtggttcccagctgggccaaaaagcctcatcctacgccgtctcatcgacctgggctccaccctgagtgcctccagtgtgaggtgctggactggctctgtgctgcctgtttgggttgagggtttgctcctaggagaggcatgtatttctcgtacagctgtcacaagcgagtgagggctccggaggtggagggcccaagagggtggggagctcaggcgtcagtgatagccagatttccatccatcggtccgtccgtccgtccatccatccatccatctatccaatcaacaagccattccggattcttcaggaatccagtcattcatttatatttaggttaaagaccctctctctggttcctctctagaacgcaatctcgagccgctcccccaacaaaccgtggccctctcccgaccgggtcatctacagccccgcccctcgtttgcctggctccattcccctaaccttggcgttctgtcctcaggccccgccttctttgtttcgtcactcggttgcttaccctcaggtatcccttaactctaggtaggagcactcagaagggacaccgtcatctgctgctgtcgccatggcgattattcaacgccctgcctcttcaccccaggaaaaccttcgcggaacccgtcaccatggaaacgaactctctggactcttagcgcgccctgggctggccctgctgggtggacaggagaggagcaaaacgcaacaaagacgggattaattactcggaggccgcgccccctccgaagaaggccccaccctgccccggcctcacccctccccgaaataattcgaggaaatattccgcgaatgctgggtgggtgtcttgccccccggttccctcaaggcccacggtcgcttgaattccacagcaagtcctcccggacctctcagggcaatcccctcccgaagcccagcctcagcctcgcaaagcctctagtcgttggccttttcgttgcgattatattcgagagggagcttcagagggcgccgcgaagttcccctgtgcttcccctttgccctttgccctcttcgcttcaagaggagccctggctctcttttttttttttttttttttttttttgagacggagtcttgctctgtcgccaagctggagtgcagtggcgcgatctcggctcactgcaacctccgtctcccgggttcaagcgattctcctgcctcagcctcctgagtagctgggactacaggcaggcgccaccactcctggctaatttttgtatgtttagtagagacggggtttcaccatattgtccaggatggtctcgatctcttaaccttgtgatccgcccagctcggcctcccaaagtgctgggattacaggcgtgagccacggagcccggccctctgattctttttgtctatcactctgtgcactcattcattcaagacatttatgtaggtgccccgcgttcctctgcagttctccactactctggcttttctctaatacaatttattttgtgttattatttctttaagacagagtctcactctgtcgcccaggctggagtgcagtggtgcgatctcggctcactgcaacctctgcctcccaggttcaagagattctcctgcctcagcctcccgagtagccaggactacaggcgtgcgccaccacacctggctaatgtttttgtattttttgatagagacggggtttcaccatgttgctcaggctggttgcgaactcctgacctcgaatgatcccccaccttggcctcccaaagtgctgggattacaggcatgagccgccacgcccggctaatttttggtatttgtagtagaaacggggtttcaccatgttagccaggctgggtgcgaactcctgacctcaggtagtccacccgccttggcctcccaaagtgctgggattacaggcgtgagccaccgcagtccggccctaatatagtttttaaattcattcattccaaggcttttgggaggcgctcagtggcgtgcagtttcctctcgaatttctttcttcccgcagtctttctgggcgggcgtctcccgtctgtttcttcccatcttcccccttatcatcctgggactggataattcttgaatagtctgggaggtagcagggaacccgagttcggagcctcgaccagaacctccagacgggaaattggagcaggtggtgtcgttccaggacgctgaggaccacctcctcccctaacgcacagcccaacgatcctaaaagtaaaaaccctgagtttctgagtcaagactgagctggtggggtggggaccgagtaggcgtggatggggagcccagcgggtccccagcggagaaaatgggtgagacgcctggggccgcggtctccagaattcgcctgggagggagagtggcgctacggcgccgccttcctggggagccgcttcgggctccggatgtccgctggggcccgacgcttgggtcccgacgcgcggttcgcactttccaggtttcttccccagggaacagagcttgagcggggggccacccccccgtcctaccggagttctgaggtgcggtcaggcgcggagagcggacgcccagcgccagattctgtgggctccggagttcaggcccactgagccgcagctgagcacaggcggggcaggaaaaaggatgaggtgagggaaggcgctgggttcctggaaccccaagggagcactgagctgagtacgtatcgcttgggatccaggtgtccttgttttaggatgtctgacaggtgtccccagggtatgagaagtgggactgggcaccccctatttgcttttttttttttttttgagacagaccacatgtttcctatcttggaaaatggtaccacttccttgtgcaagcctacccctgttccctcacccctcgttcagtccaacagcaaatctgtccagtcttctaactgtatctcaggttcattagccccgcttcctcgtccctgctcgtcttctgccggaccagtccgccatcttgtgaccggactcgggaatagcgtcctacttcccggcggcctccactcttgacccaaatgcaatgtgcagccatggcaatcttttataaacagaaatccgatcaagttactcctctgccgaaatccctctggtcagtggtttaactgtcgaggtgctcctggcagcactctgccctccccacatcattgctggtggacttgtctcccctactagactgtgccctgtgagggtggagactttgtgcagggttgtatccccaacatctgatgcagtgattcaataaacatctgtccaattaataggaaagacagttccttttctcattcccctattgctggtcccctgccctcaagcaggatgttatgccccagagtggctgtgggtgcgaacattctgcccctctggctggtctggcactgatttccaccctgagctggtgttgcctctctccttcctcttggccaacctctcttccaccaatataagcccaaactggaggccagcaggcagtcatgcgttttatggcaggccctgcagggagccagagtctgggtcccctgtgcttccacagcagcccccaagccctctacacggtcctcttaatagtgctggtcatgatgagcttggtgtttggtaagtggctccaagggttcagaagggtctcctggcctggatggagaaacccacagacaccaagtgtctgggtacacctgtccaggatgctcaggtaaacccatgcaggaggagagatgggacagatgggtttggtagggaatgcctgctcatggactgatgtgcaatctgaagatttttaaaaatttattattattattatttttgagatggagtctcgctctgtatcccaggccggagtgcagtggcgagatctcggctcactgcaacctccacctcccgggttcaagcgattctcatgcctcagcctcccgaataactgggattacaggcataagccaccaagcccagctaatttttgtaattttagtagagatggggtttcaccatgttggccaggctggtctcgaactcctgacctcaggtacctgcccgccttggcctcccaaagtgctgggattacaggcgtgagccaccgcacccagcctctgaaggagatttctagtgaccaccccagggctgtctcacttcacagcagtgacctgaatagagatactgaaggaatcctctctggatctgagggcaacatagaatagggagggttagggagtgtgctggatgagaaaaccagaatccacaggatagaacaagactgagtccagcctgctgggctccccacttggctgcaaagcaccagccacagagacacaggattcaaagtgttggtttagcactttcctctgcctaacaccaagtgctctgctgggtctggggatttgttaacatgtggtctggccttaggaccagaggaaaagggggatgtatgtgtatgcagttggggaaggaagcagagaattggggctttgatggttttctgagacaggaagggagggaggagtggggctgagtggcctggaatcaggcagtggtagggtgtgaggtagaatggggtgtgagtggggtcagcacttctctgtgttctaggtaagtttgttcctgtcaattgggaaccccctcaaccacttccattccccaaatacctgcgctgctaccgatgcctcttggagaccaaggagttagggtgccttctgggatctgacatctgcctcaccccagctggcagcagctgcatcactctccacaaaaagaacagtaagtggccttctcctgtcatgggcccagcactctcccaaacggaaactctctcagcctcctaagctgcaccccaagtcttgttcccataatcccataagacattgctccaatcctgtcttttttttttttgctgctctgtcacccaggctggagtgcagtggcgcaatcttggctcactgcaacctccacctccccagttcaagcaattcttgtgcctcagtctcccaagcagctgggattaaaggtgcacgccaccacgcccagctaattttttgtatttttagtagagatggggattcaccatgttggccaggctggtctcgaactcctgacctcaggtgatccacccaccttagcttcccagagtgctgggattacaggcgtgagcaccgtgcccagcctctcttcccttttcttcagagccacactctgtctccacttccactaaccttctctcctcaatctgtagctgaatagcttctaccctatcaaggtgcgcagctttgacggggaccctccagatctccaggtgcccttgcctgtcctcaagctgtctgcttccgcatctgtctgcagttactgctggtgttgctcttctcctgcatcctccacggcttcttcagtctccttcatggagcgttttctctctgacccttagtggttcatgttcaccaaggtttggtccttagctgtcttcccacttcatatactcaaaagcagaggattttatctgctttgctggcttcaaccagcagccacataccacttccttctgaatctgaatgttatgtcaaaccgctctcctcatatcccgttgaccactggacatctccctcgctgaaaattgactccttcccgatgcctgctcttccaccgaccccccacctttcttaagttagcaaaaacgtaacacataatatgtgctaggcactgttctaaacacttgcaatccgctgaggcaggtattattactatgtgcattttacagatgaggaaacaggtgcagaaaggtcataaccttgcctgagtctcacagatgctgagccagaatttgtgatggctccagagatggtgctctcaacaaccactgcatgcagctgcctgtgttcaagtcctcttactacccttttaacatagccgatgcacagatgtgggtcaaatatcagagtatacaataccatcaaaccaaagtctcccgctactaccctaacccacctggctcccctgcacatgtgaccactttttttactttctggatgatccctcctgcaatcttttatgcacattccaccctgcacaaatatgctgtttactattttttcacctcttcccccgccccaacccaagatagtagcatcccactgtaaacattattccacatttaagttaggggaactgaatgttccgatatcagtttgtaaacagcttccttgttttattgacctgctgtatactactccatagcatgcgcatatcacagctgatttccccatcccactattgatgggcattttggtcatttctctcaagcagggcagcagcaaacatccctgaacatgacttcttgggatgcaggcacaaagatttttctctattatgtataacagcagcagacatcatcttattctcttttggtctgaaaaataaataacaatacacctccttcctgccacccaatctccaaaacatttcccagctttttctcacatggtcctatggtgctagttctcctcacttggctcagtaactcccaactccccctccaaccattacatttcatatggctcttttcctccagccttgcatgggaacttcagtggagttccatggctggtgaacactgggcatgtccacccatgcctaactacaggaatcttttctttttcttttttttttgacttatgagtgtggggatgagaggatttggggctcttcctggggacttccgtatcactggtgcccactgtccctccccaggcagcggttctgacgtcatggtgagtgactgccgaagtaaggagcagatgagtgattgttcaaatacccgaacttctccggtgtctggcttctggatattctctcaatactgcttcctggatttctgcaatgaccctcaaaacagagggctctatactccttagtgtgactgcagcaaactttggtgtaaaattccaccagtttccagccaccttcctgacttctatctgggcttggccaggacttctagtccctcataccagccctccttgcctccctccagccactggaccccagccttggctcttcctcttggttgacgcccttcagcacacttactgctactctgtacccccagccctactgcccaccaggtttcctctcttgtcccctagtccctggatgtttctcccaaataaatttgtgtgtaaactgtttggtatgtctctttcttctggtggaggtgaaggctgagggaggtgcacctgcctaactgccctaccatgggtcaggtaagggacccccagctctgctgagctgtcctcttgtcctgccttggtatgtgatttgctctagacacaaaaagagaaagaggaaatgaaagccctcctatggcgaatgccagaaagttagtgggcatcctcggcagtgctgtcagaccagagctgtgtgggggctaggggcgtttagagggctatgttggtgggaagggggctgcgaaaggaccaggcccaggtagaaggaggtgggtgagaaggccactctttttttgagacagtctcactgtcacctaggctggagtgcagtcgtgtgatcttggctcattgcaacttctgcctcccaggttcaagtgattcttctgcctcagcctcccgagtagctgggattacaagcacatgccaccacacctggctaatttttatattttattagtagagacggggtttcaccagttggccaggctggtctcgaactcctgacttcaagtgatctgcctgcgttggcctcccaaagggctgggattacaggcgtgagtcaccccgagccgagaaggccactctcaaagagatgttagaccttattggagtcctggtctcttcaattctgggccaagttcttcagcctctgagggtgtcttccaggttgacctgctataaacctgggcctttctctgtcttatactgacgtcagaggtcatggagaagggtggacttagcaaggtgggggttggggggcacattaagggtttgtacctctctttgtacgccaactgcctcatgacttaattatcattggtttggtattttccgtcagagtacaggccacacagatttgttaacacgtgtgcaaaacactatataggtaaaagcagatgcgtacgatgccatttccatcaagcacagacagaactcatctaagctactaccagtcaggacagcggctaccccagagctgggaagagcacctgggagaggggaacagaggcaggcttggctgcgggtaaaggtcttcacgctgatttggtggctggttacacagatgtgtggtttacaaaaatccatcttgtgatatgtgcaagcttctgaatgttttaccaaaaaggtttgaaaataagtaaatcagccaggtgagcatggtggtgtgcaactgtagtcccagctacttggaggctgaggcagaagaatctcttgagcccaggagttcaaggccagcttgggcaacatagtaagaaccttagaaaaaaaagctgaacattgtgtatgcatttgactctagggcaaatatatttttttgagggggaaaaggccttaacttctacttgtgtatgcacatttacatgtgttttctcaatcatctgaggcactatccctacttgacaggtgaccaaggtggggctgaagagactgacatatccaagtggtagaggggctgggattggacctcccagccacaaagctgcactgcttttcagaaaaaggtttcataacccaagcactgggctgcaagacttggaagggcagacacctggctatactcatctgggagtcctgctgctcaataccaagcctgactcagagcagcgttatgtccagcatgtttatccagtgtatggaaaaggctgttgtatccatccttgctttctatacgtttgcactatttcaaaattaaaatattagcatgaagatccaaccactgcagcccaacatcagtgctctcagcactttgcccctcaaattgggcccctcgagagggcatcctggatgccagaatccttgaaaagaactaaggaatggcaggagtccagggccccagcagcaggtaactctggcatgtggctctgagttcctgagtctttctggtttaaagagaaagtttcttttttttttttttggagacagtctcggtctgtcacccaggctggagtacagtggcacgatctcggctcactgcaaactctgcctcccaggttcaagcgattctcctgcctcagcctcctgagtagctgggatcacagacacgtgccaccatgcccaactaatttttttttttttttttttagtagagatgggctttcaccatgttggtcaggctggtgtcgaactcctgacctcatgatccgcctgcttcggcctcccaaagtgctgggattacaggcaagccaccgcgcccaggcttttttttttttttttaagacagagtttcgctcttgttgccctgtctggagtgcaatggcgtgatctcagctcactgcaacctacacctccccggttcaagcaattctcctgcctcagcctcccaagtagctgggattacaagcatgagccaccatgcccagctaatttttcatatttagtagagacaagatttcaccatgttggtcaggctggtctcaaacccgacctcaggtgatccacccacctcggcctcccaaagttcagggattacaagcatgagccaccgcacctggcctaaagtttcttttcttaggtgaaaagacctggcatcatcagggtctaactttccaggttttgtagggtatgtttaaggctgggaagaatcacagtccccatgctttgatctccagctaagcagagggtggggagggatgtgtgccctttacaggaggccgagaggaagcgacaaacgccaagtgcaatggagagggctctgcaatcctatttggatcccaaacctcactaacccttttttttttttttttttttttgagacacagtttcactcttgttgcccaggctggagtgcaatggtgcaatctcggctcatcgccacctccaccttccaggttcaagtgattctccggcctcagcctcccgagtagctgtaattacaggtatgcgctaccaagcccggctaattttgtatttttagtagcgatggggtttctccatattggtcaggctggtctcaaactcccaatctcaggtgatccgcctgcctcagcctcccaaagtgctgggattacaggcgtgagccactgcgccaggcattaaacctctttaatctgtgtttacctgcccacacctgagcctgaccccacaaacaatgtgacacagttttagcccagtcccagtttattgtggaggaaaatgggggacatggagctgagcagaacagacccttccctctcctctcacaggcccctagggagatgggtgtcaggactcagtgaagtgaaatggggccgaggaagccagagactgacaagagagcaagagaggacaggaggcagaacaacactaggacaggcgggggttggtggagacagtgaggcagggacacaaaattgccaagtcaggacatctgcacagaattctattcctcatccttttttttggagacggagtctcactgtgtcacccaggctggagtgcagtggcgcgatctcggctcactgcaacctctgcctcccgggttcaagtgattctcctgtctcagcctcctgagtagctgggattacagaggtgtgccaccacacccagctgatttttctatttttaatagagagcgggttttaccatgttggccaggctggtctcaaactcccaatctcaagtgatccgcccacctcggcctcccaaagtgctgggattaccggcgtgagccaccatgcccggcctcctcgtccttcttgctgctagttcagtctggtactgggtcttagagacatggacaagacaggggaaacagagctagatgtcaataggcaggtgactggattgagagggatgggggatactggaacactcagatgatggggaaggaatggaggaaccactgtgcctttctcaggtcagcctgtctgggcagaatccacactagagattcttttctagggggaagaacagcaccagagctcagccaggcacagtggctcacacctgtaatcccggcactttgggaggtcgaggagggcagattacgaggtcaggagttcgagaccagcctgaccaacatggtgaaaccccgtctctactaaaaatacaaaaaattagccaggcgtggtggtgcacgcctgtagtcccagctactcgggaggctgaggcaggagaatcgctggaacccgggaggtggaggttgtagtgagcagagatcatgccactgcactccaccctgggtgacagagcaagactttgtctcaaacaaacaaaaaaacagcaccagagttcaagagagaaaattacacaaaagtcatatagatgctagtggtacaacagacggaggcctaagaaatcacagtgaccaaagaatgtgggtgttttcagagagggcagtgcaggatgctgagggtgttacagaaagatatttgcactgtggaattcaggaagggtgaggtgtcaagagtccagcctggggaagaaccaaaagtcctgaactattgaggaacaagtacatgcggcgcagctcagcaaaagacaagcccaggttcagggacagtgtgaccatggggtccaggccatcaggctccgtcccagcatggaaattggggaggggcagggagaggttcagggcctggtagaaccactgaatctgggagtcagacagaggcagggccaggggcctgtcatggggctccggcagagagctctggagttgggggcttgaccaggagttgcaataattgtactgacagcactgggcctgataccagtactctgcaaagtaggtgttgcgtttttcttggcagcggtaggaaatgtactgtccacagcctcgaacgatgaagcgaaccttgacatctgagggagaggggaaagctgataaccccttccaatagcttcccatagtccaagaacccctgctactgacttttcccatccttcacccagacctaatttacttctaacccagagtccttcaagaggctagaaaagtgagctctgctggccccctagaaccttagacccctccttccaagattcttctggttttttttgagacagggtctagctctgttacccaggctggagcatggtggcgcaatcttggctcactgcaacctatgcctcctgagtttaagagatctcccacctcagcctcccgagtagctgggactacaggtgcataccaccatgcctggctatttttttgtagagacagggtctcactatgttgcctaggctggtcttgaactctagagcttaagtgatccacctgcctcagcctcccaaagtgctagggttacaggcatgagccattgcactcagcccctcctctcttcttgtaccccatgcccggagcagccctgatctgtgagaggagagaagaccaagccattggctgccccaccagcagccccttcctgggaccttatttaccataatagatggtgatcaccatgcacagggatgagctgctgatggtacacttctctgagcctgaaatgcatcctacagaagggtcttctacgaggcagaagtggcacgtccggatgtcgggaacaggaactggggaggcagaaggagggatggaggcactgggtcactctcaaataccctgggccagtaggaagcccgattatccatggccacgctccacccccttcctggactcagttaccccttcctccctccctgcccctgggccccacttaccctttcctactgtgaagcccaccatgaccagcacacctacaagcatatggaccttcattttggaattctggggagatgggcagttcctgaggggatgccctgaaaccccaccttcctgtgaccatgctccttaatcctaagctgcagggtggttttgacaaggtctgagcaggagctgctgtaaatgcagagctatattcctacttggggcaggatcctggctgggaaggaagttattacttggcaggagggacagcatgtcctcacccacaacgtctggttcctgagtgtgggagtaatggcccagatggggtaatacctgggcactaccgggttctttatccagtgtctacctttgtcttgcataccctccaaagacctattccctcccttggaaagtccatgggttagtatctatctctgccaccatgtgctgtcttcgtcatacaacagggccaatccccactgtgctgggacaacctggccaggaaatcaagcatccccatccttctgagatgagcagtctcagctccaccagcggcaggcacacacacatcactgagcagcaattccggaccttgtcccacctcgttccaccctttagttagactgactttaggctacttttcctttagaactaaaactaaaagatggagctgctgattaagccccttacagtataaacagacagtcatagatatccaaacaaatatttctcatctttgaaatatgctttgtcttttccttttgaccttgcatttcatcacacgcagtcctaggaattctgttctgctccatactaaaaacaccacccaatccactgagcacaaatctgtcctggttttcaatctggggagggtgggctgggccatgagggcccctggagtccaacacaccatcaccttcccttccccaacagcaagcaccagcagactagctcatggccttttcttctactttatttcatattcccaccacaataacgactcctttaatttaaactaaaaaccatacagggttcctgaaagggtggcaaaaaagaaaggaaaagtcaaagactgcaggacaggtgggggagggaatcagcgaatcgtcttgactgggctcttgaagttgctggcggcttggagctgcagctggtaggccatcggatggatcttgaaaccgtagagcctaggccagggcagaggtcagagaggcagcagcatgagccccatccaggccctgccagtcacctgcattcccacctccccacctgagctcctctatggacctgctcagagctaaagcctcgtggttcccaacttctcagctcaagaacattctacaataaggtaactcaagcacagataatcaaataactttcccacagtcactcagcagggagatgccctgattctgggagaagcagacctcaagaaagggccatgccctgtcctcccctctctgggggatcttgggcctttcctttgacccttaatgactctccctgctccctacctgggcacaaactggttggcaggtctcttgggccggtactcgggatgcaccatgaagagcatgtgagggaaaccagtgccgaagtaggcgccatccgtgtgatggtgtcttgatgacttgggtgtgtacacatccatgcacttggggcagtagagcttcaccatggcttcacctgggatgtctgaaaggcctgggagacagccagactcagcaggccaggtatccccctattcctacctaacctcccctcaggactcaggctccaatgtgttgagccccaactccttcccataagactgccacacggtgctttcctttcccttcttcaacactcaccaatgggaagcattggctggttctcacagtacacacgaggacagtaaccaaagtctccttgctggtacttttccaactgaggtgaatacaatggaaggggttggcaggtagatgtaaagaagaggcaactcccttcgcagcccaacccataccactctgtcccccactcctcccacctctgtccagaggccccttctctggactagatgggctctcaaacttctgtgttgcctttcttccaattaggcaggctacaaaccatcagagccatttgttgtttgttccttgaggaagaggcagtctatcacaactctctgattcaaggtctgtctccctccctgaaaacaatcccttcaggatgacccccaatcagaattcaattcccaggcccaagttctggggttcttcccctcttctcagctagcttccttaaacagggcttaaacatgacttcttgctgcaggaacctgtgtctcttactgctcagaaggaggcaggtaggagcagagaggcctcaccatctgggcgatgccacggttggtaaggatgtagcgggcgtggatcaatccataaagcatctcggctgcctgctcaatcaggtcactctggttggggttgtcttccagttcttcatctgaaacacagcccggccaaatgcaactacttgtttttcagctttcctaggtgccctgcccatatccaggggctgcgggctattcagtttgcctagcacctacttttgggccttaccccatccaacatctgggcatgggacccagaaacctgggcttctgacccttgcatcaaacgaagacagctctgccttcccttcacaccttttcagcctctgctccttgctctccctcccaactccctcctcaatacataactgcaacaatgtcaatgcagaagatgaaactctagactggaaggtgcaaagcaggagaaacagacaacaaaccagacccatgaggaaacgcatgaggtctgaattgcggatttagaaaacatgagaacaagtgatatacgtcacaaaactagacaagagtcaggtggaggatcaaaataaagcatgaatttggggttaaagaaatcagagaaccaaaggaaatttcaaaattcaggcaagtgaatagagatttgaagagaaaaatagtgcacgcacacacacaaaacaaccctgagggtgcctcaccaggctccaggtccaagatcatgtctagagcttgtcggtagtgagggacctgctcattgagtccagtaagattaaatttgtcctggatgtagtcttcatccacctgtcaggacatggaagccaagagggaacccatatcaaaatcctcatctttgacctgggcaaaatgctctaagtgatgccttatcatcaacacaactgcatctgttgtgcttgtttctcactcccaactcagcagaagtacttgtgtctctccctagttcacctacactctctcccataaaagctttggcttttcttttctaaggataagtagatacagcaatctttttcttagacattcttttcaagatctttgtccctactccactcctgtatcccgtctctaggaaccagttttgtcctctcagctggctaaggaaggtggaagctgaacagcatggtttctgaacaaaacatttcaatgtgtagcatttcagttttcctaaaggccacctgagacaagtactagcagtgccactttagtaacaaaagatacaggccgggcgcaatggctcacgcctgtaatcccagcactttgggaggccgaggcaggcagatcacctgaggtctggagttcgagaccagcctggccaacatagtgaaaccctgtctctactaaaaatacaaaaattagccaggcatggtggcaggcacttgtaatcccagctacttgggaggctggagcaggagaatcgcttgaacctgggaggcagaggtggcagtaagccgagatcgcaccactaccctccagcctcggtgacagagtgagacccagtctcaaaaaaaagaaaaagacacaaattgactagcccaacgttatattgctggacggtggcagactcaggacttgggccccagttttgccactttagcacaggttcgtcggggtttataggggggactctttgctgataggaagttttcaaatagcatgtaagagaacagtgtagaagtggaatatgtgaaggaacgtctggtgggaagatatgtgaagctggcaagtagggaggttgaagagaactcacttcacagaagaattcattgccacggagcccacagaaccaggaaatccaggacacctcctctgagctgctcatcttcacgtcagctagaaaaagaacagtgtcagtaaagctcaagttctccttccctgcctctggtatcctccctcctcccacattcggccctccaaccacgggagaattcggaaccaccctttcttaaagcaacccaaactctgaagcactcctctccagctcctctaatttacatctcagccccttttctttgaagttaaacattctttggggtcccaccacttgaaagaagccaacagatactttgacccaccagcccgacccacatccctggagctcccgaaggccagggccctctctcctctgtgtcaactccggcagggacctcgactcaggctccctaccaatacaagtctctgcatgacccccacgcctttcccaagggtttccaagtttatcattctcaagcaagaaccgggctcctccttttctcacgggttgggggcgattgtcaggtccctttcaccggaatccacacatcccccctccgctcctcaggccacctctccctccttcgtgccggacctggtcgcttcctcccccgcccccacatcaaagtccggagaccccatgtgccgctcccagcgacaagggactcggagcagcgacgacttcagactcaccggctggacggggaccaggactggggtggggtagggaagttgctacttccagggaacggcggcgaccgctacagcgcaggccgcggacccgaccgcggcaggcgaagtggggtggggggagtggaaattagggagggtggggaagagggcaacacgcaagcgccaagggtcaggtgccgcggtggatgccgggacacggagtccccggtagagaaagaaactggctaaatgagagaaagcgaactaccaatcccaggatgacccgcgcacgacctggctgtcacgaaggcccggaggagggcgcttgcgggcggggcacaacgagaagccaccggaagcggaagccaggtatggcgttcggggcccgggagtctgggcaatacagttttgtgctcactgggtgaagaggctgacttagggcggggaaaggaggaagccaggctggatctctttccgcagctctcctcacgttcccctctagtcccggcgcggcgctgctgcccaggggactggcctatcctcggccaatccgctgggtccttattgcctgttgggcccctagtgcgaatcagtcccgccagagacccttgacgggcatactgtttcctccgggctcctgcctcatgaggggagaggtgcggcttggctccgtgcgtagggacttgggtggggtggggtgggcggtgtgagaactggaacgtcccagtgcgctaacctgaggtggtgccagccattctgctcgtccctttgcacttctccatttccccttaggctctaagtgtgaccttcgaaccctggtcagagtaatggtgaggggcaggcgtgacgttatttcattacacggcttctcggcattccacaggtttccctccgcctcctgagggcctttcctaacccacagagtggattcctggctccagaaaatgggcttggagcgggggccacgttgaggaaggcgaagggcattgtgggggcgttatgtaaaagtaggaccccaaccgacagatcctagtgctcgcgccacctgggcgcgcggagctttgctcgtttactattgaaaaagttccagcgcgggaaactgaacccggagctttgcgcacgcccgagccctcaagtaatgtgggttgtggtttttgttgttgttgtcgccacgcatgcgtcttcgtgccgtgtggctatttgattgtgtcaactcttctgattagaatggcgccattttgcggtacggaagctacacagcaacacgtataggagactctccccgagatcttctagggagtgacccatctatttttgtttgggaagaggaaactccgaaatgggatcgcggaagacttaaagggccaggctgatttttttttcctactggtatgtcttacggggtgggaaagtggtttcagaaagaggctggtgtttattgttggtgaggatgggggtgggggccggacgcaggacctctggacaacagtctcatggagttttattaatctttactaaggagcaaagtcggtattgtagggttccatgtttttacgcaaagtctctctcccttaggccctgcagagtcctaagttgtggggttactttagtggcaggaaagtgtttttgactactttttctcatcccagcaggtctctgaggctgtggttgctacagggtcaccacgagcttggcttacttgtctcatccttcccttgcctggtatcattttctcagttctcccaaaagccatgtcccggcccttgctcatcaccttcaccccagccactgaccccagcgacctctggaaggatgggcagcagcagccacagcccgagaagccagagtccaccctggatggggctgcagcccgagctttctatgaggccctgattggggatgagagcagcgctcctgactcccagagatctcagactgaacctgccagagaaagaaagagaaagaaaagaagaataatgaaggcaccagcagcagaagcagtggcagaaggagcatcaggaagacatggacaagggagatcccttgaggctgaggataagatgactcaccggatactgagggcagcccaggagggggacctgccagaacttaggagactgctggaaccgcatgaggcaggaggagctggggggaatatcaacgcccgggatgccttctggtggaccccactgatgtgtgctgctcgagcgggccagggggcagctgtgagctatctcctgggccgtggggctgcctgggtgggggtctgtgagctgagtggcagggatgcggctcagctcgctgaagaagctggcttccctgaggtagcccgcatggtcagggagagccatggagagacaaggagcccggaaaaccggtaaggggaaactttagctcagacccatgtctcattgtgttctgcctctcccagccacaccacaccagacgccccagcacagtgctgaagagttctttccttatcctcatgtgtaggttgacagggtagtatagtcaagtggttataaacatgagctccctggatttaaagcctgattccacttacttgggcaaacaacctaatgtctacatgttccagttttctcatcttagaaatgggggtagtaagaatcgttgttaggattcaatgggttaatatatgtaaaatgctagaatagtgcatgccgcatagtatgcaatacatgaatgttagctatagtcattatgactaatgtccctccccttgcccaagagtttgctaggtctggttaccatttttttctttcaactattctgctctggatcccacaatggtttaaagaaatttgtttttaagacaagtcaagtgcagtagtgagaaggaggggaaaagtggagtaaggagtttgatctgtaactgagtgaacaattaattcagataactcaccaccacctttggaccagcctggatccctcactgttaagtaggaaggaaggcaatttgtccctttttttttttttttttttttttttgagacaaagtctcactcatctcactctgtcgcccaggctggtgtgcaatggtgtgatttcagctcactgcaacctccgcttcctgggctcaagcatattttttgtagaaagcaggctttgccgggacatggtggcatgtgcctgtaatcccggctacttgggaggctgatgcaggagaatcgctaaggtggaagttgcagtgagccaggatcatggcactgcactccaacctgggcagcagagcaagactccatctcaaaaaaaaaaaaaaaaaaaagcaggcgttgccattttgcccaggctggtctcaaactcctgagctcaaagccatctgcccgcctctgcctcccaaagtgttgggattacaggcgtgagccactatgcctagctggcaatttgttccttagcagaaaagctgaaaagatcctattctaccctgccagccccctctgaggcctcaactcttccccttttccttcccctgcccttaatgctttttcttctttctctgcaggtctcctactccctccctccagtactgcgagaactgtgacacccacttccaagattccaaccaccgcacatccactgctcacctgctgtcactgtcgcagggtcctcagcctcccaaccttccacttggggtgcccatctccagcccgggcttcaaactgctgctgagggggggctgggagccaggaatggggctgggaccccggggtgagggccgtgccaatcccatccccactgtcctcaagagagaccaggaaggactaggctacagatcagcaccccagccccgagtgacacatttcccagcttgggatacccgagctgtggctgggagggagagaccccctcgggtggccacactgagctggagggaggagagaaggagggaggagaaagacagggcttgggagcgggatctaaggacttacatgaacctcgagttctgactttggtaaagtctgaccctagtctgctgctgaagtctgaacttgggcctctgacctgggccctttgacttccccttcctgggatctgcccagatgcagatcctgaagtttttggtcaataggctctgtcttcgtgagagacgggctgagagtcagaaataaatcaaccatttgtggtttattcacttttctggaagctattttgaggaagccaaacagaagcctgggagccacatgcaagtcccacctgagtcagaaggggcagcctctccaggtggcatgataaggtcacctccctgccaatctgggttcactttcaggtcccagaccctcctgggagtcccccacctattctttcaacccccctggaccaagaattgcccagcttcgtgcaagtctcacttcccccaggaggagttccctgactacagccaattcactgatttcacaaacataagtccatatactatgtgccaagaatacaggtaaagacattcccaaccctcaaagagttcacagctggagagggaaagtgccatgttatcaatttttttcttttttttttgagatgcagtttcgctctcattgcccaggctggagtgcaatggcatgatctcggctcaccacaacctctgccccccgagttcaagggattctcctgcctcagcctccccagtagctgggattacaggcatgccccaccacgcccagctaattttgtatttttagtagagacggggtttctccatgttggccaagctggtcttgaactcccgacctcaggtgatccgccggcctcggcttcccaaagtgctggggttgcaggcatgaaccaccactcccggcccatgttatcaaatattataatgcagggtgataagggaagtcaaggcctctagagatgagaatgggtagggttttgctggaagaggccagtgtgataggagggcccacgattatcaagcttgtacacttagttgaactgggaccagaactctagcccccaaatctaaactttaagtcaaacttctttgttccacccatttgtctacacttttctttcccacacttccccactctcccaccacccacccccttgtcttgctcatgccgggtggtaggcacaagaagagctcactgttgtgaaatccaggaattcaaatttgcagacgggcaggggagggctgttcaagtcgcaagactcctcattttttcttttctgggaaagcctttcatgaagtcttggatgcgaaatggaggagtggtgggggatgtggaaaagaacccaggggcagggggctgtagggggcgaccgagtttagggaagcatgagaaacccgggaaaatggggagctgggtttatattaaggtcctggtccttgctaatctcggtttggcggtccggcgcgcacagacagcgcggggtatacgggggcggtctattcgcagggtccgccccatgagctgcggcaccgcccccgcgggtccttccagtcctggtgcagctgcttccgggcttcgcggctcccggcggctccccaaggccgcggccccgacgctgggcccgggagcggtccccgcgcacagcgcccggacgcgtaggtcccgaagtaggcccgcgctttgcttcgtaactggggatctctgaggacatcttagttctgaccttgtggaggccgcgtctctgctgcgtgttcgcgggccagtcgggccactttgtagaaatcatagccctctaaatcaagggacgaacgctgctggctggagtttgctggacactttcattccacctcctaacaaagagaattcctattccttgaggtcccttggggcagcagttaaagactacacgatccaggagcacctaggacctggggccaccttcctgcccgctttattggatggagcactgcctccccagtttctgggacaccgtggggtgtggccttggtgagtgaaacttggggtgctgcctgctgggaaggaaatccggaaacgcagagaggactctctggtggtgacccaggccttgtcagatctgagattcttggaatctcagattgtgggggtgtggatggtgaatgaatttgggtatgcccccctttaccccagaactgaagaggaagcaaactacttgccacacttgaggctgcatgactattcagagaagggaggagccacttctgaattcagagtaggactgcatcaccaggcaaatacctgttctgagccagaaagactctggcttctgaggagatcctgagagtctgagtagtgccaggaagcagcctcagaatttgggggcccattacacaccccagccatgttcctgcgacggcttggtggctggctacctcgcccttggggccgccggaaaccaatgaggcctgacccgccttacccagaacccagacgggtggacagctcctcggagaattcaggaagtgactgggatagtgccccagaaaccatggaagatgtggggcatcccaagactaaggactcgggggcattgagggtttctagggctgcttccgaaccaagcaaggaggagccccaagttgagcagctagggagcaaaagaatggattccctcaagtgggaccagcctatctctagcactcaagagtctgggagactggaggctggaggggccagtcccaaactcagatgggatcatgtggattcaggtggcaccaggagaccaggggtgtcccctgaagggggactgagcgtccctgggccaggagccccattggagaaacctggtaggcgtgagaagctgttgggctggctgcggggggaaccaggagctccctcccggtacttggggggcccagaagagtgtctgcagatctccaccaacctgaccctgcatcttctggagctgctggcctctgccctgctggccctgtgctcacgaccactgcgggcagccttggacacactgggcctgcgtggaccgctgggcctctggctacatggcctactgtccttcctggctgccctgcatgggctccatgctgttctgagcctacttactgcccaccctttgcacttcgcctgcctctttggtctcctgcaggccttggtgctggctgtcagcctccgggagcccaatggggatgaggcggccactgactgggagagtgaggggttggagagggaaggtgaggagcagaggggagacccgggaaaggggctgtgaccgtggggtgggggcaaagggtgaagagagtgtgggctttaggagaaaagtgtgaggcatgacccaaattgtaagcatagggacctcagggatggggaagaaacccgagtacgagggtgcagggccccccttcatacacaggagagaacagaactatttagggtgtttgtgtttatggacagtgagggcactgctcttggattcaccagctgttatttttgcttttacttttctcccaccttcagtttttttttttttttccacctccactttttaaaagcaaaaaaaaaaaaaagtatgatggtggtgaataaagaccaaagggtcctctctacctttgaaaactctcctggggtggaggagaccagggcaggatagacagacctctgcagtaagagagtggttgggaaacccagggtgttccttggatctcaggatctgagccatcgagggaagagtggggctgctaggcaagtggattagggggtctggatagggccccacaggtgacagggagcctgcagggcggatctggtgatcatgggagccagagggagtggggacagtgcaggcagtattggcaggagggccagtgcagaagggctggtagctcaggcagtgtgggggaagcactgaagcctgtagtccccacttgggggctaggggtttgctcactcagcaataaataactgtgtcacatcaaatcctaaatataccactacaaagtgagagttactgccactctgttcttactgacaccgtccagctgggagtttaggtggtagaggatccagggggaatgttgaaatgggaggagtgggaatgacgtctggagacaaaccccagaatgagatgaggattgaaaaattatctttattatcttgagtgggagctggagctggaagtctccagcttctccctccaacaactcagctcccattgtacccatctggggacttagatgaagttacaggtcagttattggacagctcacaggcctctgtgatggggggagggaaaaagaaggacagaagggaagtccagggagaaaagcaaagttgatagtaatggggtgggggagaacgtgttctttcattccctgtgtcaaaggggagtctctaaggctcttttccctccacgtatgaccctctgccccctttatccagtgcaaactcagaaacctctcttttgagtagcccagaacccatcctgcctccctcaggtgacatcacagctcttagccacatccctctggtgacatcacacgagcctctttcaccctgtaacaccagaagactttgtgagtcctaatcctgttttatgagattttaacaccttaccttgattcctaggagtcaataagaaggctttggagtccaggcaggaagtcagggacttgaattcctccacacacttttcgggaggatgtggtgagcgatctggaagggcaaggtggggtcaggccagtcaaaacccctggaagcacctagctcttcctgggagggtgtcataggacccagagtgaggagttctcctgccctcccttgtttccctccaacccttcctgccttgtatccctactcactgtagaggagaaagcgctggtaaccctggcctgtctcattcagcatgattccacctgggcatgagctggaaaagagctcagtcttcatgtcagggcggcctgtcaaggcaggtgggagaagtatgagaacagagatgcagaaccaaactcaagggagggtgagggctgggaagaaccaaccttcagttctgagatctgtgctcccttcagtcaggtggtagatccatttccggggcacacagagcccatctttcctgcagaggtggtggtggcaaggaggaaagaatgagcatcaccccaaccatagtgtcccagcttcttttttttttttttgagacagagtctcactctgttgcccaggctggagtgcagtggcgccatctcggctcactgcaagctctgcctcccgggttcacgccattctcctgcctcaacctcgtgagtagctgggactacaggtgcccaccaccatgcccagctagttttttatatttttagtagagacggggtttcactgtgttagccaggatggtctcgatctcctgacctcgtgatctgtccgcctcagcctcccaaagtgctgggattacaggcgtgagccaccacgtctggcctgtcccggcttctatttactccattgtatttgttattgaagcccagctctccttgggtttcaagctaccaagcattggttaggcacatctttctccagagggcaattaatacagccactgaattccgtgggccaagcatagtagatataccagctaagaggccagctcttggtgggtggattctcacactttgggcagagactgaacccagtgatgcttctgcctccttaccactcacatgcggatggtagcacgaaggtggagctgcatcggggcagagccagcagccatattgaagacaatgttgtccacagggtcaaaagttgccaactcctccttggtgggagctgcccctgcgataaagtaccactggcccaagtggacctctgggaactggagagacaatgaagggagcaaaagagggtgggttccagcacaggatgggttcaacctcttcatcagtcaaaacagcaagatttaggggtagaggtgttggctgccttcctctttccaactggggattggatccatgacaaagagtcattaaatgacttttcctctttgcccctccccagtcaacctgggtaaccaccccaccccccaattctgccatgcctctgcattgatggccacagtactgatatttttcttcttgctttcattatcacaacactcacacccccttcctctcttcctttcccaagatggtctccagtcatcctaggccatccacccaagtccctcagagcctccaccataggcttcccctaatctcagtccatacctccttcccatccacgcccagagttgtcagttgactgtgctcagggcactggtagatggagttaaggataataccatagaagtagagcagagctgcccaaatttggtggaacatcttcaggcaggagggagctggtgctctgtgtgccttaactgctctctcccctactggctgctcagtccactctgctttcagctcccttgcgttcgacccttgaccctttcacctgctaatgagtaacttcaaccttgttttccaacccaaacctggattacttagtgtttgggacttcctccccctcttccggatgcaaccactccatagtacaccctggcatgtccagggtttctcaggagttatgaggagagctgagctgtccagggagaagcctgtggtctttgaacctgtatctgagctggttatttgttgcactgtgcagcactgaagggaagtagcttgactgggcctctcattcattcacttagcaaactgttttgaatcccaagtcccagttgtttcccaagaactagctaatccccggggacataaaaaaacgaataagacatagcccctgatcttgaagaagtcgttagagggaaaactagctgtgtagacaaaccattgcaatacaacttggtaaatgctttagaacaggtatgatgcaggtgctggggcacggtggattgctctctttagtttacaattagaaaaatatgtataccctggcagtgttcactgacacattcactcaacatttattactacaaagaggctatgtaatctggctgttagagaggatagatgttggtgtcaggcagaatgtgtccaaaccctaactacaggcagggcaggtagctcatgcctgtaatctcagcactttgagaggccaaggtgggcggatggcttgagcccaggagttcaaaaccagcctgggctacatggcaaaactctgtctctacaaaaagtacaaaaattagccgatgtggtggcacacgcctgtagtcccagctactagggaggctgaggagggaggattgcttgagcctgggatgtcgaggctgcaatgagccctgattgtgccactgcactccagcttgggcgacagagactctgtctccaaacaaacaaaacaccaccaacccctaactgctatgtctgttttttcatctgtaaaattggcaaatcatcaatcttataggattaaatgaaataatgcacataaagcccttagcaaagacttgcacatggtaagtccaaagtatatatttgctataattaatagtaatgtttgcaaagcacttagtttctggtgggtaataagttctcaaataataggcagtaagaattgccaaataggttgtccttggatagcaccaagtgactggagcagttaatgctgtgagagatggatcttcctcgatagattatttatttacttatttatttttaagacagggtctcactctgtcgcccaggcatgactttgacttccccggctcagatgattcccgagtaggaggtataggtgcacgccatcacgcctagctaattttttgtagacacggagtttcaccatgttgccccaggctggtattaaactcctgagctcaagcagtcggcccaccttagcctcctaaagtgttgggattacaggcatgagccaccacacctagcttgataaatttatatcccatggactgccacaaaaaatttgccgagggctgaggcttgcgatttagttaaaaaacaaacaaaatttgggtgaccagtatattagagtttattaatactgttctattttggtgtaatgtttgcattttttttttttttttttgagatgggagtctcgttctgttgcccaagctggagtgcagtggcgcgatcttggctcactgcaatctccacctcccgggttcaaagcaattctctgcctcagcctcccaagtagctgggattacaggcgcccgccaccacgccaggctaatttttgtatttttagtagagatggggtttcaccattttggccaggctggtcttgaactcctgacctcgtgatccacccgcctcatcctcccaagtgtgagtcactgcgcccggccgaaaatttttgtaataaaaagctaaaatgtggttaggcacagtagctcacacctataatcccagcactttgggaggccaagtctgcaagaccaggctgggcaacatagcaagaccccatctctataaaaataaaattagccaggtgtggtggtgtgcatctgtggtccctactagggaggctgaggtgggaagatcggttgggctcgggaggcagaggctacagtgagttgtgattgcgccactgcactccagcctgggcgacaaagcgagaccctctctcaaaaaaataagctaaaatgttaacagctttttattggggcagtaaagtacaagtgctcgatctggagtcctgtaggcctggatttgtcaattctgacacttatgttcgtctaagtgtactcacttaaaaaatgttaaaagctcgttaaaaggctttttaaaataatacacaaaacccgtagtatatgggctggcacaagtgctcattaaacagctgcttattagaactcttaactaaaatataaccaggacctgggtataaactacgaatcccagaaaggttggacaccccaacagcgatgtgtctttctggaggactcgcagtttcgcggggccgaggcccttggcccagggcaggttaagagaagagggcacggagaggaggtaatgcctccacccccggccttcggaagcacgctggccggcctttaaattccccacggtcagggtcttgtctttctgtccactcggactccatttgctcccaattctcaaactcggaagcgcctcttttcttgacaagtcgtgcaacttagtagcacgtttacttttcctaaaacgtgtcatgtccccttggccacacaccgacgaatgtgacgcccacagcccttaaaacgcccacccggcagaaccgaaatctagcccaaccaagcaaccgagaacaaaattgaccagtgccgcccccaaacgcctactgaaagagtaacttccggaggcacagaagaaagggcgcagcgagggcaatagggtggagaagagttttagctggctaggacagtgccgcctgaaattatcagcctgccaagatttaaacatagatgaatgtggcataatcccccatctccaaagtccaaggtccatacgaccgtccatagcccctctcgaggcagtggtagagtcccagctggtgactgtttttcaggcatttacggtagccacctcaatcttctagcgctcaagcgcgcgcacagacgtgaacgccgccagaggggggagggggtggggcgatgcttaagtgtccacgcatccgtagtgcgacgcacgcaggcgtagtacggtcccccgggcgacagcggtggcggctcctcggggtgctcggctccctcccacctaggccggccccggcccgactcgccctcagaaactcactgtttggggctgcggactttctcgtcgtgccccacaaaagtaaagcttggggacctggggggagccggaagtatcgcttcgagatccccaaatactatcggggaaacggaagtggccgtcggtggcaggtttgggggagaccggaagtgacggtccgtggggaagtcgggggcggagccgcggggtggtgggtgtgtgtgtgtgtgtgtgtgtgtgtgtgtgtgtgtttggctgtgggttagttgtgccgttctgctggaacaccgtgggaaggcagtagacgcgggcagtcagctagcaggtccgtcgccccgtgagtgccgtttcgggtctatagtgagttaggagggttcgatgggcgtggcgcgcgtgcgcgaaaccactttctccgcagagtgtggggcgaccaccgctttcgcgttgtcccaggattttccgacctctggggcgcttgtcctgccgtgaccggtgatgacactagtctctggtctcgtgcttccttcctaatctgactggctccctgcttattgtgattggcgtcgtggagcccctcccacctctcgtcctccagctccctaagccgtcgatctcctgccctttgtgtttctctccctgtgccccggaatcagaagggggatggggacaggtgtgaatgtgtgtgtgtgcaggagaaactttttaggtattggggcagggattaatgctagggagtctttcgggtacactctggtctgggcaacagcgggccttccttccttcgttcttctttagagacctgtcggccatggagcctaatgatagtaccagtaccgctgtggaggagcctgacagcttggaggtgttggtgaagaccttggactctcaaactcgtacctttattgtgggggcccaggtgagacacctcactagttctggaagacacctttagcttttcctcgtttaggccccttagcctgagagatgagcttgattttctggtcaccagattttctttttttttcttttttttgagatggagtcacgccctgtcttccaggctggagtgcagtggcgcgatctcgactcactgaaacttccacctcttgggttcaagcgattttcctatctcagcctcctgagtagctgggattataggcgtgtgccactatacccagctgatttttgtatttttagtagagacggggtttcaccatgttggtcaggctggtctcgaactccttacctcaggtgatgtgccctcctcggcctcccaaagtgctggtattacaggcatgagccaccgcacctggcctcagattttctttttattgatccctttgttcgtattccagtagaacgttttctgatgttttgtgagtgaggctgattttgttctgtcctccacatggatagaacttaatgcagagggaaatacagaggaaggaagaatctgtgtgtcatcatcatgggtggaccccaacccaaagggacaggcatggctctggcctttgggaagggaaacagcacaggaaccctaagcaagtgtgtcttactgatagacattggtcaggtctatgctgtgtttttaaagggtagaaatcagaacccataatggagataggtccttgatagactgttgagtgaaattactaatttttatggcatagcttgagtctcttgagcttaaagccttggacatagctatctgtgtctttactcctgtaatacttggagacaaattgcatgtggggtggtccatggttttctaaaatgtgatactacctggatataagaaagccatatatagacttgtgattagatgtatataaatactctggtacttcccaagagtcagtttgtagttaggaaaaatatttctctttttgcttttttttttttttttgagatggagttttgctcttgttgcccaggatggagggctggggcgcaatctcagctcactgcaacctctgcctcctgggttcaagcaattttcctgcctcagcctcctgagtatctgggattacagacgacgcctactaccacgcccggctaatttttgtatttttagtagagacagggttttaccgtgttggccaggctggtcttgaactcctgacctcaggtgatccacctgcctcggcctcccaaagtgctgggattacaggtgtgagccactgtgctgggaccttttttgctttcttatcttcttagtctttcttcagtaacctgataccagaccccatcttctttgccattttttaatcttggaaatcacaggagagtctggtaaataaactggtatcatcttgtgtttggaaaggggtcactgatgtctctagacacatactcccttggatgccagacagataatataatgtccatgtggtttttttttgtttttcatccgtgttatttttcctggatctataacctgagcttcattaagtttatttatttaattttttgagatggagtccctctctgtcacccaggctagagtgtagtgatgcgatctcggctcactgcaacctccgcctcccgaattcaagtgattctcttgcttcagcctccctagtagctgggattacaggcgaccaccatgcctggcttatttttttgtatttttggtaaaaaaggggttttaccatgttggccaggctggtctcgaactcctgacctaatgtgatctgcctgccttggcctcccaaagtgctgggattacaggtgtgagccaccgcgccaagccaaatttattgtctgtattttgacagctgttactttagtttaagggtttgcacagtaatgatctcacggtcaagacaaacgggtagtgattctgtggtggtttttacccctcacctccacaactcggttgtctgtctttgttcttcctctttcctccattctttccattcctgtgcatgcctcttcttttcagatgaatgtaaaagagtttaaggagcacattgctgcctctgtcagcatcccatctgaaaaacaacggctcatttaccagggacgagttctgcaagatgataagaagcttcaggaatacagtaagggggctggggaggcagttcagaggttggggctactgtctggagggatgaactgaggccatgggtttacctgttcatactatgttttggtgtgtgtctatttttctgcagatgttgggggaaaggttatccacctggtggaacgggctcctcctcagactcacctcccttctggggcatcttctgggacggggtctgcctcagccactcatggtgggggatccccccctggtactcgggggcctggggcctctgttcatgaccggaatgccaacagctatgtcatggttggaaccttcaatcttcctgtaagcttatgttccacaggggagggcttttgtgggtagctttggttgtggtagcaccagggaattaataagatagatgcttccatctttagattgggttcagggggccctgtggtgtgctattggtctcagtctttaaggagaaaaggaggtagggctccagggaatgaattggaggtgtggaggccttagtgttggcttctcccagaacaacttcccttaccctttccccagagtgacggctctgctgtggatgttcacatcaacatggaacaggccccgattcaggtattgaggggcctccgagggtcagggaaggggatctgggagaaggaggctgggaggtggggtggacctggctgagagatggctgggacctgatttagtaggtggtagaactcatggcttcatctgtaacctaccctgataaaccttctctcattgtagagtgagccccgggtacggctggtgatggctcagcacatgatcagggatatacagaccttactatcccggatggaggtaagtgggcaaggctggctagggtctctctccaccctccctctcccttttctctcagcctgggagttagggcttcactggccacattcacagggtttggccttcataatctagtcttctctgcagtattcattcttttgggcagaaaaagtatctttgtgaggctctctcatttctgccaatcctcttggtgcctggtatctggggagtttgtttcagacttagtctcatggcatctcttttcaattaaaggattctactctcttaacttgtggaggctgggaaaccaacttgtggaggaaaggaaaccacaatctctactctttgttagaaatttatttacaaatattacagatgctgtggccgggtgtggtggctcctgcctgtaatcccagcactttgggtcgccatggcagggggataacgtgtggtcaggagttccaatccagcctggccaacatggtgaaaccctgtctctactacaagtacaaaaattagttgggtgtggtggcacgcgcctgtaggcctggctacttagaaggctgaggcaagagaatttcttgaacctgggaggcggaggttacagtgagctgagatcatgccactgcactccagcctgggcaacagagcgagactctgtctcaaaaaaaaaaaaaaaaattacagatgcttattatgcatctaatttgtgtcagtcttatgctagttgctagcgagtcggagataaaattgcagagccatgccttcagggagtctagttaggatactttctctgttcagtctcctgtagagtaatcctctgcagcagtcttaccctgcctttggtatcctgactctcccctaccttcagtgtcgaggagggccccaaccgcagcacagtcagccgcccccgcagccaccggctgtgaccccggagccagtagccttgagctctcaaacatcagaaccagttgaaagtgaagcacctccccgggagcccatggaggcagaagaagtggaggagcgtgccccagcccagaacccggagctcactcctggcccagccccagcgggcccaacacctgccccggaaacaaatgcacccaagtgagagatggagggaatctttagtgggtggggaatcctaagtgaagtatggggagaaggaaatgaaccatggcaagggagggaaaggattacttggaggtcttagttgaagggttagcattgaggggcgaggaggggctctctcggtataggtaaatgacgctaggacaggcagctgagaagaactgctgctctccctatggcaaggaaatccaaatggtatctcctgagcctgatcggaattctcctctgagttcacgaaggcctgctctctttcttagaattagtctttcaccattgtaggtgcaggattgtggtggggagggtgggagcagttcattttcttctccctatcctctcatgggtgggagtaaagaatagaagctttggctgggtgcagtggctcatgcctgtaatctcagcactttgggaggcagaggcgggcagatcacctgaggtcaggagttcgagaccagcctggccaacatggtgaaaccctgtctctactaaaaaatacaggccgggcacagtggctcacgcctgtaatcccagcactttgggaggccgaggcgggtggatcatgaggtcaagagatcgagactatcctggctaacatgatgaaaccccgtctctactaaaaatacaaaaaattagctgggcatggtggcgggcacctgtagtcccagctactcgggaggctgagtcaggagaatggtgtgaacccaggagacggagcttgcagtgagctgaggtcgcaccactgcactccagcctgggtgatagagcgagactctgtctcaaaaaaaaaaaaaaaaaaaaaaaacaaaaattagccgggtgtggtggcaggcaacttaatcccagctacttgggaggcagaggcaggagaatcgtttgaacctgggaggcggaggttgaagagaatagaagctctgctggtccagagaaggattgggccagggctctgggagaccagggagaaagagggcacatgtggtccctgttgactgtgagggtgggaatctgaggaaggctttggctcattgccccttgggtttgtccacagccatccttcccctgcggagtatgtcgaggtgctccaggagctacagcggctggagagtcgcctccagcccttcttgcagcgctactacgaggttctgggtgctgctgccaccacggactacaataacaatgtgagccctttgatggccctgccctttctcctcagccccagtactcccaaaacagaacaggctgaaatgcagataactctttccctccctggaaaaacattgcaacagggccaggtgcagtggctcacgcctgtaatcccagcactttgggaggccaaggtgggcggatcatctgagattgggagtttgagaccagcctggccaacatggtgcaaccccatctctactgaaaatataaacattagctggatgtagtggtgcacacctgtaatcccagctactcaggaggctgaggcaggagaatcgctagaactcgggaggagggggttgcagtgagccgagattgcactactgcactctagcctgggtgacagagcgagactgtctcaaaaaacaaaacaaaacaaaaaaacacacattgcaacaaaacaatttctctctaaacctgtaagtgattttgtcctcccttacagagaaggtgataatctttgctgtaagcactgtcctcgtatcgtaccccttgtgcccctgaatgaatttagaaaatgtaaagtacaggagatcagtatatgatgacttactgattcatagtagtgttttaataggatgttccttatgtgaataagatataatttatttgcaaagatttggtctacatgtaaacttccaaggatataactgaaagttttggaggacatggtattctcagtaggcattattgcttttattagtgagatggactccagcttgatattttctgcctttttgtgtttggctggttgtgcgcagcacgagggccgggaggaggatcagcggttgatcaacttggtaggggagagcctgcgactgctgggcaacacctttgttgcactgtctgacctgcgctgcaatctggcctgcacgcccccacgacacctgcatgtggtccggcctatgtctcactacaccacccccatggtgctccagcaggcagccattcccatacaggtgggttagggggagtctggcctgagggagagtgaggggtgttgatagagtgacccagggtagctactgggcctgaaggaggttaggaaaggaggagactggaaacatggtgatgaaggctggagatactttagaggtttatcatgaggttttcttggttaggctcttgtatttttctcacatctgcctgtccatctgtctttttcagatcaatgtgggaaccactgtgaccatgacaggaaatgggactcggccccccccaactcccaatgcagaggcacctccccctggtcctgggcaggcctcatccgtggctccgtcttctaccaatgtcgagtcctcagctgagggggctcccccgccaggtccagctcccccgccagccaccagccacccgagggtcatccggatttcccaccagagtgtggaacccgtggtcatgatgcacatgaacattcaaggtgagaatagttgctggcgagaagagcaggatcagcatgatgagggaggttcatgctgaggtgtgagggaacagggtggggaagggagaggcacatgctggtggtggtagcctggggaccagagcagaagcttaagtagacagatgtggggggtgtgggggttggtttgtctttggaggtgtgtttgtgtggtgaagggagtacctctccctgtttagatggagggaaaggcaggctttctgattgggggattatgggcctgaagtatgcctgatctcagaaggatatagttaggccttggccctacctacctcagggccactgtctctgtctccctgcccagattctggcacacagcctggtggtgttccgagtgctcccactggccccctgggaccccctggtcatggccaaaccctgggtaagagtgagggcatcagggcaggctgagctctgggtagagaaagggaagggctgagtgggtgggttgaaggggtccaggttcaaggttacatcagacccgccccccaggctccaccctcatccagctgccctccctgccccctgagttcatgcacgccgtcgcccaccagatcactcatcaggccatggtggcagctgttgcctccgcggccgcaggtaatgacctggaaggggaggcttgggaggtagggcacagtccatggtggcagctggctggcaagggcctggccctcagccctcttcggtctgtctcttctgccacccacaggacagcaggtgccaggcttcccaacagctccaacccgggtggtgattgcccggcccactcctccacaggctcggccttcccatcctggagggcccccagtctctgggacactggtgagcaagggtcggggagttctagtgcgtaacagtctagggagagactcctgtggtggtgcatggaagggcaggtctgaaattctcccttgctctctatccagcagggcgccggtctgggtaccaatgcctcgttggcccagatggtgagcggccttgtggggcagcttcttatgcagccagtccttgtgggtgagttttcattcttccccactcagagtttaaactcctttcctagtctgctcactggcactttccagttctttccatattttcttggttcctgctttcctggaatggggctgctgtagtgtcttgtgtcttcaggtttcagcttttttttttttttttttttttttttttgagatggagtctcactctgttgctaggctggagtgcagtgtacaatcttggctcactgcaacctctgcctcccgggttcaagtgattctcctgcctcagcctcctgagtagctgggactacaggtgcacgccaccacgcccagctaattttttatgtttttagtagagaagggggtttcaccatgttggccaggatggtctcgaactcttgaccttgtgatccacccaccttggcctcccaaagtgctgggattacaggcttgagccatcgtgcccggccagcttttttcttttttttttaagttacagagtcttgctctgtcacccagactggagtgcaatggtgcaatccagtgagttaaagctcactgtaaccttgaactcctgggctcaaacagttctcccacctcagcctcctgagtagctagcagtactagctcctggctagtaattgtctttttttttttctggtagagatggggtcttgctatgtggcctagactcctgggctcaagcagttctcatgccttggcctcccaaagttgctaggattacagccaagagccaccatgctcagcccagctttctttttttggtttcttacagctcaggggaccccaggtatggctccaccgccagcccctgccactgcttctgccagtgctggcaccaccaacacagctaccacagctggccccgctcctggggggcctgcccagcctccacccacccctcaaccctccatggctgatcttcagttctctcagcttctggggaacctgctagggcctgcagggccaggggctggagggtctggtgtggcttctcccaccatcactgtggcgatgcctggtgtccctgcctttctccaaggcatgactgacttcttgcaggtgagtggctggcttgccattcacctcatcttcctgtcccccggcccagccaggcagtggtaccttcttgccattatataaccactgggtaagagcccctagtgacatgttaggggaaggggccctgggaattcattgactctgaacctttcattttaaagatgaagaaaatgaggtttagaaaaagaaagtatagtaattagtgtcactgctttctgacagcctgttcagaggaagaggtaggtaagttgtgctgcctgactctgttaaatacctaccatacttctgctttaagcagtgaagatcagaatgtaactccccatcttcccagacccgttggtttgtgccctcttgatgccgtattatttccgtgtgtcttcattctcacctcactttctgttctttgttctttctttatttgccaggcaacacagacagcccctccaccacccccacctcctccacccccaccacctgccccagagcagcagaccatgcccccaccaggctccccttctggtggcgcagggagtcctggaggcctgggtcttgagagcctgtcaccggagttttttacctcagtggtgcagggtgtgctcagctccctgctgggctccctgggggctcgggctggcagcagtgaaagtattgctgccttcatacaacgcctcagtggatccagcaacatctttgagcctggagctgatggggcccttggtgagcaaaaaggatgctttggcttgctccaggaaggggcagccagaggaatgtagatggccttggtttaggggtgttgccaaggtgggatgaggttgatgatctggttgtgggtgggcaggccaggtggtaaaggccattgctaacatctgcccttgtcccccaggattctttggggccttgctttctcttctgtgccagaacttctctatggtggacgtagtgatgcttctccatgggcatttccagccactacaacggctccagccccagctgcgatccttcttccaccagcactacctgggtggtcaggagcccacacccagtaacatccgggtaaatgaaggccaggggccccagaactctcctcttttgcacattttattccttatttctgactgcttctctgccaggtaaagctccaattgcccccacacaagccctggacttgttggggtcgaggtggaagtcttgggaggactgaggctttgaactaaacctgttctgtttcctccacagatggcaacccacacattgatcacggggctagaagagtatgtgcgggagagttttgtgagtaacccttctctattcctttcctctcctgggtctggtcaaggcagctgcctcctccactcccagtcttatgattcttgattttgggatctttgtgttatcttgtctctcagtccttggtgcaggttcagccaggtgtggacatcatccggacaaacctggaatttctccaagagcagtttaatagcattgctgcgcatgtgctgcattgcacaggtcaggggctggccaggcgggggcaagtggggcctgttgcatgtgcagggctgccacgtgccagcattccctccttgtattttgcccacagatagtggatttggggcccggttgctggagttgtgtaaccaaggcctgtttgaatgcctggccctaaacctgcactgcttggggggacagcagatggagcttgctgctgttatcaatggccgaattgtaagcaccacctagccccagatccttagccttttgtttcctgaggtttccattctctgcagttttcatttttcttttctaaactgacattctgtaacctggatctaatctatttctaaaggtggttgagggttttgtgttctaaatctgctttctgtccctcagcgtcgtatgtctcgtggggtgaatccctccttggtgagctggctgaccactatgatgggactgaggcttcaggtggtactggagcacatgcctgtaggccctgatgccattctcagatacgttcgcagggttggtgatcccccccaggtaagggacctgttgggcgatggggtcagggtacttgagagaactggagagatctgagaggaagtatggtgttctttaatttcacagccacttcctgaggagccaatggaagttcagggagcagaaagagcttcccctgagcctcaggtactctagagagggggaggttgaggggccagataatgtggagtggagggctgggggagaaaggtttggaggctaaaaattctgaagcctggctcttcccgccatctgacacccagcgggagaatgcttccccagcccctggaacaacagcagaagaggccatgtcccgaggtccacctcctgctcctgaggggggctcccgggatgaacaggatggagcttcagctgagacagaaccttgggcagctgcagtccccccagtaagtgtcaggaagtaatccagtgggtcatggcagctgaaagtcaaggacattactattttctcttttcctccccaggaatgggtccctattatccagcaggacattcagagccagcggaaggtgaaaccgcagccccctctgagtgatgcctacctcagtggtatgcctgccaagagacgcaaggttggttttcctcttccctaagcctctctctctatccaggtttccccgtcatgcctggaatcaaactatgtagagatggtgggagctcttgttattcagtctcccctcccctcgtttaatgaggaaactttttctgggattcagacttgctcttggttgttgcataaccatacaggacttgaccttagtctgtttgctagcagtcctgtattagttgctcagctgcctaatccccatgtgcttagatcccattttcctttaaggtgggtttcctcttgtggattacctagctctgaatcccggatggcttgaccccttctgcctttcgttttgaagagcacgttcaagcacattcactttagttttggctagtgccaaagagaattaggaaggcatttctgctgtaaaaaccacatcctggactcttaatttcccctctctccactagcatggagactcagtggagtggttgactcatggaaagggtgagccggatggtggcactggatctgacgttgatcctcttttccctcccaaccccctgtcccccagacgatgcagggtgagggcccccagctgcttctctcagaggctgtgagccgggcagctaaggcagccggagctcggcccctgacgagccccgagagcctgagccgggacctggaggcaccagaggttcaggagagctacaggcagcaggtgccaccttgaagcagaatagggatggtctagtgggaggggttgggctagggtccctcttccctggatcccttcagcgatgaactggtcagcctggtgctaccatttgttttcccctttggcatctgggaaggcttgacagtgccaccccgggctatttgacagtgtgcttggggggggaaatgttagcttctgagggatggccttgtgtgcttgctgggatcatggggacttggccagcgtttctccaacctgcttactttttctctttagctccggtctgatatacaaaaacgactgcaggaagaccccaactacagtccccagcgcttccccaatgcccagcgggcctttgctgatgatccttagctctttgctctatggcccttcctcatcaggggaccgtttcccccctcttccttcacagtatttaagaaataaaagtcggatttttctggctgctttctctctacattgtctccattaggtagtgtgtcccttaatcttgtgtgaacttttttaaattaatacttccttggaacactgttgtgttctactcagcacgctaaattgtacaagccagttttgatgtttgtttttttttttttttgagacagagtattgctgtctcccaggctggagtgcagtggcccgatctcgagctcggctcactacaacctccacctcccgggttcaagtgattctcactcatgcctcagcctcctgagtagctgggactacaggcgtccgccacgacgcccggctaatttttgtatttttagtagagacagggtttcaccatattggccaggctggtctcgaactcctgaccttgtgatccacccgccttggcctcccaaagtgctggaattacaggcgtgggccaccgcgcccagcctgatgtttgtattttttgtgcgaaagcactttatatataaataaaaaacctgtattttgagttgggagcatattccaggtgcacactagcatagagctctcaaattacccatcaaaaaaagtttctgagcagctgcagacctaagtatagtctttagcataactagcatgcagcgttaccatgtgaaatcccacttagtttgacaatgctggaattggtctatccaattcaaagagccccttaagtgtgctccaacattgaggccttaacagagatttccccttagttcatcataaagaactgaagtcccatggctgcaaattctttgctagtccctttgagatgcagttgaagtcccttctaaacccccccatcccctaccttggctagtttagtgctctatcaactaagcatggcataagcttagaaaattccagctagacctcttggaacatgagctcacggacatttaacaggcctgctggagagtccatgtgaagacactggttgataacccagtaatgttacagatgtcccaccaaggccctagatatgcaaaggaagccatattgggaccagcccaggtgtcagctgcagactgataaccagttgacctcgctcactggcacaaaaaagcagatttatccagctgagctcagcccaaattccagactcacaaaaatttaaagatccaatacgatggtcatgtttttagtttcaacagctcactggaataagtaatgaatatttccctgactgaaactacagatcactcagcaccatgctttaagacaatgcaaacaactcatcccccaaatcattgtagaagtttttttttttaaatccttttattactcttttttaacaaacagccccagggacaggggaccaggggaagggggaggaggggaagtgaggccccagccccacaacccctccccgcccacccctttcccccttatatatttataatctatatacaagccccgggggtagggggcaagaggaactccctcagcggggtgggggcaacccaggctccttgtcccctcgggacccaggctcctctgcccgtcgggagggcccttctcgaggtggcagccctgtccgctcccaaggcttaggtatccagcgcagggcatctggtggggaggcctaggggacaggcatgtgttaaacagtgagtcacagtgagaggtcagcgatgagatggaaggacaggaaatcaggtggcaactcgaatttagagttggggccacaagggtttctccttcacctgctggtaaaggtcgacgcgctgggtgcggaagactccactgtaggtggaaggcgtggccttgagacgggaattgaggccagagaaggacctaagggaagaagggcgtctaaggcaagcctaggatccagaccctggttccaaagtaaggaagcacttggaaagtccacatccctattccgtttcaccttccagttgggggagtccgtgatgatccaggtcccccaaggttgctgctcagtttttgataatcctggaacggctttagttccactggatgcagctgaggggaaaaaaatcatgagctgcctaccttgaaatacagaatccctactcccaagtcttggcgctccctagcccctcagttcctgtaccttacctctgctcgccccaagctagcggggaagggcctggcaggtgaaggcagcacccgagtagcaggagcaggtgggggccgcacagccaggctggggggctgcagagcagggcccacaggtaacagagaaaggggaggtggggcaggaggtggtgctggcggcagggagccaaagttcaccacaggcagctgtgagtctaccatgggtagaagcatctgtaacaagaaatttgggtgtgcatgttgggggcagggaggaatgtcagaaaaccagggaaaatcaaagccagcaactggacagagaaatcaaatgaaggggaagtgtgaagatacaatatacctgctgggcaggagcccctgaagggagaaagccactttggccaccaggctgcagaggagtagaataaaaatccgaaggggatggcagatcctggcgtacctgtcgggaaacagggagaaatatatcaacccccacaaaatcattctccctaccctatcccccaatatctaatacctgcccccctcttacctgaagcaacgatgtgtcaggcaaaggactggggcagaaagccggagagtagaggaaggaaggtggagggtagagaactcctccagccggcaacttccccagctctgtagcttgcattgtggagaaatccagaaactggcccttgagagctaccccagagagcagtgctgagggaggggctgggccggggggtaggtataggggctgtgatctgaaaataaattgtggggagaaaagctgttaggaagccagagtcctagcaatgccttaagtccactagcttctagtaccctagaactgtgtcttccccttccctctccccgaaacacatctccaagtacttctgtgatccacaggcatcgagtcttacctgtaagggtgcagtgagggtgtcccagggcggaagcctccactgtttggatgtaattgagagtccatggctcccccagagatctgcaggagaggagcacggttgaaacagctttagtatctgtggtcaagaaaaaagatcaccatcccacccatagaagcaaaaagtagggagaaaaatgatgtgacaaagtggtatctcacaactctgcaacgtagaaaggcttgattataaatacataccaggcagaaaaaaattattattcactgaaggggtcatgcaatgggaagcggggcctacctgagaactggaaggcccagcactgccatagaaaacctcaggatacaggcgctggcctgaggagctgggctccgggacacagtgcccagaatccaggttcttggattgtggctcagcagaggcagcagcactgggaagcagctcccagtctcgtgatacaggaatggcctgggaaggagaggcctcgtggagagggatgtctggcatcctggacgccctggtcactcccagcaatcttccccagaaatcttgggcctttccaccaaactcttactcccacttacctcagtgactgatgctgttagctccttctctgctttcaagctgtctcctaccactaggcgtaagtctgagtcctgtgatcacaagaaggcaggagacattgtcccgtgacagacatgtgtcctctatgtcccacctttagtccttcccttctctccacccaactcaggatacccagatccagcccacacagaccttgtcactagtgccaaactggactgggggaccaggtcgatgggatggccgaatggggccaggctctgtgcctcggtctgtatgctgtgatcgttctgtgccaatggggccagggggcagaggctgctcccggggcagctcctggattgggcacacagtaaagtgcattgggggagggaaagggaaatccaaattggaatgcccagaacacacacgcagagagaaaaagcagaaaaaggtagggccaaagtcagattcctggaaacattccccttatccttttttggtcttttacctttctgtccccatcgtggggggcaggtggtggtctcctaggaggttcagagccaggtggaccctcacaaggaacagcattcaggggtgaggagcctccaggcctcttggggggtccctctgctgcccccttgagtcctccatcaggggaacttcgctggctgcagggacctgatgacacctgagaatccccactcaggtccaccccactgtcagactgactcatctgagaggagtggagaaggagctagttaagtcagggtagaaagcaccccaatacctgactgatgcacacatacaaactgcagaaaggggacagccaagtgagagaacagctccagactcaacccagagcaggtggggggtatgaccagtgctcaaaaaagtcccagctcagacacaccctcccaccctcactcacttctgtgccagccacatcctcaaaaggactcaggggctccatccaaggctccatggagctgggccggtaactctttcggctagtggctggagaagggagcaccaaccagaagagaagtgaggagatgacagttcagaagcccctctcattcttaacccttctaccatagtcctttcactcagctttactcaccagtatgtaaacggttccagatgtgaggggtcagggcctctgtgcctgtatctctggactctgcctgagggcctgggccctcaggcttagagcccaagaatccagagctatgaggaggtggcaaagattcctacagatgagaagggccagaagcaaaacatgaattgggtgggaattgggaattataggaagccaggacagagtggggtgacacagggtgtggggacaacaagggagacacatgggagactaatactgagaattctggagtaaaaacacagtgaaagaaacaggaaagaaaacagagaaaacataacccagaagaattttcacgagtaagagtgcagtgaagcacaatctcaaacccatcccttacctcctgtagcagctctggttttctgggaggccgctcccgacgtttagggggaaagggactaaccccggcagagtcccgaggagtcccacccacccctctcaccattggccccggctcctcaaagtgggggtctgggaaagagaaaaagggtcagcatctgcctggctctgccactgaccctaacttttcctctctactccacctcccaattcttctacccttgctccctgcagaaacgcacccagcagcagggcccctaggccaggttctccacccgctccctccagcacttgaccttctctggggatggagatattcccacccataacccctccagcttaccagaactgaggccgctgttgaccctctggggctcgtatcgggttgggggcctaggagaggggccctgaggggcttggggaggcccaggcttgtgccttggatgaccccctggtgcagttacactcccttgacggctactaagctgggccagagcctgttggatgccagcagggttgctgtggataacttggtccaggcggaagacagcagaactgctgggaggtgggggaggcaggggaagccccgggggacgctcctctggaggacgactggagaaaacagagcattagctccagtatccactaaatcgttactttttcccacaagttatgtttcccaacttctgcttacaacctattctcttccctattaaagtccaggtgtttttgagtccttctaagggttcctatgcgtacagatgcacagactggaaagcaaagaaccagcaatgaatacataggtgggtgttcttgactctaacaccctaccaaccgctttccagttgccttagccagacatggaaatcctactgacattctagagcccatggcccctcaggccacaatctccactccacccaaacttatctttccctcaggctttttccccctcctccaatttttaaaccacaataaatttgtttgttcctacccaccttcggttcttgggagagggccagctcctcttgtcgcctcgtcctggcccggtccttcctccaggacccccaccgcctcctccactgctgctgccactgctgccagccttgccccctgggccagggcgccgattctgccgttccatgcctggccgctgacttgagaagctccgtttactcaaatccttggctctctggctcagatctccgcgggacatggctgaaatacctggtacggctccacctccacctcccccaggagttcccacagccttgggtgtcagcagtactggtgggggtgcctctttgtcccctcggcgctcactggtgaagtcactgctctctgatgcagtctcccattcctcattggcttggtctgagttctggtttgacagatcaggagacttggcagctgcccggcgaggtgctggggccactgtgactgttgtgagggcctcctcaggtgcaggagcggaggctggaagggttagggagggcttgccctcagacccccttgcggcattctcccgttcctgcttcagcctccggaaacgaggcggtttatcctgctgctgagccctcccatgtcgcctccttcggggtcgctccccatcttccatgcccacattgctacctccattgctgcctccgcgcgccacaggggacagaggccctgggatcaacttctctttcaaaggctccttacttggtggcaaagggcctgtgggaggtttcttgggagccagagacttggctggagggctccagcctgggcaaacttgaggagggggcctccctcctcctcggccccggcgagatggcacccctctgggagtgaagactcgcccaccccgggcagtgaagcgggctggggctggtgaaggtggggctcctggtggtgggggagcgagagggacctgggtgagtgttccctccttgggtgtgggagcctccttgtctgaaggagccagatcactctcatgggtctcgctgcctgtttctgagccccgctgccggcgccgcttggggatttcctcatactctgaaccctcgctccgtgtctcgctggcagtgcggcctcggggagcaggagggtggtttggtccccctgtcccacctccacgcccatcatctcctcgaaactctcggtaactgcggaattcccggcttcgggctccccgccctcgtcccccataggtcccccgaaaacccctccctctggcaaaatactcgcctcggccccgaccccggcaagaggtaggacccactctttcatacgaatagtccctccgaagccttggggcaggggaaagatttccattgggtggggtctccttggggccccctagcttccccttggttatcttgagtgggtctggctttgggggtttgggggtttcatccccctgttcgaggggcttgggaggcagctcttctacttttgtaggtggtggaggtttctttataggcccagcccggcggggtggggcccctggctcctctggagggattccacgacgactgctccctggacgagggccccagcgggtctctgtgcgactctctctgcgtggtggtggggggccctggcctccactcccgactccgcgggcaggctttcggcctgcttctggccccgtcagctgtgcagtctcctccttagggggctccttcttgggtggtggagtttgtatcttggccacttcatcactgcctgggggccaggggagtggacggggccctggttcctccagaggaaagcgagagattgggggcccaggggctccattctcaggaaagcctggataactggccagatagggtggtgggggaggtactggaggagtctcgctcctgaagagacagacagaaagaatggaaataagtatctcaggaaaaccagaactaggtgggaaaagaacactttattatgatgcagactctcttttactatttttctgtttgttttggcagagatggcatccagttgccgaggctagtctcgaactgctgggctcaagcaatcttcttgcctcagcctcccaaaatgctgggattacaggcatgagccactccatccagcctctcctttcccgttcatccctatccctaccactaacccaaagtacctttctcccaggcctagatcctttcactgtgaactcacccatttctcatgaccaagactcacctcatccccttgtcatcctcatccgcagcctggcgcagaggtgaggtaagtgggcggggttcagcgggtgtggcggtgaagacatctcctacccaggccaactttggatccaccggtggagtgccccgttcccgtaacatagcaggtgcatgacggtcaaatggctctgagcttgagcccccactgtctgaacgctctcggggaactaggcctgaagaaaccaaagaaaaagaaaaataatcctattcatgtcacaagccctccagcccaaaaagcatctccccttgcggtcaagtcagctcttccatctcttgttcccagtaggtccgggccttgcctgctcttatataacaaggttatccactcagattccctacaagagaatcaacccaccccaaataaatcctggcaaatgaaggaccactgcttctttcattcattcattcatttttgagatggagttgtgctattcattcattcatttttgagacggagtttcgctcgttgcctaagctggagtgcgatggcacaatctcggctcactacaacctccacctcctgggttcaagcgtttctcctgcctcagtctcccgagtagctgggactacaggcgagcgccaccacgccggctacttttttgtatttttagtagaaatggggtttcaccacgttagccatggtggtctcgaactcctgaactcagttgatctgcccacctcggcctccctaagtgctgggattacaggcgtgagccacaatgcctggccaaccactgcttatttcttaactaagcccatttttgcaacagagctatctcagcagtgctaagcatatgcccttccctcatcactatgatgggcaaaacctatcataccagagtcacagtaagaccctaatatccaatgcctaagactgaggggactttcctgtttctcactcctcccatgcccccttaccagagggatgcacaccaggagggtagaagtctagagggggacgaccctggaggagccgggggtccacataaggaggaatcatcatccatcggggatcaaagttcattgggggcatgggtgggggccggcccagagcacctgggtacagggccttggggggcgggggtggagcctgtggagctggcacagcccccagggtcacaggctgtggtggtgatgggggcactggggtaggaggggcagagccctgttgatgctgctgccactggtgctgctgctgctgcttcaggagctgctcctaggaaaggaggaaagacaagatgagagaggctcaaagcacacatggacaaaggaatcagcaaagaaaaaacttggactaggggaaattggcgtgacaatggagacaactggacaaagaagcaaagggacccagaaggtaacttatgaagagaattagggaccgaagccaggaagaaaagcagcccttagagggtaaacaacttgatttcacctgctgctgccgctggaaacgaggaggcaacgacttctgatatttggggtagcccaagccctgactagggggctggcgggtgggaccaatcccatcacccttgggttccacctttggaactgggggtgtggtaggaggaggaacctcttctggtggttcaggaccctcttttgagggcagttgtggttccactgcatcggaaaaaacacaacagagtgatctagtccaacaatagacactccatgaacaccccaggaatctcacgtctcatctctagctcccttaagactaaaatattctattcaacatctattctattgaagcccctcccatttaagacccattaaagcacttcatggcctctcatgagcctatggtggtggcattaactttctatgaaaccattagaacaacagtactttcttcagtcttggcccataggaaatagttttcatttttatttatgtatttcttgtgagacaggatttttttttgagacagagtcttgctctgtcacccaggctggagtgcaatggcatggtcttggctcacagaaatctctgcctcccgggttaaagcgattctactacctcagcctcccaagcagctgggactacaagcacatgccaccacacttggctaatttttgtatttttagtagagacgggtttcactatgttggccaggctgatcttgaactcctgacctcatgttctgcccgcctcggcctcccagagtgctgggattacaagtgtgagccaccatgcctggccgacagggtcttgctttgttgcccaggctggtctcaaactccctaggctcaagcgatcctccaccccaagcctccctaagtgttgggattataggcgtgagctacagtactctgccaagaaatggtattagactacaacctaagattccagacaaaaccttccctccttcagatatacaaatgatagaacactatcactgatagtccaataaaccaaaacaactgccttctacttcatttatccccagccttaccaccctgcacctttaagcaccttgaagcagtgatctgacatctggtagtacctatccccatctccatacctgggctggcttcgaagctgccactgctggtgctactggtactgccaccaccactcaccagagtgggagccgcagccacacctggagtaggagtagattgggcaggaggggcctgtgctggctcttcaggttctttctctggtgttggggctgatgctggaggtggagctggaggtgcagggagttctttagggactgcaggtggtggagctggggtagaaggggcagcaggtggggcagcaggctctgctttgagccgcttgtcaggtgccccaaacttttcatcgagtcgcttgagcttctcagcacaggctgcccggcgctcttcttgcatgcgccgctcctcttcttctcgccgtcgccgggcccgctccactgccagggaaatctcagatgacgactgctttcgtcgctgccgccatgcctcatcctcatcttcaggtgctgggggcttgcagggaggacccccacgatcctgtcaattggcaagacccagcagggccaggggaatcagttactatgctttctatcatctcttttacaacaaatcaactgtcgctacttgcaggatgcaacgacccaggctttggggttgatctctctgggtggtgacaaactcattatcctggtcttctttgagaccacgtcttgctatgttgcccaggctggtcttgaacttgggctcaagtgatccttctgcttcagcctgctgagtagcttggactactgatgcatactaacagatccagctatctagccaccctagtctttttatttttctgttccctctctccttccgaaacccaaacacccagggctcctttttcttctttcctcattagcatcccagtttctcacttcttacccagactcccctattaccaaagatatttaaaagcttcccaggatgttctgcagcctggcacttcacacagcccatttttagcaccccccttcctctatatcacaaccgcttcaattactcagctgacaccaatttcccacagctgaccctctcaatcccttattggagacactcactgggtagtccccaggggggccccagttcccggcggggccccggtgaggtgggggtaggggaggctttggggcaggaggtcccggctctgtctctggaggccgagaggtttctgcccaggccgtcttaggagtgggcggttcgctgttgggggagttgccctttttgccatctgcttcagggggccgttcctcaccagaagctgattgggaatccctgctgtgagcagatcaacagtgaaattaaaatcagctgcaactaatatactcctctaagagtatattaccaaaatacaaaccaagaccccctcctcttctcccctgatggccctaactcactggccctcagctccctcctcatcagagtctcgcccatcttcctcatcgctgaacttgagcttttcagtgtagtcaacctcttcatgggcccctgaggggaaatatgagtattagtaacccaagcattctgccctccaatcttgggaggtagtctggaactatgtaacaagatggactaccaatgccaatatccttccctccgaagtctagatccaccaatgaagtcttgtcattcttactcctctcaccactttgcaaggacttggtattccccatccatcctcccctactcttttttttttttccttttaaaagtctcgctctgttgcccaggatggagttcagtggcacgatcatagctcactgtgacctccaactcctgggctcaactgatcctcccaccacaacctccagagtagctgggaccacagatgcacagtccacacccaactaaaaaatttttttttttttgtagaggtggggggtcttgctgtgttgcccaggctggtcttgaactcctggcttcaagcgatcctctcacctaacactcccaaagcactgggattacagatgtgagccattgggcctggtcttcctacacttcaatgtctgcctttcacccacataaccctgtatttttttttcctcattaggttttgcctttcaagatccaaattcttgacccttaatatccacttacctgcccaaccatcatcattctcctgatccaactgatcaaactctttgagattatcctctttgagaatagagggacgacccacaggctctactaagcgcattggtggccctgagcctcgggggcccgccacacggggaaaacggctgtacacaaaaaagaaaatgaaatatggcatgttgtataaccacatgcgagactgatcctagactgagcctcctggctagaaaaccatctcctcccccaataagcttcccctgcccccagccacaaacccagacctggattgctcacctgggcccatcaggagtggggtatcggtaaggcccctggggtccatagggcggagggaacgggagatatgggggatacatctgtaaaagggtccaacagtagctgctcagagggacagtcatatacccttctagctccttaagcctgctatcaatcatcctcccaccctcccttctatctcataggtcaaagactaagtcctgattcctagctctccagcttccagtgtaatcgttccaagacaagacaccaagactcacgaaaggcggcatcattccgcggtagggagggaactggggtgggcctgaaggctgtagcccaccccggggatcatgaccatgatgaagtttggagtccgggccctccagctcatcagggccacgcccacctccgtccctccaagttgtagaatctgtattttggaaaaggtagagagaggtatcaatgattggaggacaagtgaacacagctgaaagtgatggggaggaaggtgaataagccagcacctagctctgagatgcaataggtaatgtcttggccaaaaggcagccactcactttgggggcggaggcttggtccgggcccagacgactgttcggcagactccctttccttggcagccttgtcctggtcgccagccgcctgcagggtcggaaattcctctcgagagaatcgtgacagtaggcttgatgcccttccacctattaggatggggatgcagaacaggagacagaagacatttcctgaggacatgctataaaagtggaagactctggctgggcgcggtggctcacgcctgtaatcccagcactctgggaggctgaggcgggcggatcacgaggtcaagagatcgagaccatcctggccaacatgtgaaaccccatctctactaaaaacacacaaaaaattagctgggtgtgttggcgtgtgcctgtagtcccgctactctggaggctgaggcaggaaaatcgcttgaacccaggaggcagaggttgcagtgagccgagattgcgccactgcactccagcctgggtgacagaatgagactccgtctcaaaaaaaaaaaaagtggaaggctctgacaggtaccagaccatcaggtttcccgccttcaaactcacccccctacagaataactgcttattccccaaggaggtcagttctggcaccactacactccatcatataagactgagacttaaacttgctcatgtgcctccatgaaactgaatatgggtggtccttgatttagccaaagaggaccaaggtcacttggctgaaaatacagtgcagggttcatgcatcccatggtgcccagacacagctccccaattaagtgctgcactcaccatctccatgtgctccatgggtgacgctggcttgtgcccaggactttaccccgcttggaaccaaaggagtgttctggggaagtgttcagaaagatgataaatgatgtgggtggggcagctatgaaccattcttcctccccacccctccagttctccaggtacctcgggggctgctgggggtcgtttcggctggttggaggcaggcgtctgtgaagccggcagtggctgcgattccggcggctgagcggttgaggcatcggaactgaggggacagaatgggaaggttattcacacctgagatgcctccctgacttctccaactggtggagactcaggactgaaatcatgcccattgctaccatttacaaatataaggacaaattaattttgtcatcctttgtaggctgttgtctattttttcatgctctctctccaagacaaaaagctaaagtttagtaccattccttagtcatttaacaaggaacctgcaataggtaagaaagggacctcttcgtctctggctcagacgtggctggactaaaccaagccccaatgctccctgaagttcaagttaaaatacccatcactctaggtcccccaagcctctgtctacctcttggggtcggactgctcctgtttgcttgcccatcctgttccgtcttttggcactagtgagacattggggtcattgcctttgttctcggctttcaggcttggaaggttggctggaggtggcatacgccgggcaatggcaactttcccgagactctgcaggccatggcgaggggcaactggagaacaagacggagagagggtcgaaaatgcctcatgtgggagatctgatggcctcctatcctgggacacatttatacatgttgaatattttattacctacttcctccaaacttctcttagaagggattccttcccctgcccttaataatctctgaaatcgcgctgattgtggtggctcacactttgcaatcccagcactttggcaggccgaggcaggcggatcacctgaggtcaggagttcaagaccagcttgaccaaaatggagaaaccctgtctctactaaaaatacaaaattagccgggtgtggtggcgcatgcctgtaatcccagctactcaggaggctgaggcaggataatcgcttaaacccaggaggtggaggttgtggtaagtcaagatcacaccattgcactccagcctgggcaacaggagctaaacttggtctcaaaaaaaaaaaaaaaaaaaaaaaaaatctatgaaatccctatcaagaaggctgagatatgtaacattcaatacttttatgtgagattggttgatcatgagcctgcaagaagcaagctggcctcaaagtttcccaaatccacatttattttcctccaattcttacgtgtccaaagacagggaaccacagacacgcctttgtaggaggataactggtgttcacccagagcccacaccccctttaaaggacccagtgtaaagttgggaaatctcctctagtcttttggtatttctactacagccacttccctttaaagagctctaaaacgtatgccccatgcatgcctagctttcaaccatcagaagcatctttgcaggactctcaccagcgggtttctggatctctaaggacttgcccttatacgtatcaaacaggttgagcgaggaatacttctttccatcctttcccttggcagtcggccccgagcgatcggacattgcgctggaagctcattgagtatgttgggtcctgcaggcacctcccccaaaacgtgccagagcctgtgggccagacagcaagtgtctcagtctctgtcccctgtacagaccataacagaaacttaaaaactccattgcattatcattagggactcagatatgaggccctctggtgtcttttcctccagtctatgtaaactgcccactcttcttaagcaaccatgatctacttagctccctcatagctcaaatgccatgttccctcctttcccccagacacctttgtcaaggaaatctaagtaaaaatccagcatcctcctagtataaacactctgccctttgtgcctgtctacaaagagtaattccctacaagtaataatctcttctctctccaccaaaatcgtttcagagacttacaacaggacaaattcaagcaagagaaaactaaaaaagaagcatacaattccatcagagaagaagaaacaacactttagattccctgtttattggacacaagctccctaatcatgcccccagggccctgtaccccaggctcccagcccagcagcctcgtgtccatctgggaaggtttgcaggaaggtatgctgggagtttaaggattttatgagcttgctcagccggaatgggggttggtaccagagaaatcctcatagaacaactagggctgtacatactcccaggctataggaacctcaagtatttgaaatatcccatcttttcctaaacttgctcctgtattggctcctggaaaaaatcgcctccagatgaaatactgttttaccatatgaagaactgagaaaaagcattatggagccaccttagcaccctgtaaccatgggccagaaaacagagggccaaggccagagccatcttcgttttcctatcctcattaaaaatgtccatcaccagtgtttctttactcgatacctccagctccctaagcaagccggacgacaggtctctcagtccattccagagtgaccaggcattcgtttatggacgggaacagtgtaaagagatgagaaatagtggggaagaaagcagggaaatccagacaggcccagaatgaaagctaaaattggggagaaagaactttatgacaagctagagataagatggatgttgcttcgtaggtgtttgaggaggccaatctgtgaagataaatatatgaagggaaaacgaatacaagagtcatgtagcgaatagaccaaaactaacagaaaataatgaatacgaaagcaggtggaaaatatatggaaacaggaatggcaaaaaaaaaaaggatgtagacaacgaagtaagggggcagaggcccaagaagaaaaacggggttgggggagaaaggagacgaggaacaggaaaaatgaaaaagcagacatagggcgactgagcaacatagaaagcaaagatgctgggataaaagcaggattctagagtgggagtggctcgacacgaagaggggcgtccagaggggggaacacagcgctggatgataggagggggtccaatatggaggaaaagcgcccttccgagagaaccgtcgggcgcggcccaccaccacggggcggcagccggggagggggcccacaaatgggggtgaaaagccaggagcgcagcggagggtagggagttacggacccaggcgcaggggtcaccccctgaagccaagacggtgggtggttaggggcagactacggatcctgaatgaactgccggaggtgcgggtcccggagtagaggtaccggagggggaggggcaagcaggcccggcagcaggaggacaaaatggcggcggctaatggcagcttctcctccccccggcccaccaccgccgccgccgccgccaccgccaccgccaccacctctcccgcgccggaaaagggcgtcagcgcacggttcacccagactcacctggccgggtgcgcggggatccgggacccgggcctaggggctccccgggacgggatggcggtggggcgggggaggatggcggcggatggcgccgggttcggctcctcccgtctccctcgctcactccgcggctgagccccgactaacggcccatccgggcaaccgccgcccccgggagcaccccctcccacctcccacctccctccgcgcctagacacgccccttaatttgcataaagggcggggcactttctaccctaaccctctacttccagggctgtctttagtttaaaaaaaaaaaaaaaagggccgggcgcgcggagcatgcggaggttatttgcataaagaggagggacttaagggcactaggaccccgattggctaaggaggcgggcccccagcgtcggccgttgagccgtgttgagggggcgggaatgcggtgcaggtcggctgggcggttgggacgcagaatttacacgacgaatgtgggagaaagaggcggagcgtgcgtcggacgttagtagaaagatgggagcggagagacgttgggacgccaaaagtggaaggcaacgacacacggcccgtggcgccttcagctagggagaaagagagagaggacgggggctggcgggcgggattagctgccggagggctgagtttccgcaggcctggtaagagttccagctctcgcatccctttgccgtgagtttgaggaggtggttggagcggggaaatgcaccagaggggcggggccttccagttattatattacgtcatgcaaatgaggtggctagacagaccaatccaaaggccccgggaagcgtttcgtccgcaccacgcagcgtaggcattcttcgggcagttctacctatttgcataatgtatgcaaatcatttgaacaaagataggctaggaatgactcgttcatcaaaatatgggcaaccatcgactaagacggacatttaattttataacctataattttcatgaataaatttttatatttgaaattattgggaatttgtaatttcttaacaatgggtttcattttgtgaaatgcagtactgttaccctcctttgtctcttactacccgattctagaactctctgctcccatcagagttatacccattcaacagatcattcaatgactatgatttgaaggcgctggagataatgcacaggatattatagaagtagagaaataaggcctggcgcggtggctcacgcctgtaatcccagcactttgggaggcctaggcaggtggatcacgagatcaggagttcaagaccagcctggccaacatgatgaaaccccatttctactaaaaatacaaaaatttgccctacgtggtggcgggcgcctgtaatcccaactactcgggaagctgaggcagagaattccttgaaccagggaggcggaggttgcactccagcctgggtgacagagcaagactacgtctcaaaaaaaaaaaaaaaaaaaaaaaaaaggatgggcgcggtggctcacgcctgtaatcccagcactttgggaggctcaggcgggcggatcacctgaggtcacgagttcgagaccagcctgaccaacatggagaaaccccgtctctactaaaaatacaattacccaggcgtggtggcgcatgcctatgatcccagctactcgggaggctgagtcgggagaatcgcttgaacctgggaggcggaggttgtggtgagccaagatcgtgccattgcactccagcctgggcaacaagagcgaaactctatctcaaaaaaaaaaaaaaaagaagtagagaaataaaatatgattatgcctggggtgattgagaaatgtttctagaaaaactcttattaagagatatgaggccgggcgtggtggcttatgcctgtagtcctggcactttgggaggctgaggcgggcagatcacaaggtcaagaaatggagaccatcctggccaacatggcaaaaccccgtctctactaaaaatacaaaaattagctggactggtggcgcgtgcctgtagtctcagctacttgggaggctgaggcaggagaatcgcttgaacctgggagacggaggttgcagtgagctgagatcacgccactgcactccagcctagcgacagagtgagactacgtctcaaaaaaaaaaaaaaaagaaaaagaagaaaaaaagggccgggagcgggagcagtggctcacgcctgtaatcccagcactttgagaggccaaggtgggtgggtcacctgaggtcaggagttggagaccagcctggccaacatgagactccatctcaggaaaaaaaaaaaaaaatgatatgaagaatgatcggagtagatatctgtcaaaaatatataaataaatagatatgaagaacgagttagaacttacccaagtttcagaagaaggtgtacatctcaggtgcagagaacagattagtggaggcatgagtttgggggcctgtgcctaggctgatatggctaaataaaggaggcggcttattcattatgaaaagtgaaggcagaaaagtttgcagaaatcagatgagaattttagtcagaggctcagtaagatttaagatgacttctgttttcaaacttccaaaatgattctcttctcccttctccccggccggctaccacacataccgttttgttaccctttgcagcaaaattcttaaaagggatgtccatagtcattgtctccaatgagtttctccttccagtcttttttttttttttttttttttttttgagacagagtctcactcttgtcacccaggctggagtgccatggcgtgatctcggctcaccgcaacctccacctcccgggttcaagcgattctcctgcctcagtctcccgagtagctgggattacaggcacctgccaccatgcccagctaattttttgtattttagtagagatggggtttcaccacgttggccaggctggtctccaactcctgatttcaggtaatctgcccgcttcggcctcctgaagtgctgggattacaggcgtgagccaccacgcccagctgtaaattctttgctttatttaatagcaccagttctttcattcatctacccattcaagtgttttttgtttgtttgtatgttcggtttttttttttttgagacggagttcgctttttagttgcccaggctggagtgcaatgatgcgatctcggatcaccacaacctccacctcctgggttcaagagattctcctgcctcagcttcccaagtagctgggattacaggcatgcgccaccacaccaggctaattttgtatttttagtagagacggggtttcttcatgttcgtcaggctggtctcgaactcctgacctcaggtgatctgcccaccccatcctcccaaagtgctgggattacaggcataagccatcggccccggctcattcaagttttaaacattattgagggcttatgatatgtcaggcacaatagcataggtcactttatccccatttttagaaaaaagcctcacagaggctgagtgatttgtcaaagtgacaaagcttatagtggtggagaatgttggttcatggtattccttgctcttcatgaaatctgtcatgggcctgagtaccttgtttggacatgtgtttttgtcctgcctgcattctttgaggttaaggctgtcttacacagctggaatcccccttggtgcgtgaaaccatctgctgtagtggacacactatagcgttgttgatggattgttcatatggccaaatccttgccacctttccctcaagacctgtctctccttcccaaacccaggaaaaaaatcacccaaataaaaactaagctgacttgatctggaggagggggtaatttatttaatttgttgactctggcttacaattttgtcttctgtttccatatctgggtcattagaagccccttcaatcccatcatcccttttcccttcaaatcagggcaactcagagatagctttcttggctggggggcctgttggcttttccttttctctcgctttttcctcatacatcaggatcctggttgagatgggaagaggcacagggatcagggaacactcctctcaagggaataaatcatagggtgctaggaaaggctagaaggggatggggatgtgagggtggaagggggaagaggaagggcaggggttggagtttctggggaccaggactatggatagggatggggtcgggaccttggaagggtccctctaaggatggaagaagggatgatgggcaacgtgtagaaatgttgagcctgtggacaagggtagggatgggggaggagaaaacaggtaagtacaggggaggttggaaattgacactcacatttttaggatggcagatctcttgcccagcatcatcctgagaaagtcagggtagctgaacgtctccccggagccactggacacctctccaattaatttctttagctctaggtgagtcttggggactccaagtttctccagcattcgtttcagggacatgatatctgggggcagaggatggggatggggagaaggtggggagaccctctctctcctctcccacttccgcatccccattctccttcctcccactgtggtaggtgggccccctcccaaatcatgaggaatggagcatgtaggagagacctctgtcttcttaggcctgcacaccaccctgcccccgcaaatcacccgtttctcaccaatatcgccatttccattaaggtcaaactccatgtatttctctgggtgaggggagagagcagaagggataagcgctgactggagggttttcagcaggggactgaggaaggggttgccaaccaactgctaggtggaggagacaacgtggaaggaggaggaggggcaggcagaggaagtggggttggggagttgaggggccccgctagggtgtaaggagctagaggggatgctgagagaggcaggcccgggaaagggaccgcagtgtggcaggagggcaataaaggcaggttccccttttgctaccacaaaagtaaactttttatctctgctgttcctgccttgttcttgtggaaatcctaaccctcctacccccagccctgtctccaccgcctacagtttccccctcacctttgaagccttccagtttggagggcagatcctcatcactgctatatttgggatcgtctaggaattgctatggaggggaaaataagagccagggtaggccctccccatccacgccccatccccctggctctgcccccttagttcttccttctaccttgttgatctcatccagcctctcttcctgctgggccttcagcagtctgaaagcttttcctcctgtggggtgaaaaaaattaatcagccctcatccctcccttcctctccttaccctgacaccagcccgggctaccctaggccagctgactgccctcctagcccacagcccaggtctgtccatctcattcctccgatctaatgccgctgcctatcccaccctccctaccctgtaaatccctggtttggctcatagctcagcagatgctggtagaggtggggagacagaccaagctggaggcctctgtctgcaggctctccttctctcccaccagtcttctcagaagccttcctcccaaacttcccctttcccctcattccttcctcctctgcctcccagacctcacttccccatcaggttctgctgacactagcaccccaggaaggagggggagcctggtgtgaaatgcagattagaaaataacattctcccaaattcctcttaaatgagagcccagtgtgcgcatgaaacaaatattttgataagccactggaggtgtgcaggaagggcaggaagacaccagggatatttattctcaggaactagtatttttgaacaggtccaaggttcaggtaatgataagaccttgcattttgtcaggtttcatgagtctgggcaggcagctgtggataggaagacaaggaagggctggctgaatttttctgctctgtagatcggagaagaatctgaagtctgctggcagctccaggagggtgacaagatgggcacagggtttagaaagggagagaaacctcactcccagcctggcagctccaaggaggcccttaaaaatatggaaatgtctaacaaaacattttaatttgtttgctttagaatgtgcaacgtaaccctctcatcttatctcctttgaaatctttagtaaaatctatagagatcaggaatttaagagtttaagtagattctttggaggaactgaaagtggtacttaaagaaacagcgtttgtggacagaagagccagggagtgaggctgacatcaggtttgcacactgcgcgtgcgtgcacacatgcaggcatgtttgtgtgatggtggtgctggtcactgtgggttcaacagagtggatgatagcctctgacacatgcctccctaggcataacctttatcccctctgtcactctgtttggccagtcgcttcttggagaggtgaggacagcacatttccctcattgagatttcctggtccaaactccctgcccagggctccatctaccctgccccggcattgatgaagacacctttccttctcccttccccccaacatatttccttttctgtagctgggagttttcacttctcactgccctctccctgacccaagccaggtaggggagatgctggagtggcctctggctgctgctgctgcttttttttttttttttgagtcggagtcttgctctgtcgcccaggcgggagtgcaatggtgcaatctcggctcactgcaaccactgcctcctgggttcaagcaattctcctacctcagcctcctgagtagctgggactacaggcgcccaccaccacgcccagctaatttttgtatttttagtacagatggggtttcgccatgttggccaggatggtctctatctcttgaccttgtgatccacccacctcagcctcccaaagtgctgggattacaggcatgagccactgcacctggctggactctggcttcttgacttccctttattgcagctacattctcctgctgcagagagagctgcaaccctgtactcccaatgttctcagtgcctgctgggaggaactcacttctttattcatacgttcactcaacagatatttactgaatgcttactatatgccagacatgcctctaggcccagagaacccaacaaatgaaaactcttgtcttcatggttgatctaattggggaaggcagacaatacaaataaataagtatattaaaggtgctaggtggccaggcgcagtggctcacgcctgtaatcacagcactttgggaggctggggcaggcggatcacaaggtcaggagttggagaccagcctgaccaacatggtgaaaccccatctctactaaaaatacaaaaattagcagggcctggtggtgcgtgcctgtaatcccagctgctcaggaggctgacgcaggcgaatcgcttaaacccgggaggcagaggttgcagtgagctgagatcgcgccattgcactccagcctgggcaacagagtgagactccgtctcaaaaaaaaaaaaaaaaaaaaaaaaaaggcgccaggtgcctatggaggaaaacaaagtagggaagaggggacataggagtattattgccaatggtccccagttttttgttttttgttttttgttttttttttaaacggagtctcactctgtcgcccaggctagagtgcaatggcttgatctcagctcactgtaacctccgcctcctgggttcaagcgattctcctgcctcagccttccgagtagctgggattacagccacctgccatcatacctagctaatttttgtatttttgtagaggcggggtttcaccatgttgaccaggctggtcttgaactcctgaccttaggtgatctacccacctcggactcccaaagtgctaggattacaggcgtgagccactgcacccagctttttttgttgagacagaatctcgctctgttgcccaggctggagtgcagtggcacaatctcagctcactgcaacctctgcctcccgggttcaagcgattctcctgcctcagcctaatgaatagctgggattacaggcgatcaccactatacccggctaatttttgtatttttagtagagatggggtttcaccaagttggccaggctggtcttgaactcctaaccttgtgatcctcccaccttggcctcccaaagtgctgggattacaggtgtgagcctgacttgtccccagttttaaatatggtggtctggccagacacggtggcttacgcctgtggtcctagccacttgggaggctgaagtgagaggatcgcttgagcccaggagatcaaggctgcagtgagccatgaccgtgccattacactccagtctgggcaacagagtgagaccctgtctcaaaaaatacaataaaataataaaataaatagagtggttagagaagcgttctctgaaaaagtgatatttgagcaaagatttcttttcttttttttgagatggagtctcactctgtcactcaggctagagtgcagtggtgcaatctccactcactgcaacctccacctcccgggttcaagtgattctcctgcctcagcctccagagtagctgggattacaggcacctgccaccacgcccagctggctaattttttgtatttttagtgagacggggttttactatgttggccaggctggtcttgaactcctgatctcatgattcgcccacctcgccctcccaaagtgctgggattacaggtgtgagccaccacgcctggccgtttgatcaaagattttaagcaagcaaaggaacaagcctctgtcttcctaggcctgcacacttccccaaatcaccttttttcactgatatctctgtttccattctggtcaaactttatgtatttctttgggtaaagagagagaacagacagggtaagcactggctagagggtctttggcagaggatcgaggaaggcattgccaaccaagtgctaggttgaggagaggatgtggaaggaggagatggggcaggcagagtgggcttggggagttgagggaccatgtaaggtggatatacggctagaaagaaaaatacttatttttttttttttgagacagagtctccatctgtcgctagactggagtgcagtggcgcgatcttggctcacttcaacctccacatcctgggttcaagcgactctcctgcctcagcctcccaagtagctgggactacaggtgcgcaccaccatgttcaactaatttttgtaattttagtggagacgaggtttcaccatgttggccaagatggtctcgatctcttgaccttgtgatccacccaccttggcctcccaaagtactgagattatagatgtgagccactgcgcctagccagaaaaatatttattgatcctaaagtggagtcagcgccactgttgctgctagtgttgaatccagaaccatagctggacatgggatcagaggatgaacaagagatgctgactgggcctagagatggcaaggaggaggaggaagaggaagaggaggaattagtcaattcctaacaaaagcgagagagcagtgcgtgcagctgaagaaaggagtaaagtctcggagcagctggagctctgtgatgagcacgtgtcttccagatcacagacaggagaggattgcacaaagctctttgacttctctaatgcaagggaccattgcatggcccacaaatcctttaacagtttgaaatgaatgtgcagactccttcaccccagctttcatcacctgggcatttctctatggttttaaatataacatttgtttctaatttgtgtaactataagtccatgtgaacctcatggatttttggcttaggcaaatagcttctctgtaattggcagcaattccatcttaataagggaactgtgatttgcaaaacgaaaaaatatactgtttttttctttttccttttttttattcaagggctagtgaatcttgggatctcagggttacatcgaggtatatttatcatcatcattatagtccaggactaaaaggaagttattccaggctctttgcaaagaatctcagttttttttgtttgtttgttttattttgttttgagatggagtcttgctctgttggccaggctggagtgcagtggtgcagtctctgctcactgcaacctccacctcccaggttcaagtgattctcctgcctcagcctcccgagtagctgggactacaggcacccgccaccatgcctggctaattttttgtatttttagtagagacagggtttcaccatgttagccaggatggtctcaatctcctgacctcatgatcggcccgcctcggcctcccaaagtgctgggattacaggcgtgagccactgcgcctggccaagaacaccacttcttacaccaatcatgtggagacttctcccacaccaatcaattcttcagttcttggtagatattaactgggagtcctgcagtttaattcagttctgacactctacccataattaccagttatctaatccccaagttgaagggctcagttctacaaggctgcccccactccagataccaatcacaaacaagtccaggcctcctaactgtttttatgactccctcttctggctcagtaattcgctggaatagcacgcagaactcaggtaaacactttacttatgttagctagtttattatgaaggataaaacttaggaacagtcagatggaagagttgctccggacaaagtatcggggaagggggatttggagctttcttgtcctctctgggcacctccctgcacctccatgtgttcatcaacctggcagctctccaaccctcatcttttttgtttttttttatggaggcttcattatgcaggcatacttgattcaatagccattagttggaggtcagagggttggagctaaaagttctaactctctaatcacacagttgcctaccttggcaacaaaccccaaccttaggggctttctaaaagtcaacttactaacataaactcagttgtggttgaaaagagcttgttatgaataacaaaagctcccttcactttatcatttaggaaattacaagggctttaggaggtctggccaggagccaggatggagaccaaaacacacacacacacacacacacacacacgcacgcacacacacattaatattttgagacagggagacagggtctcgttctgttatccaggctggagtgcagtggcacaaacatggctactgcagctttgacctcccaggctcaagcgatcctcccttgtcagcctcctgagtaactgggactacaggcatgtgccaccacacctggctaatttttaaaattttttttagagacagggtctccttgtgttgcccaggctggtcttgactgcctgggctcaagtaatcctcccaccttggcctcccaaagtgctgggattacaggcctgagccaccgtgcctgaccttttttttttttttattttttattttttgagacagtttcttgttctgtcatccaggttggagtgcagtggcaccatcatagctcactgcagcctcaacttcttgggctcaagcaatccttccatctcagcctcccaagcagctgggacccgcaccaccatgcctggctcattttaaaattttttgtagagatgaagtctcgccaggttgcccaggctggtcttgaactcctgggctcaagtgatcctctggtctcagccttctagagtgctgggattacatgtgttaaccaccacacccaacccatatatatacatatttatttattttttccccgagatggagtcttgctctgttgcccaggttagagtgcagtggcgcgatctccgctcactgcaagctccacctcccaggttcacgccattctcctgcctcagcctcctgagtagctgggactacaggcgcctgccaccacgcccggctaattttttgtgtttttagtagagacggggtttcaccatgttagccaggatggtctcgatctcctgaccttgtgatctgaccgccttggcctcccaaagtgttgggattacaggtatgagccaccgcgcctggcctttttttttgtggggggatggagtctcgctctgtcgcccaggctggagtgcagtggcgatctcggctcactgcaagctccgcctcctggtttcacgccattctcctgcctcagcctcccgagtagctgggactacaggtgcctgcccccacacccggctaatttttttttgtatttttagtagagacgaggtttcaccatgttagccaggatggtcttgatctcctgacctcgtgatctgcccccctcggcctcccaaagtgctgggattacaggtgtgagccaccacacccgggcccaaaaatatatatttttattataacaatatcacaatgggagaagaacatttcaggtggagggaacagcaagttcaaaggccctgatgtgagagcagtgtggatatctggagtgttcatggagtagcagggaggcctgtgctgctgaagccaggtgaggaggaggtcagcttgggtagggccttgtaaagactctggcttttattctgagtgagactgcctcccagactggtctttccattgagaatggcttgacagactactggggtgagacagtgcttagatgctcagaaaaactgcctgggatagagagaatgacagctgctctgactgtgggacaaaaatgaagactaggcctggcgcggtggctcactcctgtaatcccagcactttgggaggccgaggcaggcagatcacctgaggtcaggagtttgagatcagcccgacaaacatggagaaaccccgtttctactaaatgtacaaaattagccaggcatggtggcgcatgcctgtaatcccagctacttgggtggctgaggcaggagaatcgcttgaacctgggaggtggagattgcagtgagccgagatcacgccattgcactccagcctgggcaataagcgaaactccatcccccccaccaaaaaaagtgaatactgaagggtatataggaagacaagcgggtggagaaggaaactcagggccttctgagaaggaaacagagatgaggggaaaagaatagacatgcaagaagatgctggggctcagaaagtgataccccaaagactggtgctttgaaatgctgagaggccttagaagctgccttagaattgtcctaccacactttctggaatttccttatctgactgaaaaaacttctttgcaaaagaagtgcaattgtcttaagacctcctgcctagagatcttatcaaatgaccagatcaaccaccagagagaagatattaggagtcatcatcatacccagatagacttttcttctctttcttttcttccttttgagtcagcgtcttgttctgttgcccagcctggagtgcagtggcatggtcatggctcactgcagcctcaacctccaggctcaagtgatcctcccaccctagcctcctgagtagctgggacgacaggcatgtgccaccacgccttaggttttttttttttttttttttgagatggagtctctctctgtcacccaggctggagtgcagtgacatgatctcagctcactgcaacctcctcctcctgggttcaagcaattctcctgcctcagcctccggagtagctggggttacaggcgcccgccaccacgcccagctaagttttgtattttttaggagagaaggagtttcatcatgttggctctggctgatctcgaactcctgacctcaggtgatccacctgccttgccctcctaaagtgctgggattacagacatgagccactgcacccagccatggtgactaattatctttttttttttttttttgagacagagtctcacactgtcgcccgggctggtgtgcagtagcgcgatctcggctcactgcaacctccaccttccggattcaagtgatacccctgcctcagcctcccaagtagctaggattgcaggcacccgccaccacgtccagcaatttttttttttttttgagacggagtctcgctctgtcgcccaggctggtgtgcagtgacaggatctcagcttactgcaagctccacttcctgggttcatgccattatttttttgtatttttagtagagatggggtttcactatgttgcccaggctggtctcaaactcttgacctcgtgatctgcccaccttggcctcccaaagtgctgggattacaggcgtgagccacagtgctggtcttttttttttttttttttagatagagtcttgctttgtcacccaggctggagtgcagtggcatgatcttggctcactgcaacctctgcctcatgggttcaagagattctcccgcctcagcctcctgagtagctgggactacagatgcgcgccaccaagcccagctaatttttttgtatgtttagtagagacagggttttgccatgttggccaggatggtctggatttcttgacctcgtgatccgccctcctcagcctcccaaagtgtcaggattacaggcgtaagtcaccgtgcctggcttctttttttttttttttttaaatatagagacaatggatcataatatagagacattctcatcctaatgttagcacaacggggatgcagatggtcaggatctggagacttgcaggaatagagcagtgagccaaagtgcagcctggtttatgcttaattataactatatttctgcccagatcccagcatgcaattcttgtcaatcttgggacagtttcaatttactctattgaaagtttttattaatattttgataactggaatttgatttcgatgcaattttttttttttgagacggagtcttgctctgtcacccagactggagtgcaatggcgtgatctcggctcactgcaacctccgcctcccggttccagcaattctcctgcctcagcctcccaggtagttaagattacaggcgccgaccaccatgcctagctaattttttgtttttagtagagacagggttttgtcatgttggccaggctgctctcgaactcctgaccttgggtgatccacctgcctcggcctcccaaagtgttgggattacaggcgtgagccactgcgcctggccgatttgtttttgtatgtatattttttaaattttatgctttactagaatgccaaagggatctgtggcacaaaataactaagaaccactgctgtaacctctctctcccctcacccctttgagcctgggagtggaaatatcccctgcagttctcttacataacactcccacctttgtgtgtgcgtgtgttttgtttgttttgttttgtttttgggatggagtctcgctctgtcacccaggctggagtgcagtgaagtgatgtcagctcagtgcaacctccacctcccaggttcaagcgattctcctgcctcagcctccctagtagctgggactacagatgcatgccaccacgcctggctaattttttgtattttcagtagagatggggcttcaccgtgttagccaggatagccttgacctcctgacctcgtgatccaccctcctcagcctcccaaagtgctgcgattacaggcatgagccaccgcacccgttgtctttaataatgtttttgcctgcttaatatatagtttctgagagatgtgagtcttcctctaatattgtaggttacttttctgtcgctgctgcacaaatttttttttttttttgagatggagtctcactctgtcgcccagactggagtgcagtggcgtgattttggcccactgcaacctctgcctcctgggttcaagcgattcttctcttgagtagctgggattacaggtgcatgctaccacgcctggctactttttgtatttttagtagagacggagtttcaccatattggtcaggctggtctcgaactcctgacctcgtgatccaccctcctcggcctcccaaagtgttgggattacaagcggtagccactgtgcctggcctaaacttttttttttaagcatccttgtgcagagactccaagggcaaacaagagtagtgccaaccagcctggcagagctgaggcaggcctgaactctggcccctagagggaagaggtgactagtcactagccttccttcattctctcacccagagagaaatggggaaggaagagaaatggagtaaaagaataaggtatgtagatggggagagatgggaagggaaaacatggagaatgatggggaggcagaaagtgatgcgaagagagatggaggaagacagagagagagaaagacggagaggcagaccagacacggcagctcacacctgtaatcccagcactttgggaggctgaggcaggtggatcacttgaggccaggagttcaagaccagcctggccaacatggcaaaaccccatctctactaaaaatacaaaaattagccaggggtggtggcatgtgcctgtaatcccagctactctggaggctggggcaggagaatcatttgaacctgggaggtggaggttacagtgagctgagagcgcaaaaaaaaaaaaagaaaaaaaatagaatgtctcacgtggaaggtgctcgctgaatatttgttgaatgagtgaataagcagaagtgtgtatgcatgtgacagagaggcagaggggtaggggtgtgtagagatgtggcgtttgagtggacacgggggaagaaacaagtaatatgaataacatggtgagacagaaagagttgtggacagagctgtgggaaatatgagagataaggagagagatactgaaaagagcgattaagagagatgaagatagggtgtctggcccatggaaggccctcgtgaagagcaatgctgaatagatgaatgaacctcaatgcccagcagtggtgggatgaaggggatgctgtgcagaaaccacactacccatcagagaagcaactctgctcgtttccccttgagttgatgagggatttagcaaccagtggaatgaagagcaagggaaagacacctgcgatctttcagaagcaaaatggacagggcctggagatcttttggatgggggaactgagggagaaggcagagtaggatgaatcccaggtgtttgccttaagtgactggggctttgtgtttccattcactgggacagggatgacaggaggctgacctggtctgagtggacactgatgactttgaaatgcctgtggagtattcagggtaagccgcctagagagcagttagatagtgtggacttaggtctcaagaaagaggcctgagggggagatgtagattggggacttgacagagaataagcagtagtgacaactgtggctatgacaggattgcctaggaaagccatggtagatgcgcaaaatttattgaatgaaagtgggaagccaggtgcatgcctataatcccagctacgtgaaaggctgaggtcggaggaacacctaaagcccggagtcaggactttgagactagcctgggcaacatagtgagatctcatctcaaaaatatatataataaaaaatatataataacactttttaaaaagaaagtggggccaggggtgctagctcatgcctataatcccagcactttgggaggccgaggcaggcggatcacttgaggtcaggagttcgagaccagcctgaccgacatggtgaaaccccatctctaccaaaaatacaaaattagctgggtgtggtggcacatgcctgtaatcccagctacttgggaggctaaggcagaagaatcacttgaacgcaggaggcggaggttgcagtgagccgagatcgcaccattgcactccagcctgggcaacaagagcaaaattctgtctcaaaaaaaaaaaaaaaaaaaagtgggagaaacaacccaaaaattttccaacaggacagtggtataaaagcacacgtttagggtacaggagtctgggggactcaggttggatggcttttatgtccttgggaaagaggaggtgagatttcaaagtgaaacagcttccatggtgacaggatctgagatgtaggtcatggagagtcaaggtgatgattggagtggacaaggtgaaataactgtgaagttgcacacttagggtattgaaaaggcatttgcgagatgggtacaagaagtttcatagcagattgagccataataagaaaaacaaaaaatagaaacaacccaattgtacttcatcaggtgaatagatcaacaagctgtgctacatcatataaaggattaccactcagcaaaaaaaaggaatgaaacactgatacatacaacagcgtgggcgaatctcacagacattaagcagaatgaaaggagccagatacaagagtatgtactatatgactccattaatatgatgttcaagaacagactaatctatagaggccgagcgcagtggctcaggcctgtaatcccaacacttagagaggtcaaggcaggaggatcacttgagcccaggagttagaatccagtctgggcaacatagaaggacctcgtctctacaaaaaaaaattttttttttttttttgagacagagtcttgctctgtcacccgggctggagtgcaatgacgcgatctcggctcactgcaacctctgcctcccaggttcaagcaattctcctgcctcagcctcccgagtagctgggactataggcatgtgccaccacgcccggctgattttttttttttttttttgtatttttagtagagatggggtttcactgtgttagccagcatggtcttgagctcctgaccttgtgatccccctgcctcggcctcccaaagtgctaggattataggcctaaaccactgcacccagcctacaaaaaaactgttaaaaaattagctgggtgcggtggcatatgcctgtagtcgtagctactcaggagactgaggtgggaggatggcttgagcccaggaggtcaaggcagcagtgaactataattgcactactgcattccaacctgggtaacagagcaagactctgtcccaagaaaaaagtctacagaggttaaaaatggtaaaatggttgcatctaggaggggaaagggatttaccaaaaaggggcatggaggaattttccaggataatgagaattatctatatctctattacagtgtggttgcatgggtgtacatattggccaaaggtcatcaaactgtacattaagatctgtgcattttactgtatgaaattatatatcaatgtttaaaaatgtcatttatggctgggcacggtggctcacgcctgtaatcccagcactttgggaggccgaggcaggtggatcacgaggtcaggagattgagaccatcctggctaacatggtgaaaccctgtctctactaaaaaatacaaaaaaattagccaggtatggtggctggtgcctgtagtcccagctactagggaggctgaggcaggagaatggcgtgaacccaggaggtggagcttgcagggagccgagatcacgccactgcactccagcctgggtgacagagcaagactctctctcaaaaaaaaaaaaaaaaaaagtcattcatatggacattaagtccattaaggagttggcagaggttgaaatagagaggaagtgggctgggcatggtggctcacgcctataatcccagcactttgggaggccgaggtgggcggatcacaaggtctggagttcgagaccagcctggctaacatggtgaaaccttttctctactaaaaatacaaaaattagcctggcatggtggcaggtgcctgtaatcccagctactctggaggctggggcaggagaatcgcttgaacctgggaggcagaggttgcggtgaaccaagatcacgccattgcactccagcaacaacagcaaaactctgtctcaaaaaaaaaaaaaagaaaaaagaaaaaagaaagaaaaaataaatagagaagaggctgcagagtcagggatgggctcttgatgaatgtgagggcgagtggacgacaccaaggagagattgaaggtcgtgaggtcagatgctatgagcctcagaggagaagctgttctcagaagctgaaagtatcatcacctgggagccattcattagttgaaaaatattgataagacttggccagagaagtcactcaatctcacccctgccagcacgtagaggaaccctggtgggggtgggggaaagatgagatcacctgtgctggattgtggacttttgtgttttcacctgttttcatggtctgagttgggagtttattggcctcaactacatccagccagcccacagcttgttgttaaagaagtcagaccagagactgggtgcggcggctcacgcctgtaatcctagcactttgggaggctgaagcaggtggatcacttgaggtcaggagttcaaaaccagcctggccaacatggtgaaaccctgtctctagtaaaaatacaaaaaagttagccaggcatggtgacaggcgctgtagtcccagctacttgggaggctgaggcaggagaatcgcttgaacccgggaggcagaggttgcagtgagcggaaatcacaccactgcactccagcctgggcgacagagcgagactccctctcaaaaaaaaaaaaacaaaaaaaacacacacaaaaacagagaccagtgcacatccacttcaacactgttttatttgttgcctttcctcttgagtgcctgggaataatttctttagaaaagttccatccttggccaggatggatgcagtggctcacgcctgtaatcccagcactttgggaggccgacgtgggtggatcacgaggtcaggagttcaagaccagcctggccaagatagtgaaaccccgtctctactaaaaatatgaaaattagctgggcatggtagtgggtgcctgtaatcctggctactcaggaggctgaggcaggagaatctcttgaacccgggaggcggaggttgcagtgagccgagatcgcaccactgcactctagcctgggtaacagaacaagactctgtctcaagaaaaaaaaaagaaaaaaaaagttccattcttgtgcccactgtgctgattagcgcagcagttcctgtcttgcaggttagccttccctagaggttctcagagttattaaaaggggtcccttgaatgtacacacatatcaggatttattctagatggactgaaaaaaaaaacccacatactgtctttggaatctggaacatttttagctatgacaaatgtttagaagtcttagatatagaaaagagctgggagagcaggatgcccttgagtccaggtgtagcaatggcactgccacccttgcacaggacgggggaagcactggagaagaaccacacattgaacacctagggcaatggggtctggaagtttacaggtggtacccccagtttacagtagtggcaccaggactccaacctaggctgatttgtcttctaagccacattgccttgggacgtggagtagaaccatgtgattgagtgtacactgtggaagagtggagtttgtttttttttttttttgagacggagttttgctcgttgcccaggctggagtgcagtggcacaatgttggctcactgcaacctccgcctcctggattcaagtgattctcgtgcctcagccacccaagtagctgggattacaggcacgcaccaccacgtctggctaagttttgtatttttagtagagatggggattcaccatgttggccagactggtctcgaactcccgacctcaggtgatctgcccacctcggccacccaaagtgctgggattacaggcgtgggccactgctcccggccggaagagtggagttttatccccagccagttacttattccacgtccccactggtggtgacctcttctccctccccaaaccgtgggcttcttacagctgagatagtagagacaatttttcctatattgatcctttggggtgtgaatggggtgttgatagaaggaggcaagcaaggtaggggatcgggcagaagctggaatcaaggcccagttgagaaaagccaccattggtagctcgggcctcccatgctctctgaccaccagggggcaggccttgccttgccatgacgcctccatcccacatcctctagttagatatccctggggtggcagccacttcgctgctggagaatggctgagttggtccttcccaggttgtgtggcatgtgtggttgttccggtagcttagggaggtaaaataatttgttcaagattagactgggcacagtggctcacacctgtaatcccagcactttgggaggccgaagtgggaggattgctttaggccaggagttttagatcagcctgggcaacacggtgagactctgtctgtacaaaaaataaaaataagtgagccaaacgtgatgatgtgtgtctgtagtcccaaatactctggaggctgacgtgggagggtcacttgagctcaggagttcaaagttcaaggccacggggagctatgatcatatgatcacaccgctgcactccagaatggttgacagagtgagaccctgtctcaaaaaaaaaaaaaggttgtataacataattgtggggattgcgggggagctgacatttgaacctagactcattccaaaccagcattcttaaccatgagatgactgcttctccaaaagaaagctctgaattacttcagtgatgggtgggaactggacagtctacaaaagtactgtgacacagagctagaaacacagatacaaaggaaaaaacatatattaggtcaggtgtggtggctcacacctgtaatcccagcactttgggaggccaaggcgggtggatcacttaaggccaggtgtttaagaccagcctggccaacatggcaaaactccgtcagtactaaaaacacaaaaattagccgagtgtggtggcacacgcctgtgaacccagatactcgggaggctgaggcacgtgaatcgcttgagcctgggaagcagaggttgcaatgagccaagattgtgccactgcactccagcctgggcgactgaacgagactgtctcacaacaacaacagcaacaacaacaacatgtattcatataaaatgagccaggctgggcgcggtggctcacgcctgtaatcccagcactttgggaggccaaggcgggcggatcacaaggtcaggagtttgagaccagcctggccaacatggtgaaactcagtctctactaaaaatacaaaaattagctgggtgtggtggcgcacgtctgtactcccagctactcgggaggcggaggcaggagaatcgcttgaacccgggaggcagaggttgcagtgagctgagattgagccattgcactccagcctgggcaacaagaacaagactccatctcaaaataaataaataaataaaataaataaaaggagccagaccaggagtttgagacctggacaacatagcaagatgctgtctttcaaaaataaataaaagtaaaaagtcaggtgtgatggcacataccagtattccaagctacttgggaggctgaggcaggaggattgcttgagtccaggagatcgaggctgcagtgagcaatgatcacaccactgtattcctgcttgagtgatagagtgagacccttgtctctaaaaaatgtaatagtaaaaggagccagaagggggcatgcggtaaggggtggacacatggcatattacatgtcatccttcacttctatgtgctgtattatctcctgtagctgtgtgatacacatacaagagtgtctggcatactcttgtaccaatccctgtagaggtattaccttgttttattgtgttccacagatgtgcatttttttatatattgaagtttgtggcaaccctgtgttgagcaagtctgtaggtgccacttttccaatagcctgtgctcactttgtgtctcagtggcacattttggtaattcttgcaatatttcaaactttttcttgattattttatctgttatgatctgtcagtagtgattttttttttttgagacagggtctcaccctgtcattcaggctggagtgcagtggcaagatcatagctcactgcagcctcgaaatcctgggctcaagtgattctcctgcttcagcctcccaagtagctaagactactggaacacaccagcacacctggctaattttatctatttatttatttaggcagagttttgttcttgttgcccaagctggagtacaatggcacgatcccagttcaccactacctccgtctcccagtgattctcctgcctccgcctcccgagtagctgggattaccggcatgcgccaccacgcccgactaattttgtatttttagtagagacggggtttctccatgttggtcaggttggtcttgaactaacgacctcaagtgatctgccctccttggcctcccaaagtgctgggatgacaggagtcagccactgtgcctggactttttttttcttttttgtagagctgaggttggccaagcgcagtggctcatgcttgtaatcccagtactttgagaggtcgagtgggcaaatcacttgagcccaggagtttgagaccagcctggacaacatggtaagaccctgtctctacaaaaaatacaaaaattatctaggcatggtggtgtgtggcagctactcaggaggctgaggtgggaagatggtgtgagcccatgaggttgaagctgcagtgagccgtgattgtgccactgcactctagcctaggcaacagagtgagaccttgtctcaaaaagagagagagagagagaaggtcttgctctgttgcccaggctggagtgccatggagccatggctttcacaagcaaaatcgtagcatactgcagtcttgaacttctgtcctcaagtgatccttccacctcagccttctgagtagcagagacataggcacataccactgcacttggcaagaattagctaaatttactctgccacgctgtgtaaatggaacaataaagcctagatggctggatgtggtggctcatgcctataatcccagcactttgggaagctgaggtgggcggatcacctgaggtcaggagttcaagaccagcctggccaagatggtcaaaccctgtctctactaaaaatacaaaaattagccgggtgtggtggcagtcacctgtaatcccagatactagggaggctgaggcaggagaatcacttgaacccagagggcggaggttgcagtgagctaaaattgcaccactgcactccagcctgggtgacagagcaagactccatctcaaaaaaatatataaataaataaataaataaataaaagcctagatgatagtacatctgtttacaacgtggtttactgattttaaaatttttcttttttttgtttgtttgtttgtttttgagacacggtctcaatatgttgcccaggctgtagtacagcagcatgatctcaactcattgaaacctctgccttccagagtcaaatgatcctcctacctcagcctcctgagtagttgggaccacagacatgagccactatgctcagctaatttttgtattttttgtagagatagggtttcgtcaggttgtccaggctgatctccaactcttttttttttttttttttttttgagacaaagtcttgctctgtcacccaggctggagtgcagtggcgcaatctcggctaactgcaacctctgcctccaaggttcaagtgattctcctgcctcagcctcctgagtagctgggactacaggcagatgccaccacacccagctaattttttgtatttttagtagagatggggtttcaccgtgttagccaggatggtctcgatctcctgaactcgtgatccgcccacctcagcctcccaaagtgctgggattacaggcatgagccaccatgcctggcctggcctccaactctttaactcaagtgatctgccctcctgggcttcccaaagtactgggattacaggtgtgacccaccatacctagccaaaattatttttttttaaactccatttactactattcccaatttaaattgtattttatttagagacaaggtctccctccattgctcaggctgaaatgcagtggcaaaatcatagctcactgcatccttgaaactcctgggctcaaggaatcctccttcctcaacttcctgagtagctggtactataggtgtgtgccactatgtccagctaagtttaaatttttttgtagagacagggtcttgccatgttgcccaggctggtctcaaacccctggcctcaagccgtcctctcaccttggcctcccaaagtgctgggattacaagtgtaagccactatgccccgctggtttactgaatattttaagcctactgttgaggtctactgctccgaaaaacaagatttctttaaaatgattactgctcattgacaatgtacatagttatccaagagctctgatggagatgtccaaagagacgaatgttgttttctttttcttttttttttttttttgagacggagtttcgctcttgttgcccaggctggagtgcaatggtgcgatatcagctcactgcaacttccgcctcctgggttcaagtgattctcctgcctcagcctcccgagtagctgggattacaggtgcgccccaccacacccggctaattttgtatttttagtagagacggggtttctctatgttgatcagactggtctcggactcctgacctcaggtgatcctcccacctcagcctcccaaagtgctgggattacaggcatgagccaccacgcccagctgaatgttgttttcctgcctgctaacataacatccatcctgtagtccatggtttaaggagtaatttagactttcaagtctcattatttaagaaatacatttcgccaggcatggtgactcatgcactttgggaggcctaagtggatggattgtttgagcccaggagttggataccggcctgggcaacacagggagaccccatctctacaaaaaatacaaaaattagcctggtgtggtggtgtgcgcctgcagtcccagctactcaggagactgaagtgggaggatcaactgagccctggaggttgaggctgcagtgagccgtgatggcgccactgaactccagcctgggtgagacagagccagaccctgtctcaaaaaaccaaaacaggaatcccagcactttgggagggcgaggctggtggatcacttgagatcaggagttggagaccagcctggccaacatggtaaaaccctgtctctacaaaaaatacaaaatttagctgggcttggtgatgtgcgcctgtaatcccagctacttgggaggctgaggcaagagaattgcttgaacccaggaggcagaggttgcagtgagccgagattgtgccactgcattccagcctgggcgacagagtgagactccagctcaaaaaaaaaacaaaaaacaaaaaaacccaaccaaacacacacacacacacacacacacacacacacacacacacacacacacacaaggtgattgctatgcaaattaaatatagcttcaccaatcagcttgcttctcctaatccctcatagaaatcttggagtagccctggggtgcagtgaggccagattccaggaagggaatgggtgggatgggtctgggtactggtgagcagcagggagggtaagtaggttagcttctgggccaaggagggctcctgcaggcttgttctgggtaaaagctggtctccttgaacctcggaaggtgggggaacccacatcctggtctcacccgcccaaccgcccactcacccttgggttagcagccatctaagccccaccctccccctcacacgcttagctagcctgccacaagctggccccttggcctcctagagaccctgacatctcctccagcagcatctgtcctctctcctcagggaggcaagcatttgatgctcgaggtccctggcagttgtggtccttggcaagtgatgtgtgagtcccgtgtgtcataggaagctccccatccccatctggtgaccaaaggcctggctacaagtagtgagtccttcctcctccacccagacctcactgctcagatccccttcgccaactgggacatcttccgacatggcctggatgctgttgctcatcttgatcatggtccatccaggtgacagggcgtgcgctcaggaccccaaggagtgtgggtgggaggagggagatccaggaggctggactagatgctatagggaacgggcttggtgggggctgaaacacacggctctgagggaggagtgggactgctccaaaggtgacactcagtggactcccccaattcacagtctctctgtgtcacccactgtgaggctttttagtttgagagatccaagtaaatctatgataaatttcttggtgaaacttttttttttttttttttgagactgagtctcgctctgtcgcctggctggagtgccgtggtgcgattttggctcactgcaacctctgcctcccatgttcaggtgattctcctgcctcagcctcctgagtagctgggactacacgcacgcacgaccacacctggctaattttttttttttttgagacggagtcttgctctgtcacctaggctggagtgcagtggcatgatcttggctcactgcaacctctgcctcctagattcaagcaattctcctgcctcagcctcctaggtagctgggattacaagcgcgcaccaccacacccaactaatttttgtatttttagtagagacagggttttaccatgttggccgggctggtcttgaactcctgacctcaggtgatctgcctgcctcggcctcctaaagtgcggggattacaggcctgagccactgcgcccagccatttttgtatttttagtagagatggggttttgctatgttggccaggttggtctcaaactcctgatctcaagtgatctgcctgcctcggtctcccaaattactggaattataggcatgagccactgcgcccgcctggtggtgaaactttttttttgagacagtttcattctgttgtccagtctagagtacagtggcggtatctcagctcactgcagcctccacctcctgggtaaaaatgattctcctgtctcagcctcccaagtagctaggattacaggtgcatgccattactgctggctaacttgtgtatttttagtagagacgaggtttcaccatgttggccaggctggtctcaaactcctgacctcaggtgatccactcgccttggcctcccaaagtgttgggattataggcgtgagccactgcacccggccgaaactgtttttaatgaactgagagaccttaactatcaggcatattattaactaaatgcaggagttctcaaaatgtggatttctgggaacctagaacaaattcttaggccccactccagacctactgagcccaggaatctgttctagcagatgctccaggtaatttccatacacactcaagtttgagaaccactgaaatagaatgacttgtaaatttccctaagtagataatttaatcagggattttaatatttggtttaattcatcaacatggacgggttaaataggaatctcaaccaattaaggccacgtcttcacctggagatttaattagttactttctttaacgaaaaccaagagtggctgggtgcactttgggaggccgaggcaggtggatcacttgagatcaggagtttgagaccagcctggtccgaggtgggtggatcacttgaggtcaggagtttgagaccagatggtgaaaccctgtctcgactgaaaatacaaaaattagccagtcgtggtggtgggtgcctgtagtcccagctacttgggaggctgaggcaccaggatcgcttgaacccaggggacggagtttgcagtgagccaagattgcaccactgcattccagcctgggcaacagagcaagaccccatctcaaaaaaagaaaaaagaaaaagaggaaggatggcttactgtacaatgccatttgtactaaaataatacctggataatataatgagtgatattagttaactaggcagctgcattcattaatgagcttaatttcaccatgatggtttacatttcagctagacaagttactactgaactggctggagaatgatggcagagggtgagagtgagagttggtataggaagaatttgaaaaatgatttttattttttattttttgagatggagtcttgctttgtcgcccaggctggagtgcaatggcgcaatcttggctcactgcaacctctgcctcccgggttcaagcgattctcctgcctcagcctcccgagtagctgggattacaggtgcacaccaccatgcccggctaatttttgtatttttttagtagagacggggtttcaccatgttggccaggatggtctcgatctcctgacctggtgatccgcccacctcggcctcccaaagtgctgggattacaggcgtgagccactgcacccagccgaaaaatgatttaataagcaatgttaagaaatcagattggttaagagggaagggtttaatgaggccccaaagtatctattcccatgcaccctatgcctggagaaagctgggatgttctactccaagctctgttgtcttttctctttggaataactggggaggtgtttctctgggtcttccttctgcccccaggatcctgtgctctctgggtgtcccagccccctgagattcgtaccctggaaggatcctctgccttcctgccctgctccttcaatgccagccaagggagactggccattggctccgtcacgtggttccgagatgaggtggttccagggaaggaggtgaggaatggaaccccagagttcaggggccgcctggccccacttgcttcttcccgtttcctccatgaccaccaggctgagctgcacatccgggacgtgcgaggccatgacgccagcatctacgtgtgcagagtggaggtgctgggccttggtgtcgggacagggaatgggactcggctggtggtggagaaaggtgagatgctgggaggtggtgtctcctcctggctggaggccccaagaggcaatgtccttgggaggcagggatgctcctctgaggccccttccctccctgagcctgtgtgcacttcttccccaacccccgtctccattgccccatgcagaacatcctcagctaggggctggtacagtcctcctccttcgggctggattctatgctgtcagctttctctctgtggccgtgggcagcaccgtctattaccagggcaaatgtgagtaatggagccaggggcaatagtggacgggatgggaggggcagtaagagagtgggaggagggaggacagagaccaggaagaggagagcctcgggactgcaacactgagcagctcctgtcctctctctgaccaggccactgtcacatgggaacacactgccactcctcagatgggccccgaggagtgattccagagcccagatgtccctagtcctcttcaaaagaccccaataaatctgccccaccactaactcctcatgagtctcaagtgttttcttctccattctccagatgccaaatctactctctccggattcccccaactctgaactttcccttccaccaggtctgacctggaaaggtccaagaaggcagctgccggctgtggtcccagcgcccctcccaccaccatgtgggagctcagcacatctgcttcccccagtcccaggaggctgagcctgattgtcctgagaaatgggaaggatcagatatgactcctccttggcaactgccctttcctgccaggcccacacataccctcttctggctgttaggggagcttgggtccctgaacactgtcattcacccaataaattactatttgaccccagagtgggtggaagggtgagccatgtgttttttttattttaatttttaaaaaatttaaaaaattccctattcaaaggtcaaaaagccacataagttttgatgatgatcaatttgaacggaggctcgagatggactgagaggactgagacacagaagtggggggaccatggtttttactggctggaccacagggggaccctgtccacccgcctgggttgaggaaggtgtctggggtgctcaggtgggtttgttctcagcaatgcaggcatagtcagctcttggatcctccttggtgcctctcttgtctctgcccctgaggtcaggtccctcactgctgggcactggcagcctctgcagagatgcatagtggagttcctgctctgaggagccctgggcctgggaccaggacagaaggtgctgatgggaggcgatgccgtcagatccttccctgtgagttctgctcccacctccagcctttcttacttctctccctctctctctctctctctctctccctctctctctctctctctctctcttttttctttggagacagagtcccactatgttgtccaggattgtcttcaacccctgagctcaagctatcttcctgcctcagccttgcgatagctggaatgacagacgtgagccactgtgcctggttctggagcctctctctctctctctctttcattgctcttctctttgtgtctctctcactctcattttctccctgtctctcctatcctctgtctcactttttctcttggtttctgtctcattttctctttctcttttgcctcgattttctctgcctctctcatgctcctactttctctctccttgtctcccgtccccaaccctcctctcagcgctcagccatgcttctccccactcacccactcaggatctctcttgccctcccccttccctgtccccagactcacccagctcctctccagcctctttactggaagaaaagaagaagctcaacacagcccaccctttgtgcttctcccgggccctcccgggctccccccaccagcaggcgtggactcccctgttggcttcccagtggctccagggccaggcagtgttctgggaaagcagtgggaaagcgtgtgggggtgggggcacagggggcactgctgcagggggagggagggagtgcagcgctcacctcttcgatgcagccaacacaggcaggcggacagaaggaccactgccagaagcaggagcccgcccagccccaggcccccgtagatacatatatcttcagggaagagggctcaaggttatgaagcccattccttctccagcgtaccccagcctcctggttggttgcagctttctcagattccctctccaacagttttagaggcagaaaaatataccctcagagcttctccatcccagaccttaatacctcacctcttaccaggtttctgggcctcccgtgaggtccctttccctcctgtaccagctgtccccagaggcctgtccacctagtcatgagctgcatacatcactgttccccatcacttcctaagctcccaggaccctctctatgcagatgcaagagacactttacttaccatcattccgcgataacattaggtcagggatcagggactggcctggaggtcaggaactctagtccttgctcttttaggcgaaatgatcaggggctggtgacttgcctcaagttcctcatctgtgaagtgaggggccctctgttataatcgttcccaggctggggagcctcccttatgtgccaaccctgagctgggcactttccattcctcactgctaatccccagaacatagggtatcatggtgcccgttgcccaagtaaagacccgagattcaagcctggactttactaggtcacccatcccagaaaggtggagctggggtttaaggccagctctgcccaactccagagcccagccctttcctctgccctgggctgaccacgtggtttggaggggacttttcagccctggatggttctaggtgctggtaaggggatgatggaggggaaggagcctgggcctgggtgggtgtgggcactggggggaagaagggagggtgatatcagcacacccagcaggtgggctgctccctgagccgcagagcagcgcgggagtgtgggggcccccttggctggtgtggagagctgcttcccacaggcagatgctgctagggctgaagtggggcatggaggagtatctggggccccataacttcccctcaggcacttcctcccctccaaccactggttcctgtttgagggtgaagagggggccgttctcttcaccccagagccagatatactgactagggtctggaaactgggacccttctgggtttaagaggaattctggggggtggggagcagaagtgcaggtggaggccataagggccgtgggcacagaaatgaattgtctttaatttctttggggagcagagactcagaggattcctcgacggcccagggaaactcaaacccatactctccctcccctcatcttagcttcaccccactctggggtgtgaccatccttccaccaaggtccctgcccattcccagcttacccagagcttgtggcctgcaggatggacagactccaaactggccagtgctgtctggctgaagagaagtgttgccacctcagacattcctgcccctcctctggctttaacttctcccccagcctgggttcctccccagcattgttaggagaggaagttcggctccagggttagggttacaacatctttcttttcaaacttctgggcctgtagctagggccataatctgcctcagctccagtcatttcactgatcctgccactagtcagcaaacacccaccaccttcaggtgtcttccttgattaactcttctctattacctcttacactgcatctgttgagacctcttgatcttggcatatgtctgtggacacatgtaccctgctccagttcagactgggagctctggcatatttggtgttctggtgacccacttggtgttctgcagctctatgcagcaggctgcttggctgtctgattaacaaacatgagagttaaaggcagccatactagatctacatgagccctgtggatagatcaaggacagaaagttggtgacaagttggtgacaggaaaggaggtgtgggcaatacaggtggacttcctgtaggaggcagcattctggcattgaacacagaactaagtaaaggcagcggcctgaggctctctggagagacctgggtgaaggcttcttagtggcactgtgatggagaaggagatgggtgctggaggattgcacacccactccttgaggagggtgaagactggggagcgcctgtaaggcaaggggtgaggaggagatgtggtgcctgggtgggtccatattaatttgcgtttccccttccaaattcaagaaccttctacttcctcccccacccttctccccatcctccatgttccccatgctgaataatattcagggttttttgtttgtttgttttgttttttttacattttattattaaaaagtgcaaacatagggtgaaatgagaataattgtacagtgaacatattcttaccacctagatgctactattaacattttttgttttgttttgtttttgagatggggtctcactctgtcactcagcctgaagtgcagtggtgaaatcatagctcactgcagccttgaattcctgggctcagaggtcctcccaccttagccttctgagtagctaggactacagacaccagctaccacatgaggctttgtagaaatggggtcttactatgttgcccaggctgattttgaactcctggtctcaagcaatctttccaccttagccttccaaagtgctggaattacaggagtgggccactgcacctggctctattaacattttttatttgctttatcacatatttatcaatccatctcacttttaaatatcttttaaaattacaaatatcagtacattttacatctaaacccttcagaagcttaacattgactggagttcagtatttatttccccatttcttttctggcctgaggaaggcaaattttacatacaaatctcaagtcagtactcttttttttttttgagacggagtcttgctctgttgcccaggctggagtccagtggtgtgatcttggctcactgcaacctctgccttctgggtacaagcgattctcctgtctcagcctcccaagtagctgggactacaggtttgtgccaccatatccagctaatttttgtatttttaatggagaaggggtttcaccatgttggccaggctggtctcaaactcttgacctcaagtgatccacctgccttggtctcctaaagtgctgggattataggtgtgagccatctcgcctggcctaatactgttttgtttgtttgtttttgtttttaagacagagtcttgttcttgtcacccaggctggagtgcaatggcatgatttcggctcactgcaacttccgcctcctgggttcaagtgattctcctgcctcagcctcccaagtagctggaattaaaggtgcctaccaccacgccccgctaatttttatatttttagtagagatggggtttcaccatgttgatcaggctgctctcgagctccttacctcagatgatccaccttccttggcctcccaaagtgctggtattataggcaagagccactgcgcccagccccagtattcagtttttaaactgtcttgttatcaaggctctggagccagatgcctgggttcaaattctggttctgccactgactctgtgagctccataagtttcttaacctctctgtacctcagtttcctcttagggtttttgtcaggattataattattggctgggcatgatggctcatgcttgtaatcccagcactttaggaggccaacacgggcagatcacgtgagtccaggagtttgagcccagcctgggcaatgtggcaaaaatccatctctacaaaaaatgcaaaaattagctgggcatggtggcatgtgcctatagtcccagctattcaggaggctgaggtaggtgaatccatagatcctgggaggtcaaggctgcagtgagccatgatcctgccattgcattccagtctgggtgacatagcgagaccctgtctcaaaaaaaaaaattattaaagtgtgtaaatcagtggcataaacatgttaagtgcattttgtgggtcagctatattattattagtattacggaaacacatagagatgttaccaagaaggggagatgattggagccacttccagcttccttggacctggtctttcttcccttgactctttttttttttttttttttttttttttgagagagagtctcagcctgttgcccaggctggagtgcaatggtgcaatcttggctcactgcaacctctgcctcccaggtttaagtgattctcctgcctcagcctcctgtgtagctggaattacaggcgcgtgccaccacgcccggctaactttttgtatctttagtagagacagggtttcaccatgttggccaggctggtctcgaactcctgacctcaagtgatccacctgcctcagcctcccaaactgttgggattacaggtgtaagccactaccccggctactcccttgactcttaaccactcatgctgcctacatctaccattcatgtggtccttgctgctttgttttggttattcctgcatttatttgtccttttattcatttatgtataaacatttagtaagcacctactaatggatagggctcattgtagacttggaagctctctgagggtgggagtatgcctcgtccatctgtctttactttttgtagcaagggaggtaaagctccatttccatccctccttagtgagtcagtagtcagtggtgaggctaaggcttacctctccctttctcactcagcacagggggctggagatgagcaagggaacgggaggaggtcagcccagtatgggaatcagttcttctcagggaacccagacatccatccctcaagattccagtccttgtcctagtccggcccttgacctcagagacgggatcagctcttcctccagcacctaccttgagggtatagaagaatgcaaaccacattggaaacctggagatctgtgttctcatttcagctctgctgactggcttcctgcaagctaccttccctccctgggcctcagtttctctctctgctgagccagaagatgtctaaagacccctttggttccaccctgagagcctgtctccctaacctcaacttcttccccagttcagagaacccaggcatccagctgccccaccccagctctgggtaaacaggaagctgggtgaggggagcaggggtgtgcggaaagtcccagccaggtgtgcaggtctacagggagggggtgggcccgtccctgaggtatgaaagccccctgctctggctctggttcagtctcaatgggggcactggggctggagggcaggggtgggaggctccaggggaggggttccctcctgctagctgtggcaggagccacttctctggtgaccttgttgctggcggtgcctatcactgtcctggctgtgctggccttagtgccccaggatcagggaggactggtgagtggctgcaacaggccctggtggagagttgtatcttgcggatgcttggctccctctggttgtgcctgtggtcttttgccccctctggctcagctggctcggctgtccctggtggggatgtcttgtctctttgctgactctctttccatgttcctgtgatgttgtgcttgtgtcccgacataagccccttgtgtctcctctcctcttcccgaggtacatctgtttctccgcccaagtacctatgccttgcttgttctcccttctaaggaggtgtgtgttggggatggtgctggtaggagaaaccccaggcctgcagcttgggtccactttcagaggggtaggggtgacatgagctgaatctgaactctgggcactgtgaccccacccaaccaggtaacggagacggccgaccccggggcacaggcccagcaaggactgggtaagagcagactgtctctccttccccgcttcagaccctcaggggctcccagctccctgctgcgtccccagatacctcttcctctaggaatccaggctccccatccctgcgccctgttctctcaagggtagcctgcatgggtggctgccctgcccccaatcgtggactctttgccccttccagggtttcagaagctgccagaggaggagccagaaacagatctcagccccgggctcccagctgcccacctcataggtaaggacctccaagacctgaataagagtgtaaataatccgaaggttccagttctgctcgcccagagtccttcggctccatgattccagtgctcggtttcccacccgcttcacgaccttttgtcgctcgtgcccactcttacgctcgtccccgcagtgtagtttcttcttccctccggtgcaagcaaaagccggcctggaggtccccactacagcgttctgcaccccacatccgtgttccctcggcccccaactcgcactcatcccagaaacagcaccatccctcctcccccggcccggctcggctcccgcaggggctaaaagccgccacttccccagaagtcccaagcctttaggatcgcattcccaagagcgcgtcggcccgtgtctccgcaggcgctccgctgaaggggcaggggctaggctgggagacgacgaaggaacaggcgtttctgacgagcgggacgcagttctcggacgccgaggggctggcgctcccgcaggacggcctctattacctctactgtctcgtcggctaccggggccgggcgccccctggcggcggggacccccagggccgctcggtcacgctgcgcagctctctgtaccgggcggggggcgcctacgggccgggcactcccgagctgctgctcgagggcgccgagacggtgactccagtgctggacccggccaggagacaagggtacgggcctctctggtacacgagcgtggggttcggcggcctggtgcagctccggaggggcgagagggtgtacgtcaacatcagtcaccccgatatggtggacttcgcgagagggaagaccttctttggggccgtgatggtggggtgagggaatatgagtgcgtggtgcgagtgcgtgaatattgggggcccggacgcccaggaccccatggcagtgggaaaaatgtaggagactgtttggaaattgattttgaacctgatgaaaataaagaatggaaagcttcagtgctgccgataaagatgctgagttgcgacacacgtcttaattcagggtgggtgcacgggtgcgggttaaatattctcagtactcttctggttgcttgaaacaattcatcacaacacagtgtatggcctttgctcctagggatgatggtctgcctgtcccaccccctccctgcctctgaatggccaggccccaccattagcccagttggagggtgggaggaagggggacttctcaaactccgaagcttctctaggcatcctgattttcagggccacatggtcccaaccagactctgcaccatactcttttctcttgggtaccccccaacagtgagaggggtcattacagagcccagcaagcaccactcagaaaggcccagcagcagagtaagcccctatcatgacagaggaatgaagcctggaggggccccgcacttctccccctagagctgcctgaaggcctctctgtctcctacccgacagtcaactcttctcctccaaggagcttaattcaaggctcatggggtctgaagggaggaggctgaaggagaaagaaggggagaatattagagagagatggggatggcaggaaggagcctgtggtgcctgaaaacaccaggaagttctggggaggaggaaaaaccgatgccccacttagggtgtcccatttagggtgagacggaaaatcctcacctttttttcacactttaggtcccccttcccaaaagtgagtaagtgtgggtgcttctgggatgagtaacagtgtcccccattacttcatggctgactttcagccacaggctggaggaggcagagggtgacccaaggccctatctaggtcaccccaatgggtcaccctaccccctcagcctaccacatggttttctcctgcctggcaccccagggctggaggtaaagcctaatttccgaactcagtgggggctcccagtctaggggggctcaatttccgtctccatatttgtttttggaattattatttttttgagacagggtctcgttctgtcacccagacgggggtacagtggcatgatcatagcttactgtaacctcaaactcctgggcttgagtgatcctcctgcctcagcctcctgaggagctaggattacaggcatgcaccactacacctgactaatctttaattttttttctagaaacaaggtcttgctatgttgcacaggctggtcttgaactagtgggctcaagtggtcctcccacctcagcctcccaaagtgttgggataacaggcatgagccactgcgccccacccttatttgtctttgactctctccagaagagccttcatccagggagggggtgcttttctctttccggattacccacctctcacctctcccctccttcaccacaaagaccagtgggaccaagccggcatgtgagtccttcacccacatcttattcctatgtttcattcttttttaaaaaatagagacaggatctcactatgttgcccaggttgctctggaactcctgggttcaagcgatcctctcaccttggccttgcaaagtggtaggattacaggtgcatgccaccacgtccggcagttcggttccttgttctttattgtcctcagtctcttcgatttcacccactgagagaatggaaggggatagaacagctggaaactggttgaaggaagccagaattcactaagtgcccactgtgccaagggctgagtgaggtcctctgatggaggtcaggccttctctcacatgccctatgtgtggtggacattcctatccccattggatagataggttaagtggctggttcaggttgcagagttaggacagggtgatttgaagcctagacacccgaatctctggaagtcccttggctgtgtgattcaggtacctgagaatgcggctcctctccagctctctccggactgctggccagctgcaacagccggaaatctcacctgagctgcaggattttcccagcaaggattggaattcccagagttggaaattcccatgccctgagggagaggtaattaggttcaggctcttgtttcctgggggatggggaatattctgttgggctttgtttatgtagggtctccagggccctaggagtctaaggatgggactgggtccgagggatcttaaagcctgtggagagaggacttagggagcttcttcccacccacaagaagaggcagatgcagaattaattccaagaaggagaccatgtttcttttctaagcaaactttatttctcgccactgaatagtagggcgattacagacacaactcccctggggagcagaggctcagcaatgagtgacagttggtcaccaaatcagcattgtttagacaacttaatcagataaatattttaaaaaacataatcaaaagaaggcacagaggccagggggctacatgggaacagcctattgttcagctccgttttcacggaaaacatgtctgagccaaggcagctcctacattgggtcccccaggataccccggtctcccaaataaatacattcatctgtaaataaataaataataaataaataataaataatcacaagtgcaaacataaatagagggagctggctccatggggagggctgggctccgtgtctcaaggaagtctggaaacatctggagagaggaaggcctaaggtccacttgtgtcaatttctaggtgaggtcttctcaagtcctgcagcattctggccagaaccaaaggctccctggtctccagattccagatgtcagggatcaaagctgtaggccccagtgagttctggaggccccagtttgaattcttagtggttgccagcacttcactgtgcaggccacacattcctgaatcccaggtttcgaagtggtggtcttgttgcttaaagttctaagcttgggttccgaccctaagcccccaattctctttttgagccagaagaggttgagggtgtctgaaggagggggtaataaagggattggggcaggggaggcgtttgggaaggttggatgttcgtcctcctcacagggcaatgatcccaaagtagacctgcccagactcggcaaagtcgagatagtcgggccgattgatctcagcgctgagtcggtcacccttctccagctggaagacccctcccagatagatgggctcataccagggcttggcctcagccccctctggggtctccctctggcaggggctcttgatggcagagaggaggttgaccttggtctggtaggagacggcgatgcggctgatggtgtgggtgaggagcacatgggtggaggggcagccttggcccttgaagaggacctgggagtagatgaggtacaggccctctgatggcaccaccagctggttatctctcagctccacgccattggccaggagggcattggcccggcggttcagccactggagctgcccctcagcttgagggtttgctggagggagggagagagggagaggagagtcagtgtggccatgtcggttcactctccacatcctggccctcgagctctgcccaccccacatccggttcctgtcctctctgtctgtcatcccacatcccacctggccatgacgttctgagtatcccactaaggcctgtgctgttcctccacccttcccttgagctcagcgagtccttctcacattgtctccaagttctgcctaccatcagccgggcttcaatccccaaatcctagccctccaagttccaagacacatcctcagagctcttacctacaacatgggctacaggcttgtcactcggggttcgagaagatgatcctgaagaggagagagaaaagaaaaagctgagacccttaaacttcctagaaaatacccccctactttcacctccatccatcctcccccaagaccaaaactttaaatttcccccactgcttccataccggtactaaccctacccccaaacccaaacccagaattaggaaagaggtttggagacacttactgactgcctgggccagagggctgattagagagaggtccctggggaactgttggggagaaggagaatggttaacatcgagggagtcacccttaaaggaggaacagctggctgcctgtctggcctgcgctcttagccctgaggtgtctggttttctctctccattcatctgtgtattcaccttccaggcattcaacagctctttccctgagtgtcttctgtgtgccagacaccctatcttcttctctccttatctcccccatctctctccttagctgtcatatttcccgctctttctgtctcaccatctttattcatatcacttgtttcttcccccatctctcttctcacaccccacatctgtctccatatcttatttatatatctgcttgttcattcattcattcattcattcactccatacacacttagtgagcaccttccatgtgccagacatcctgtctctccatctttctctctctctcttccccatctcttgccacatctctttctgcatccccgtctttctccacgtttttttctctccatccctccctatcagcgcacatctttcacccatcccatctctctccctctcttgcgtctccatttccccttgggtgggagagtggatgaaggctggccaggcactcacctcttccctctgggggccgatcactccaaagtgcagcaggcagaagagcgtggtggcgcctgccacgatcaggaaggagaagaggctgaggaacaagcaccgcctggagccctggggcccccctgtcttcttggggagcgcctcctcggccagctccacgtcccggatcatgctttcagtgctcatggtgtcctttccaggggagagagggtggagccgtgggtcagtatgtgagaggaagagaacctgcctggcagcttgtcaggggatgtggcgtctgagggttgttttcagggggggtctgtagttgcttctctccctcttagctggtcctctgctgtccttgctgagggagcgtctgctggctgggtgtgccaacaactgcctttatatgtccctggggcgagaggagggcggggaaagaatcattcaaccagcggaaaacttccttggtggagaaacccatgagctcatctggaggaagcggtagtgggccctgcaccttctgtctcggtttcttctccatcgcgggggcggggatttggaaagttggggacacacaagcatcaaggatacccctcacactccccatcctccctgctccgattccgaggggggtcttctgggccactgactgatttgtgtgtaggaccctggaggctgaaccccgtccccatgcccctcaaaacctattgcctccatttcttttggggaccaggtctgtggtctgtttccttctaacttccagacaggatgcaggaaaaagatagaactagaactgggaggggcttcagaaagctgagtccttgagggagagaaaacggggttggagggaaaagctgtgttgagtcctgaggcctgtgtttgggtccctgcggggagaaggagctgggggcttggtggcaggcttgaggcctcaggaaaggctgggtgggggtagcagggacaagcctgggacagccccggggagtgaaatcacccccgggaattcacagaccccactggggcaggccttcttctttcattctgacccggagactcataatgctggtttcagtcttggcttccaaggaactctggggtccctgatttttttcatgaagctctcacttctcagggccccagtgtgtggccatatcttcttaaacgtcccctgtattccatacctggaggtcctggaggctctttcactccctggggccctctacatggccctgtcttcgttaagggggggtccccatactcgacttccatagccctggacattctcctacccattgctgtggtcacatctccccagaggtctcctgtaacccattcctcagagccgctacatgtggccatatctcccaggagctccctgacccccgcccctccagaccctgacttttccttcatcttctcagcttctcctttgcttcccctgcagcagtctggcggcctcacctggtgagtccatcacatatccctgaagctctctgagcccttatccttttgttctccccacagctcttgctccctttgagccctctgtccctccctccattccttagatagactgggaagttctcactcccagacacacacacacaagcagacagcatttcagagaaaagaggtttattgggcttcatcgagggtgcagatgcctccgtgtggggctctggtcggcagctggctttcagagcctttccctgccttctggggccctgtgatccctcatgcctacttctttctctcttggtcagccttgtgcgcatgccctctcactcttcatctcttgggcctgtctctgtttctccttggatgttcttctattattcccctctctccatcctccataaataaataatttaatttttttgccttcataaatagtcccctccctgcctctagtcatcccccaagctcctccatgtgcctgctcttcctctgtgtgtggatctaggccccacctagctggtgggacagaccaacagctttgggctgggaattcctaggcaggcttgaaatcctcagccagacagacatcagggatggttcagggaggtgtggtcccctgggatgcctagaattccttctttgaaagctccggtgacttgatcagggaagacttgagctgttggaatggccaaaggagaggtggtgacgacccctgaaatggtcagaatggaggcagaatggggagaaggtcttgaaatcaattattttttctttctggatttttccaagttctacagagcgaaggctccaaagaagacagtactagggctgaggactaggtgggggatgccatctgtgtgggtggatagctggtctccctgggtgagctggaacgcagccccgtggtacatcgagtgcagccagggttcctgcagccctggatacaccatcttctgggagctgaggagaggcacatggaaggggtactgggaggagaagagctggacctcatgggccaggtagagtggggaggaggtggccttgggagagtaggctttcccagagaagaccacctgggagtagacgaagtagatgccactggtggggaccaggagagaattgttgctcaaggagaaaccatcctggaggaaggcacggtccgtgtttgctctccagagcagtgagttctgcttgctggggtctcctaggaagagccataggggatgggggtgggagatcaggggtctggatcagaggtctcaatccctgaggaagtgggcactgaacaactgagttcctgggggatggcagggggaggcataggagtgggctccctctgttttttttagcgtgggggaagttgggggagaggggtggatgcttgggttcctgaggcaggggtaggaggagagctggtggggacatgtctgggaggtcaggtggatgtttaccaatgaggtgagcagcaggtttgaggttgctgtgggcaagatgcatcttggggtgctgacgggcagtctgggcagctgaaggtgtgaggccaacaccagggagcccctaggggagaacagagttgaggggggctctagggctcaaggtttggctgagccaccccagcagcccccattctcctgctgcctcacctgggccccaggcagcagaaccagcagcagccccagaaggaggaggtgtagggtggtgccacacacccttgggaggaagagacgttcaggtggtgtcatggggagaacctgcagagaaagagagagagagagagagacagtgagcggggcggggcacgcggcggaagacagacctcccgccctgggagacagcaccccccgacccccgagagagagatcgacagagaaggggacaagatgcagtcagagaaaccccaaggtgagcagagggagacagagagagacaggaagggaacagagaggaaccatggcagaaacagagaatgtgtgacagagacaatgagactgacagatggagagtcagagacagagaaggaaaccaaaaccaaacccaccaaggcccaggcccaggcaggccggggatccaggcagcaggtgcaggagggaccgaggcccaggcagagggcaggacactgcggggcggtagtccaaagcacgaagcacgggcagcccaaggagatggggcaggagagcctcacctgctgtgtggagcccctgggcccggacgctcaggtccctttatagaggaagcggcagtggcagcgtggcaggcagcgggcgggttctaggtcggggctggggcccggggaagcccccagggcttagaagatactgctgtttcagtcaaaggcaggaaaggctgaggcctaggagagaaccacaggctgggggttcaggcgactgagttctgggaaagggagtcgggtcaggggaatcgtgggctgggagggccagggagtggggtcaggcctagagttccaaagaagggacagtcaattcagagaggaggcggttgagcagctggggtgtgagctggaggcccggttccctgaagagcaatcatatataacatctctgcacccttggctgagtacaggcttctctctttgcccatttccttctcttgtacccctgtccttgtcccaaacaactcaaatcatacttgtcccagtatacggactttccagcccatctggcaggtttcacatcaagaaggtccattatatatccccttcatcggggacattctggtgtttgcctcttgtccaggtgaaaatattaatggatcccccttccactcttgaaagtgtcctagtttggaagataaattttttggtccccttactcagagatgatgctggacagtcaagtatgatgaggtctcatctcactcctgaaggatgccctccatctcttcctgacttcaggtggcttccacagaacagatttatataaccccaaataaacacacattccaggatcaatgtggcagacaccttccaaagttttctacaaaggaagtttcagaattccacatgggtgaggcttaagggtggtgacttagggtggggtggggacagctaagggacttgttctgaagctgcatttgcagagccaatacattattttaaaattgttccaggcctggtgcagtggctcacacctgtaatcctggcactttgggagtctgaggtgggcggattacttgaggtcaggagtttgagaccagctggccaacatggtgaaaccccatctctataataaatacaaaaattagccaggcgtgctggtgcgcatctgcagtcccagctactcgggaggctgaggctggagaattatttgaacctgggaggcggaggctgcagtgagtcaagatcgcaccactgtattccagcctgggggacagagcaagactctgtctcaaaaaaaaaaaaaaaagtttccaaaatttttttcctttttattgatatgtaacttaggtatgaggtggacacctcttaagtgtacagctgatgaatttttccatctgtatgtagccaccacccagctccacgtattttcaggtccccagcaggttccctcatgccccctccctgctgataccctccaaagataaccaaccactctctcacttttatcaccatagattatttcctcctggtttggggcatcatataaatgaaatcacacagaatgtactcatttctgtttgacttctttcagtcagcattatgtttgtgagattcatatacgtggttgtatgtatcagtaatgttttttaaaaaaattatgatgtaatattctattgtatcaatatattctaatatattctgttgatggggatttggtttgtttctagtttttgtctaacacaaaaaatgtctaacacgaacattctcatacatgagcccattttcacttagcttgcaagttacaaggtttaaaaaaagcagtttctaaagatgactttattcacttttcctaagtttgagataataccaacttgtcacctcaaatattattactgctactgatgtgattttacttggagagtgttagaggggttggagctggggctggtggtgacccggggtaaagcccactgttgcatggggcagaccacttctctccccaggcacaaggtccctgaggggtcttggtgtaacatggagggacatgtaagtaacattctgggtgtgtatgagctatttctcctgttcttctctacttgaggacctgcccctttgccttttatgctttactagtcttagctattatttctgtaggggcagaaaggggtgatcccttcctgacccatcataagggttatggccaatactcctataataaaagacagattaacaagagaaaagcataatacatttatttaatcaaagttttaggtgacatgggagccttcagaaatgaagacccaaggacccaggggaaaactatttttatgcttagatttgatgaagaatgaacagctgtgcagaaatgtaattgaacaaaaggagtatcatctaatggtcacagactgggactggggggatcccagcaaggcctggccatattcttcttggtctctctgtacagcattccttcctcccaggtatagggcagaacctcttctggaatgagggtcttataacctactatcagatgagataggtcagaaaatttcttttcctttttttttttttgagacagtttctcactgtcgcacaggctggagtgcagtggcacgatcttggctcactgcaacctctgcctcccaggttcaagctattctcctgcctcagcctcccgagtagctgggattacaggcacacgccaccaagcccgccaaatttttttttgtatttttagtagagacggggtctcaccatgttggccaggttggtcttgaattcctgaccacaggtgacccaccagccttggcctcccaaagtgctgggattatgggcgtgagccactgcgcccaaccttcttctcattcttttaaccttattatctcttgtgtcagtgtgggtttcccttttagcccctgctcctttctttttctctgtgttgccctttctctcagggtcctttttgcttcctgttgtctctttctgcttctctaatggtatgagctgatggactgggaccccagctgagctatattaaaatataaaatgttattacaaggccaggagcagtggcacatgcctgtcatcccagcactttgggaggctgaggcgagcagatcacaaggtcaggagatagagacaatcctggctaatacggtgaaactccatcactgctaaaaatacaaaaaattagccgagcatggtggcacgcgcctgtaatcctagctactagggaagctgaggcaggagaactgcttgaacccaggaggcggaggttgcagtgagccgagatcgtgccactgccctccagcctgggcaacaaagtgagactccatttcaaacaaaccaaccaaaaaacaaaacaaaacaaaacaagcaaacaaaaaaaggtattgcaattaacagtgagacacagagagaaatttaaattaaagaggaagaatgggacattgaaagacaaaaaagggaaggcaagaagggtgatggggagacatgagagacacagaggaaggaagggtaagactgggctgaggctcagtgtcacgtgcatgtgagatatgcgaaggatgctccttgagatgggccaatcttggtttcaatctcagtttcggaggttgtatgaatttggtttctttcttgggcaggccagcagttggtttgggactttccctgggtgggagagctgatgactggagtcttgtgccccagactcagggaaatacagtctttatagtggtctttgtggagaaactagtgaaatctctgaagcctccaaatgagactgaaatgacattagcttcaaacttgaacttagcctcaaaacctgaattgggatttaataccaacatcaaccctaacccaaatttaacctcaacccaaatcacaactcaaactcaaccccaactgtaaccctaacctcaaatctaaacacatcccaattaataaccccctaaataaaacttctcctctaccccaacccaaccctgtttctagggctaatcttgaaaccagtttaccaccactcctaacactaaacttaaatctgactctaaatgtaagtccaatctgagccacaagcctaaagttgaactttatcctgctttatgaattattcatccattcctccatttagtgagtatctgcgtgcctaacacatgctgggcattgtcctaaggcaggagggacatggaggcaaagggatcagagaaggtaccagcacctgtggagcttgtattccagtgaggccagacggaaaagaaagaaactgaagaagaaattggtactatgagaaaataagacaggctgatgttgtaagagtggcagggagctacttttaaatacagtagtcagcaaaatcctctttgagtgtttgggtggcactggagctgagacccaaatgacaaaaaatagtgaccaggtaaaagtttgggagcaaagcatttcaggtaaagggagcagctactgcaaaggctggaaggcggaaccaagctgggggtgttgacgacaaacagaaggccagtgtggctggagcagagagagagactgggaggcgggtgggagatgaggtcagagaggagggcaggggccaggtcatgcagggccatgcaagaagggtaaagcctctagatttcatccagccacaggaagcctttaaaggtcgtcagagtgtgtggtgcgtgcgtgtgtgtgtgtgtgtgtgtgtgtgttgcaggggagagagggggagggagagagagagagagagagagaagagggaggtgagcagaggtgattggatttttttttcttttgacatggtgtcttgctctgtggcctaggctggagtgcagtggcaccatcatagcccactgcaacctcaaaaccatgggctcaagtcatccttccacctcagcttcccaagtatctaggactacaggtgtgtgccactgtgcctggctaattttaaaaaatattttaaaatttttgttgagacagggtctatgctgctcaggctggtctcgaactcctggtttcaagtgatctgcccatcttggcctcccaaagtttttttttgttagtttgagaggcggtttcgctcgttgcccaggctggagtgcaatgactgatctcatctcactgcaacctctgcctcctgggttcaagcgattctcctgcttcagcctcccaagtagctgggattacaggtgcatgccaccattcccggctaattttttgtatttagtagagatggggtttcaccatgttagtcaggctgatctcaaactcctgacctcaggtgatccgcctgcctcagcctcccaaagttttgggattacaggtgtgagccaccatgctgggccagcctcccaaagttttgggattacaggcatgagtcaccacactggccctggattttttttctttcttttttttggagacggagtctcactctgttgcccaggctggagtgcaatggcgtaatctcagctcactgcaacctctgctgcccgggttcaaacgattctcctgtcttagcctcctgagtagctgggattataggtgcatgccaccatgcctggctaatttttgtacttttagtagagaaagtacaccatcttggccaggctggtctcgaactcctgacctcaggtgatccacttgcgtcggcctcccaaagtgctgggattacaggcgtgagacaccgcacccagcctttttttttttttttcttttaagacagaatcgctctgtcacccaggctggagtgcagtggcacaatctcggctcactgcaacctctgcctcccaggtttaagcaatccacctatgtcagtctcccaagtagctgggattataggtgcatgtcaccatgcctggctaatttttgtacttttagtatagaaagtacaccatgttggccaggctggtcttgaactcctgacctcaagtgatccgcctgcctcagcctcccgaagtgctggaattacagacatgtgccactgcacccggcctggttttttttttctaagagatggagtctcacttttctgcccaggttggagtgcaatggcaccatcatagctcactgcagccttcaactcttggcctcaggcaatccttgcaccttagcctcgcagtgttgggattacaggcatgagccactgagccttgcctggacttttttttttttttgagatggcgtctcgctctgttgcccaggttggagtgctacggcatgatcttggctcactgcaacttccacctcccaggttcaagcgattctcttgcctcggccccccgagtagctgggattacaggcatgcgccaccgtgcctggctaattttggtatttttagtagagatagggtttcatcatgttgggcaggctggtcttgaactcctgacctcgtgatccacccacctcggcctcccaaagtgctgggattataggcatagccaacgcgcccagcctggacttgtttttaaaagatcactgtggctcctgtgtttaggctggctggtaggagacaggtggcagtggcattgatggtgaagagaaaatagtggcagccatggagatggagagaagtagacaagtttgggatatattatacattccaggggtagaaacaacaggactagatgatggattgatgggtgggagatgtagatactgggagagaagcaggattctgatggatggaaaaactaaaaaattctattttgggtgtggtaagtctaagtctattagacatgcaagtagagatgtcactgggcagatacacatctggatttcaggggcaaggtccaagctagagaaagaaacctgggcatggtcagcatgaggatggtgtttaaagccatggaacttatcttgtgcatccctataagacccctttgaggcacttgtttcccctcacaatggatgcagtgcatcttccattctgaattccagaggcaacaacctcctgctcctagaagctaaactctccagacttagtcttctgaattc

SEQ ID NO: 23089 - DNA, 1369 bp, Homo Sapiens
caagattcggcacgagggtaccaaacaagaacccaatggaaatagtaaagttaacaaagcacaggaagatgatttgaagtgggtagaagagaatgttccttcttctgtgacagatgtagcacttccagcccttctggattcagatgaggaacgaatgatcacacactttgaaaggtccaaaatggagtaaggaatgggaagatttgcagttaaagatggctaccatcagggaagagatcagcatctgtgtcagtcttctgtacggctccatgggattaaaggaagcaatgacatcctgatctgttccttgatctttgggcattggagttggcgagaggtgtcagaacaaagagaacatcttactgaaaacaagttcataagatgagaaaaatctacgagcttcttatttacaacactgctgccccctttcctcccagactctgacatggatgttcatgcaacttaagtgtgttgttcctgaactttctgtaatgtttcattttttaaatctgacaaactaaaaagtttaacgtcttctaaaagattgtcatcaacaccataatatgtaatctccaggagcaactgcctgtaatttttatttatttagggagttacataggtgatgggggaaattgttaactacctttcattttcctgggaagtcaaggttacatcttgcagaggttgttttgagaaaaaagggcccttctgagttaaggagccatagttctatcaatgatcaaaagaaaaaaaaaaaaaagagaaactgttacagtatgattcagatcatttaaaaaagcaaaatcaagtgcaattttgtttacaaatggtgtatattaaagatttttctatttcagatgtactttaaagagaaatattagcttaactcttttgacatctgctattgtgacacatcccattgctggcaatgtggtgcacactccgaaacttttaactactgttttgtaagcctccaagggtggcattgcagggtccttaggcaatgttttgtttgcctttatgcagagaggtgctccaagtgctgtgattgagcaccgtgctagaggaactgtaatgcttcagaagttgtagcttatacaaaggaaacaggtcctgctggcttaatttaaacagttattgcatgaagtagcgtggaggccctggactgctgctcgttctttaggatggactgttctggtatctggtattggtttagagactgttaataagggacatcacaaggtgatgggattcatttgaagcactctatttctgttttaatggttttatccaattttgccttcccaagatttttgttctacataaaaagttcatgccactttttaatataaaaaaatttaacaaaatt

SEQ ID NO: 23090 - DNA, 2171 bp, Homo Sapiens
atcctacctactcagaatcatcttcttaggttgtctcctaaatctgaacaatacagttgttttataaaattacattttgtctcttgagatttaatcaattagaactctttagggagaaaataaataatagaagaaaatatatgcctcatatttcatatgtaattatctgttgatataatttttcaatgtattttgtatttgtgggagcataatgacctgtacattcaatatttttactggtaattcaatttttaaatatgtttttacaatgcttgaacacataaaccttagaaaactggaaaatacgtgtccacagaaagagttattagctactaccttatgtaaagatgcatagaaaatgaaattgttggaaacatgtgcacaaagtgttttatattatatacattgtatttatgaagaataaataaaatattaagattgttttcctgctagccaagagaagaaatccttgggaaatatctaaggagtatatggggctttataagcactgtttctaaaagatattctctggtacttttgcaaaaagtcgactgtgactgtgtagcattatgttctgtagaatttttttcaagtagcataatttatttcattggtgtgaaaacagccaaaggttccaatatcctcacaaatcatttatgccaaacatctgagggcaaaatttagccggtgttatttactagattcttccctttgaactcacagactcaagagacagaccaagagttcttatatactcaccacagcggaccaatccaagtggcatttttaggaaaggttgcagcatttaatgccatgtggtatgtctgttcgtcaagtgggtggcaagggaatatccaagctggcattttggatatgatgggccttttactttcctgagtgacatgccacatgtcaagaaatactgctccccacccccccactcccatcacatttacgtgaacaattttcatttagttatttcccgttccatatggtgttaaaacagtcgtattaaataaagattatttctagttttcagtggtaatttaaatgagaggatatgtaataattgcttattagatacttatccaaatgaaatataacagagtttacagtacttaaaatggctggttatggtcttggaaatgtttgaaaattcattatcctgaaaaaaactttaccattctgttttacccttgaggtattttttggggaaaaatgtttttgataactattaatctaaatatagtataattataggcaaatttcactgcctagttttattgatatcctgagtctacagctagtccattcgtatgactgattgatttatgatagctccagagaaccataaatttcaaaggctaaactctctgattttagtaaatagtaggtaaagtgacacaatatatgtttacacaacactgttttcatgaaatgcaaactttgcaaaactcacattaactgggaagcagccaaccctctgtagagaaatcccagattgggagtctggtttgaatctttgaagacagaaaggtgatatccggcctgctgttttaaagggaccacacttttgaatacctactggtgtttggcagaaatctgagactggcaccagacacaaattttagacatgggtatcttccctccagtaattcactgctcagagtaatttagaagacaaaaacagaaaaaattgtaatgattttttaagtgttagaatatgtttgttaacatactctgcaaaataaatttcaactaatgcaatagacttaaaatatagcctatggaatactgtgattgaagtttgaaggcttgctggttcttattttgcatgcaagtttagacagggtaaagaatgtataaatttatttgagatgagatacagtattgtaaaaatataacctcatctagaattgcttttaaaacaagcaaaagcctattttagtacaaatgtagggtgggtagttgttttaaggtagcaaaatacttcaagattttctatctttttaatttttcatgaagacagaagaaatactttcaccccaaccaatgactgtaagatcttgagagtatgttcttactcatttctgtaattgcagtagtgtagtcatctgcatataaatttaataaatgcatgttaaaatttaaaaaaaaaaaaaaaaaaaaaa

SEQ ID NO: 23091 - DNA, 1970 bp, Homo Sapiens
ccgctttttttttttttttttttttaatttttgagataggatcttgctctgtcacccaggctggagtgcagtggtatgatcacagctcaccatatccttgacctccaggactcacgtgttgctcccaccttctcagcctcccaagtagctggggactcaggcgtgtgccaccacacttggcttttcttttgtttttttttcagagatgtggtttctgcaaaaccccatctcaaactggtttcaaactgccaggctcaagcaacccacccgcctcagcttctcaaagtgctgggattacaggcatgagccatcgcacccaggcaaaccctattttttatgatatgcaaaaaagtcctgtttcttactttcatatggagatggcagtttcttttccctttagatatctaacaagtaaacttcctgaaggatatttggctacagaagctcagaaagctatgagctgaatgtctggatactacttgtttcacttcatggttcaattaagaagaatagtcacaacttagaccagttatttttaatctaggaaggatgaactcttaaggaggccactaatgggcatgtaacaaagtaattcatataagaaaagtttaagtataacattctggttagggccatagctttcatcaaatactccagtctataaggctgacagttacaaaaaaacactgacttcagtcaaggaatctgatgcctaagtatacatgcaagaaaaagtactgtacatacgcacaaggataagcaggtaagaatgttcctttcggccgagcatggtggctcacgcctgtaatctcagcactttgggaggccgaggtgggcggatcacgaggtcaagagatcgagaccatcctggccaacatggtgaaatcccgtctctactaagaatacaaaaattagctgggcgtggtggcatgtgcctgtagtcccagctactcgggaggctgaggcagagaatcgcttgaacccaggaggcagaggctgcagtgagctgactgagataacgccactgcactccagcctggcacagagcgagactccgtctaaaaaaaaaaagaatgttcctttctactttctttattaatagcccaaaatgagaagcaattgaaaggcccattaccaggagaataaacagtgttacatagttcacaatggagaactacttaggaacgaagaatgaagacattataagatcatgttaacaatatagaaaaaattttaaaatttttaactaaaagaagttacaaaaatatatagagtatggtataatttatagaaagtttaagaaaatgcaaaatcatgctgtatttgtgtacaccttcaaacagtatttagtaaacatacgaaaataagcatgggaaagacaaacaccaagcggggtatgatggtgacctgagagggatgaccaggaaagtcattaggaaagcgtacatgggtctccagctgtgcccccaacacctggcttcttcaacttcagtgggcacacagggattcactgggccatcatttggccctttctggtcctcaaactcttaatctgttttcataccccagcccctaaccccacgcatgtctattttatagtgcctcactctcagatttttacagcagccccttccacttctgtgtctgctctcatattctcacttttcaacatttgaaagatcagaaaacttcctgttaaaaaatcccaattttctaccttttctaaaaagagatcagaagatctgggctagattaacaaaaagaaaatgggctatttcttgcctggtcctcataaaccactctaccccaccaaccctagacatgcatattcagtttattcagctgcctgttcaaaaatctccatttagctgtctcctaggaggcatctcatatgttaatccttattcataccacaaagatgttccttccttaggttccttttccttagtaaataaaaaaaaaaaaaaaaa

SEQ ID NO: 23092 - DNA, 3185 bp, Homo Sapiens
gcaacaggtgaaattagcttaattatatatattttattgaacccaatgtagtcaaaatattatcacttcggcatatgccacatttaaaagttgagaaattttacattcttttcttcgtaagtctgcaaatctaattcagatgcaaaattttcctcaaaaatacttaactgtatttagattacataaaatcaaagatacaaaagtagattaatataatcaagtcgttccaagtatgcttaatattctatcaataactgaatttaagtcaattacaataaaaactttagttcctcatctcactagtcccattccaaggactcaacagccaaatgccactactactaggatggttcagcttcaggcagaactgtggccgcttacttcagcacaactcaattcaatgagcacaaactaaataaaaatcattttctttcccctttgtctcctaagatagctattttctaggccccttaactaaaagagtaactgtcattttctctactgcctttatcgctacatggtaagatattatttgtcactctattacacaaatgctatcatggcaaaggatgggtccactgtgttcacacttcaaactgcaagaaactacagtctacatagcaaactgtaggaagtcagtatgtaactaagagggtttcaagcactgctaaattatttaacatgtgtatctatgctgtgtttatgacctacagaaaagaaatagaaactggctgtgataggttagtcttctatatcattcaagtaattccaaaataattcaaactatgagatctatattttcagccaacctagggaatatttcatccattcatatgtcaaaaagttcatgacatgaacccctagactttagttgactttaaggcctgtagcacaaacagcagaacataagttaagtacattctattgcaaagcagaatctaagaatgtaaacacacttttctacattgtacttcccagccctaaaacttggagcatgttattttccacaaactgcccatcttccactaattttttaaaaaaatttaatggcttcagataaagggcaatgtagcacaatacacagccaagaaacaaaagaagtagtcttatttttcccaattaatcatcatgcataaatctacatattagcaacagatcaaatataaagttctatggctgcccagtaaggtaatgctagagccgttaaatatgcatgctggtgggggagggaaccacattccaatcagaagacttcagtaatgtataagatgacacaaagtaaaaactcaaggcaggtccctttttaaatttttatctatttataatgaattcacaatttatgcctataaatttcagatgatttaaaattttaaacctgttacattgaaaaacattgaagttcgtcttgaagaaagcattaaggtatgcatggaggtgatttatttttaaacataacacctaacctaacatgggtaagagagtatggaactagatatgagctgtataagaagcataattgtgaacaagtagattgattgccttcatatacaagtatgttttagtattccttatttccttattatcagatgtattttttcttttaagtttcaatgttgttataattctcaaccagaaatttaatactttctaaaatattttttaaatttagcttgtgcttttgaattacaggagaagggaatcataatttaataaaacgcttactagaaagaccattacagatcccaaacacttgggtttggtgaccctgtctttcttatatgaccctacaataaacatttgaaggcagcataggatggcagacagtaggaacattgtttcacttggcggcatgtttttgaaacctgctttatagtaactgggtgattgccattgtggtagagcttccactgctgtttataatctgagagagttaatctcagaggatgcttttttccttttaatctgctatgaatcagtacccagatgtttaattactgtacttattaaatcatgagggcaaaagagtgtagaatggaaaaaagtctcttgtatctagatactttaaatatgggaggccctttaacttaattgcctttagtcaaccactggatttgaatttgcatcaagtattttaaataatattgaatttaaaaaaatgtattgcagtagtgtgtcagtaccttattgttaaagtgagtcagataaatcttcaattcctggctatttgggcaattgaatcatcatggactgtataatgcaatcagattattttgtttctagacatccttgaattacaccaaagaacatgaaatttagttgtggttaaattatttatttatttcatgcattcattttatttcccttaaggtctggatgagacttctttggggagcctctaaaaaaatttttcactgggggccacgtgggtcattagaagccagagctctcctccaggctccttcccagtgcctagaggtgctataggaaacatagatccagccaggggcttccctaaagcagtgcagcaccggcccagggcatcactagacaggccctaattaagttttttttaaaaagcctgtgtatttattttagaatcatgtttttctgtatattaacttgggggatatcgttaatatttaggatataagatttgaggtcagccatcttcaaaaaagaaaaaaaaattgactcaagaaagtacaagtaaactatacacctttttttcataagttttaggaactgtagtaatgtggcttagaaagtataatggcctaaatgttttcaaaatgtaagttcctgtggagaagaattgtttatattgcaaacggggggactgaggggaacctgtaggtttaaaacagtatgtttgtcagccaactgatttaaaaggcctttaactgttttggttgttgttttttttttaagccactctccccttcctatgaggaagaattgagaggggcacctatttctgtaaaatccccaaattggtgttgatgattttgagcttgaatgttttcatacctgattaaaacttggtttattctaatttctgtatcatatcatctgaggtttacgtggtaactagtcttataacatgtatgtatcttttttttgttgttcatctaaagctttttaatccaaataaatacagagtttgcaaagtgaaaaaaaaaaaaaaa

SEQ ID NO: 23093 - DNA, 1287 bp, Homo Sapiens
gccgctttttttttttttttttttcccatgttcacctcctatggtatttttaaatcaggggttaaactatcaaaaaaattgtgaagattaaaaggatgttaagaatatacatgcagcttccccaggggaaacaggcatagacatcattaaagtcaggaaccaaccaaataaaagggaatctacaatactagtcatgaatatttgagttacaagaactgattttgagaaaaatactattttgaaataaaatttatcaaagttttttaaataaaaaaatacatagattattttcaccctcataaatacactgagggtaaacagctacatttgagttccccttccaatcagtgtcatttgtcagctattaaaaaaaaatttcaaaagaacaggaatattttatgatcgactaaatgacttacttctactaaagaaaaaagcatttaaaaaaattaatgtgcatgtagaattttacatgcaaggaaactagttctgaatacacttagaagagtcattacctttgtcaagtactccttcatgacctggatgaaatagggcatggcaaaatccatgatattgtgcctccatgcagtttctaggacgacatctggccttaaaagatcgtaacaggtaaacagacaagctccaaagcactctcttttttcttcctgcaaaaaccactgcaggagttcttcagccaattcagtatctttagattcagaagcatactgcattgcatcctattcaaagaaatagtgaaagtcaaaaacattagaccccacatactgaactagtaaaccaagaaaaacaatggaagctttccaatataaatctggttttgcaaggggaaaaaagcctcctagttgtatcatttaaattaaaattttcaaagaagagataagctaaaagctttttttttccccagacaagtttgaccttaacataagagagcccctagaatcaagaaatccattaacttaaattgccttaaagtcagctctcatattcacaaaaccaatacttttatttatagattataatcacttgtaacaccattttaggcctggtttaaaacagcccctgccccgcaactttatcaaccttgtaaaggctgtctttcttgcacagctctacactctgtttccagcgattgttgcctttgaagagataagcagcaattctcctgaactcaatgagttcatgtttttccaaacgctgagcaagcgagatattgtcaaagttgtcataagcatctattgatgttcgcagagccttaaaaaaaaaaaaaaa

SEQ ID NO: 23094 - DNA, 1476 bp, Homo Sapiens
ggaaacactaggttcttataacagggcctagtggccacatgcattccatcctgagtcttgcctctttgggacttgagctatagaccctgtcaagaaaaatcccactatctctcctataatactggaatcagagacttcttactttcagataaggaaaggattacaaaaaaagttctccttttttaaaatcagaggaaattgaggttaaatatctccaaactaactcaagttcttcatagaaatagctagcatttactgaaatagctggcattacttcatgtgtgaggcaccatgcaaggtactttaaatatattaagttcatataagaaagacactaagtagatcaatctaatttttcaaaagctaacaacataaaataataggaaaatcttcaaaatgcagaaaaaaactatttattcacaaattacacaaaaaaacaaacatccattactcaaaacaatataccaaatgttgagtactcacttctctagatacctatttacgttttgagaatgttctttattaaacaaaataaaataattaacatattttttggagcactctgaaactaacctctctaaccagagctaattttctgatgatataacttaaggaaagaatattcttttcaaggcaagtgctaatttctccaaccctgaaaagagatatgcattccaataaaacaaaagttttaaaaaccatcttcataaaaaatgtagatcattacttataagctccaacagtagtaagatctttaacataaagtgggctactttcatctctaacaaagataaaattaatacaccaatagtatcttcctgagtgtcagaagtaacagaacccaacagttctatattattgtactacaatatatagtataaaaataatagttcagattagcaatgacagtattggtttgtgaatatgactgtggactttcaataaaattttttttaatatagccttttcatactcatgagattgtactataaatcacattccaatttctatgtattttgtgcttaagttatttattcattggcactctaataacagccctacttttttatttttagaaagatataattagctatttaaaattgtaattatttttcatttcactgagtagtttcaaaaaaagttatctagaaaagtaattcccagtcatcaaatggaaagacacaagcaagaagtaagttgtttccagggtttttaaagctttgtaaaataaagaaaagaaagtattggttttgactgggataatatagcagtacaattgtcattaacctatctgtaaaagccattcatttaaaaatgcatattttaaaaatgactcatttgtggtaaggattacttactgtaacaattaaaaaataaaaccatcattctcatatttatcaatactttacacttttaccaaatactgaaggagacaactatcattgttacaacttcaaagtcaaaaaaaaaaaaaaa

SEQ ID NO: 23095 - DNA, 1741 bp, Homo Sapiens
ggcaagcacacatttaaaaaaatgaaacagaaaagaatacaagatataagattgcatggcacagggtaaatgtaaagatttttcttgaatcaaccttttgttttaattattcatacatatataaagtatacataagttgcaatacaaagtgtatttttactgggggccacagtcaaaaagtttgacagccactgttttatcctcactaatgctgttttacagtcactggtgctgtgaatggatgagttaggaagctgacatggcagtccagataagacatgggtcatgaactagagcatttactacatgtggagcgaagaggaacagcctccaaaaacatggaaaaagcaaaagaactggcagaaactgtaactgactagatgttagggaaagaagaaaatgtatacaatgacttccagatttccatcctcaagtgttttatgacttgacaagcacactgtcagatacactaaatgaacagagatcctctccactttgttctactccacttcttccacacaaaccctgtttactttatgcccttttccctggtaagtggagttcagccaaaccagcgctcagaaccaccactgaggaagtgaagagatcaagctcagacaagctgctttcgttcctgtcatttcaccaacatctccatacatttttccagtttggttttcctatctacttccttcctatatgggacttaacacaagattcttaactttcatgtatgcagtttatactagaaaacacacaaagagaactacactgaagtcaacattaaggataaatgctaaatactacccaatctttccccatcttacaactacttacctacataaccctccctctaccctttactctcaaattattatattctttatccaaaaacatttagtgctttcttcaacaacccacctcgtgcttctgcttattgaaatcctttatagccctagatcacataggtcacattttacccatgaaacctttctaaattaccttttacacatgtaacactgcaggatcgttggctatctcttggtacctaccccaaagccttgaggagctgggctgggtgggcacagtggggtaacttttagattgtggacttagcctcaaggttaccagacaggagctggctgttaggcagaattgaggtgcctgaattgggcaaacctctcttcaactgttgggttttgccagggacgaaacccttgctctcctgccatgtccacgggtgtttggactgagggtgttggctattctggacgaagactcctagttatgtgccatggtttccaccctctgctccacccccagccttttctgtaccaggctgggacccccagtcctggagccccccaccttcttgtctcatggctggcactggaggctgctgttggccacctgctccatccagcgcctcccctccctccatgttccctctctgcacccttgttcacctgttgccccgcttccattctccccattcctctctgccgttgtttacctggagactcaggagagattagtgcacctgttcaagttatcacctttaagtggaaattagctttcatttagaaatgtgtggcccagggcaggggcagtggctcactcctgtcatcccagccccttgggatgccaaggtgagaggattgcttgagcccaggagtttgagaccagcctgggcaacagaccgaggccccgtctctacaaaaaatacaaaaaaaaaaaaaaa

SEQ ID NO: 23096 - DNA, 1769 bp, Homo Sapiens
ggataaatgactgaaagtttcttttttatattgctgagtcagattggatccggttcattaagggccaaaatttgtatttggcagtaatcctcatgtgttctcagaatgcttgattggtcattatcagttgcttaatgcttaccaaacacttccagtgttttgagtcactgaattggctcatggtaattgttaatcttgtggttactgagtcaagagccagcagtgtgtgttttggctgcttcacttcctcctcaacacttgatattgtcagattttaaattaattttttttttctaatctggtgggtttgaaattgtatctatagtgttttttatcagcatttcctgaagctgggcatcttttcatgtattttcgttggtcatttgtgcttctgcgaagtgtatattcaatttcgttgcctatttttttggtcttttctctttttctgatttatttttaagagttctttatatattctggatactaattatttgttaatttataggttgcaaatatcctttcccaatttgtgacttgtcttttcatctcttcatagtcttctggtgagaaaagctcctaattgtaatgaactgaatttttcagtctttcatggtttgtgttttgtgtttttttttattttttattttttattttttgagatggagtttcgctcttgttgcccatgcgggagtgcaatggcgtgatcttggctcactgcagcctccgcctcctgggttcaagcaattctcctgtctcagcctcccgagtagctgggattacaggtgcctgccaccacgcccagctaatttctgtatttttagtagagacagggtttcatcatattggtcaggctggtcttgaactcctgacctcaggtgatccacccgcctgggcttcccaaagtgctgggattacaggcgtgagccactgcgcccggctggtttgtgcttgttgtatcaaatttgggaaatccttctttgctgccaggcatgttgttttaataaatacagtagtatacctatctataatgtggtatatctcatctgacatttatttccaatatttgcttgattacaaaggcagacttcttagaagttgctttcttattatctttggagttatagggccacagggttttaaaaggaggttggattgtgccttacatgtgggtttcatacattgtccaaactgagacaccaacagatttgtgaatgagatgtgcatcttattaaatgttaatgtgatttgacaatgagacctttctttgtgtggacagtattatatacaattgatagtgtgtcattcagtctaagctgttagcactttcactaaaatatattcaaattttttttgatgtctagtttttacagtgttgggctttatcaagaatagttgtggattgtggaagagctgatatggaaacagaggaatgtattttgcttttttttttaaactctgtccggttccttggacttgtgtgtctcctatcttatcaagaataattgtagattgtggaagagttgatatggaaacatcttagaagaatgttttttgctttttttaaaaaaaaaaaacaaaactgtccagttccttggacttgtgtgtctcctatctaccattaaacccttatgacttaaggtatatgtataaatacatatatacatcttggtggcattgatttttctatgttgtgtattaaagctgctaaaaaacattttttctttttttcaatgagaagactagtgattactttgaaaaaaaaaaaaaaa

SEQ ID NO: 23097 - DNA, 2296 bp, Homo Sapiens
ctgagaggtccactgtaagcctgatgggatttcctttgcaggtaacctgcgttttctttctggctgcctttaacattctttctttcatttttaccttggaaaatctgacaattatgtgtcttggggatgatcttcctgtgtagaatcttgcaggagttgtctgtatttcctgtatttgactgttgtcctctctagcaaggttgtggaagttttcatggacaatatattgaaatacgttttccaaactgtttgctttctcccccttcctttcagggatgacagtgatttgtagatttggcttctttacataatcccctacttcttggaggttttgttcattcctttttattcttttttctttatttttgtctgactgtcttatttcagaaagccagttttcgagttctgagattctttcctcagcttggtttattctactattaatacttgtgattgcattgtgaaattcttgtactgtgttattcagctatgtcggacccattaggttctttattatactggctattttgtctttcagctcctgtatcactttattgtgatttgtagtttctttggattgggttttgctgtcctcctgaatctcaatgatcttcattcctatacatatcctaaattctatttctgtcatttcagccagctcagcctggataaacactcttgttagagaatttgtatggtcatttggagcacatatgacactctggccgttttaatttttggagttcttgcgttagttctttctcatctccatgtgtgggtgttcctttaactgccatatagattgagtacagtcaatagatttctggctgttttcactaggctgaggccttgtgcagggtctttttttgaagctgacttcttgtctctagtttcagaggtgagtatgttagtgaggtattcttggtgttgaagctttggggtgtgatccagtaggtggcacttaggcttattggtcaactggtagactcttgctcagttgtgtggctcctctgtgttttctcatagttacagctgtgttcactctcaatgctctgaaagtgtgggttcctctcccccttcagtgccagctgtatggctatagattgtggtttgacactcctggctgcccactgcagctctggggcaatgtcagtgtttacgttccttcctcaacttggcggcaacagaggaaaggaccttagtagtggttgtggtcaagggtcttttgcttgtatcctgggagctccacaccagagagatgtaggtcagcaattcctcagtgcaatcaccccaggatgaagggtctgtgctgtgggctcaagccaggggttctctctggtgatgagtgggggttgggggtgtgggaaccatgggagacagactggcctcctcttcttgggttgattgcagcttgttggaggtataaataaggtacttagggtcttttcttcttcattagtctgagggtagcaagggcagttctactgcagagacagtggcagagaggctttcaggaacagtatttattaaccaattgtttcaacaaatatttattgacaattcaacatgtaccagacactgtgttaggcaaggggtcttcaatgggccacaaatagatgtggtccttgaccatgtcattggagcttaatgggagagactgatagtaagcaagtaaacaacaacaaaaaaataaggtaattcaggttgtgacaacctctctgaaggaaatatataggatgctataaaagtgactagagcaaggaacggcctaattgagctaagataatcaggtagggtctctgtaaggagttgacattaagctaacaactaaagaataagaagccagccatgtaaatagcttggataagagctttccaggctgaagggaatggaaatacacaggcctagaggtaagaaggagatgggtgtcttccggaaactgataaaaagtcagagtggctcagatatgctgatatgtcccctggtattttttaaaatttttggccgggtacagtggctcatgcctgtaatcccagcactttgggaggccgaggtgggcggatcacgaggtcaggagtcaagaccagcctgactaacataatgaaaccccatctctactaaaaatacaaaaattagctgggtgtggtggcacgtgcctgtaatctcagctactcagaaggctgaggcaggagaatctcttgaacttgggaggcggaggttacagtgagttgcgatcgcgccactgcactccagcctgggtgacagagcaagactccatctcaaaaaaaaaaaaaaa

SEQ ID NO: 23098 - DNA, 4565 bp, Homo Sapiens
atgctgaagcggaggcggccgctgctcgaggatcaaacagagcatactgaatcagcaggactggctggtggtgcagcagacatcatgagtaagcaccgagaagtctgttccttatcacgtgtgtaaggggaaaaaggtttaaacaagtctcttaagtggtgtttcctcaccgatggagaattacttccaagcagaagcttacaacctggacaaggtgttagatgaatttgaacaaaacgaagatgaaacagtttcttctactttattggatacaaagtggaataagattctagatcccccttctcaccggctgtcatttaaccctactttggccagtgtgaatgaatctgcagtttctaatgagtcacaaccacaactgaaagtcttctccctggctcattcagctcccctgaccacagaggaagaggatcactgtgctaatggacaggactgtaatctaaatccagagattgccacaatgtggattgatgaaaatgctgttgcagaagaccagttaattaagagaaactatagttgggatgatcaatgcagtgctgttgaagtgggagagaagaaatgtggaaacctggcttgtctgccagatgagaagaatgttcttgttgtagccgtcatgcataactgtgataaaaggacattacaaaacgatttacaggattgtaataattataatagtcaatcccttatggatgcttttagctgttcactggataatgaaaacagacaaactgatcaatttagttttagtataaatgagtccactgaaaaagatatgaattcagagaaacaaatggatccattgaatagaccgaaaacagaggggagatctgttaaccatctgtgtcctacttcatctgatagtctagccagtgtctgttccccttcacaattaaaggatgacggaagtataggtagagacccctccatgtctgcgattacaagtttaacggttgattcagtaatctcatcccagggaacagatggatgtcctgctgttaaaaagcaagagaactatataccagatgaggacctcactggcaaaatcagctctcctaggacagatctagggagtccaaattccttttcccacatgagtgaggggattttgatgaaaaaagagccagcagaggagagcaccactgaagaatccctccggtctggtttacctttgcttctcaaaccagacatgcctaatgggtctggaaggaataatgactgtgaacggtgttcagattgccttgtgcctaatgaagttagggctgatgaaaatgaaggttatgaacatgaagaaactcttggcactacagaattccttaatatgacagagcatttctctgaatctcaggacatgactaattggaagttgactaaactaaatgagatgaatgatagccaagtaaacgaagaaaaggaaaagtttctacagattagtcagcctgaggacactaatggtgatagtggaggacagtgtgttggattggcagatgcaggtctagatttaaaaggaacttgcattagtgaaagtgaagaatgtgatttctccactgttatagacacaccagcagcaaattatctatctaatggttgtgattcctatggaatgcaagacccaggtgtttcttttgttccaaagactttaccctccaaagaagattcagtaacagaagaaaaagaaatagaggaaagcaagtcagaatgctactcaaatatttatgaacagagaggaaatgaggccacagaagggagtggactacttttaaacagcactggtgacctaatgaagaaaaattatttacataatttctgtagtcaagttccatcagtgcttgggcaatcttcccccaaggtagtagcaagcctgccatctatcagtgttccttttggtggtgcaagacccaagcaaccttctaatcttaaacttcaaattccaaagccattatcagaccatttacaaaatgactttcctgcaaacagtggaaataatactaaaaataaaaatgatattcttgggaaagcaaaattaggggaaaactcagcaaccaatgtatgcagtccatctttgggaaacatctctaatgtcgatacaaatggggaacatttagaaagttatgaggctgagatctccactagaccatgccttgcattagctccagatagcccagataatgatctcagagctggtcagtttggaatttctgccagaaagccattcaccactctgggtgaggtggctccagtatgggtaccggattctcaggctccaaattgcatgaaatgtgaagccaggtttacattcaccaaaaggaggcatcactgcagagcatgtgggaaggttttctgtgcttcctgctgtagcctgaaatgtaaactgttatacatggacagaaaggaagctagagtgtgtgtaatctgccattcagtgctaatgaatgtggctcagcccagagagcagaggcgagtttggtttgctgatgggatcttgcccaatggagaagttgctgatgcagccaaattaacaatgaatggaacttcctctgcaggaaccctggctgtgtcacacgacccagtcaagccagtaactaccagtcctctaccagcagagacggatatttgtctattctctgggagtataactcaggttggaagtcctgttggaagtgcaatgaatcttattcctgaagatggccttcctcccattctcatctccactggtgtaaaaggagactatgctgtggaagagaaaccatcacagatttcagtaatgcagcagttggaggatggtggccctgacccacttgtatttgttttaaatgcaaatttgttgtcaatggttaaaattgtaaattatgtgaacaggaagtgctggtgtttcacaaccaagggaatgcatgcagtgggtcagtctgagatagtcattcttctacagtgtttaccggatgaaaagtgtttgccaaaggatatctttaatcactttgtgcagctttatcgggatgctctggcagggaatgtggtgagcaacttgggacattccttcttcagtcaaagtttccttggcagtaaagaacatggtggattcttatatgtgacatctacctaccagtcactgcaagacctagtactcccaaccccaccttacttgtttgggattcttatccagaaatgggaaactccttgggctaaagtatttcctatccgtctgatgttgagacttggagctgaatatcgactttatccatgcccactattcagtgtcagatttcggaagccattgtttggagagacggggcataccatcatgaatcttcttgcagacttcagaaattaccagtataccttgccagtagttcaaggtttggtggttgatatggaagttcggaaaactagcatcaaaattcccagcaacagatacaatgagatgatgaaagccatgaacaagtccaatgagcatgtcctggcaggaggtgcctgcttcaatgaaaaggcagactctcatcttgtgtgtgtacagaatgatgatggaaactatcagacccaggctatcagtattcacaatcagcccagaaaagtgactggtgccagtttctttgtgttcagtggcgctctgaaatcctcttctggataccttgccaagtccagtattgtggaagatggtgttatggtccagattactgcagagaacatggattccttgaggcaggcactgagagatgaaggacttcaccatcacctgtgggaaggcggacgcggaggaaccccaggagcacatccacatccagtgggtggatgatgacaagaacgttagcaagggtgtcgtaagtcctatagatgggaagtccatggagactataacaaatgtgaagatattccatggatcagaatataaagcaaatggaaaagtaatcagatggacagaggtgtttttcctagaaaacgatgaccagcacaattgcctcagtgatcctgcagatcacagtagattgactgagcatgttgccaaagctttttgccttgctctctgtcctcacctgaaacttctgaaggaagatggaatgaccaaactgggactacgtgtgacacttgactcagatcaggttggctatcaagcagggagcaatggccagccccttccctcgcagtacatgaatgatctggacagcgccttggtgccggtgatccatggaggggcctgccagcttagtgagggccccgttgtcatggaactcatcttttatattctggaaaacatagtataaacagagaagacttcatttttttctgttcagacttgttgcaacagcagtcatacccaaatcatttgcactttaaaactggaagattaagcttttgttaacactattaatggggtggggaatagggtgggagtgggggtttgggagacgggtgggaaagggtggttggggggaccgatgttccataattctaagtcttctatgcattgtccaccaagaagatctgggcagcttctgttcctgcacaacagttatgctatccttgcagctaatccccttctgttactgtttagacaa

SEQ ID NO: 23099 - DNA, 4235 bp, Homo Sapiens
gggggcagacggccgaagagccaggtgtgccagggacctatggcagcagggctgaacgtgcccgctccagcctctccagtgctgggagagacctctagatggtgcaggtgagtttgcaatgagggaaagcccctcggcaaggactgagtttccaaacttgcagacagggcagggagcggtcaaggaagagttcccgggaagccctttaaacggaaaggaagcggggctagtgtcagagaggtgtgccaggtcccaggcagccctgctgacccctaaggacatagagtacctgcttctgagagggctgccacggtggccacctgtgaagcctgtcacccagaactggatggtacctgactttcttcatagacccatcttctgctgggactgaagctgacctccaacagaagccaggtgagcccttgggagaggatggcccatgtgggggactgcacgcagacgccctggctccccgtcctggtggtgtctctgatgtgctcagcccgagcggaatactcaaactgcggtgagaacgagtactacaaccagactacggggctgtgccaggagtgccccccgtgtgggccgggagaggagccctacctgtcctgtggctacggcaccaaagacgaggactacggctgcgtcccctgcccggcggagaagttttccaaaggaggctaccagatatgcaggcgtcacaaagactgtgagggcttcttccgggccaccgtgctgacaccaggggacatggagaatgacgctgagtgtggcccttgcctccctggctactacatgctggagaacagaccgaggaacatctatggcatggtctgctactcctgcctcctggcaccccccaacaccaaggaatgtgtgggagccacttcaggagcttctgccaacttccctggcacctcgggcagcagcaccctgtctcccttccagcacgcccacaaagaactctcaggccaaggacacctggccactgccctgatcattgcaatgtccaccatcttcatcatggccatcgccatcgtcctcatcatcatgttctacatcctgaagacaaagccctctgccccagcctgttgcaccagccacccggggaagagcgtggaggcccaagtgagcaaggacgaggagaagaaagaggccccagacaacgtggtgatgttctccgagaaggatgaatttgagaagctgacagcaactccagcaaagcccaccaagagcgagaacgatgcctcatccgagaatgagcagctgctgagccggagcgtcgacagtgatgaggagcccgcccctgacaagcagggctccccggagctgtgcctgctgtcgctggttcacctggccagggagaagtctgccaccagcaacaagtcagccgggattcaaagccggaggaaaaagatcctcgatgtgtatgccaacgtgtgtggagtcgtggaaggtcttagccccacggagctgccatttgattgcctcgagaagactagccgaatgctcagctccacgtacaactctgagaaggctgttgtgaaaacgtggcgccacctcgccgagagcttcggcctgaagagggatgagattgggggcatgacagacggcatgcaactctttgaccgcatcagcacggcaggctacagcatccctgagctactcacaaaactggtgcagattgagcggctggatgctgtggagtccttgtgtgcagacatactggagtgggcgggggttgtgccacctgcctcccagccacatgctgcatcctgaaaagcatgcctgtgggctgtcctcccaggacaagccaaggatccaacgagggctctggagctgtgagtggtgccaaaagactgccaagaatcaaggcttttgtgatatgtcaccgtatgccttaggatgttcaaggagccagacgaaataaggcctgtcttccaatttaaccaaagataaaggactagagccgggatactttcagatgctcgcctgtacctcaccaggcagagtaaatatctactcactcatacagccagcccaccagcccaccattaactcactgaacaatgagacaatgttgaggactcaaatgaatcaaaccccgtgggaatgacagaagtgaagaatctggtccctgtctttaaggagtttgcactccagtagaagacagaaggaacgtatgtttacaaaccacttcactggaagacgtcaaacaagctgaatgaaggggcgcttagaaaacgttaatagaagttctaagcgggagatgactccctactgggatgatgaaggatggcatcctagtgaagaagcagctcaaacattttgataaaatggcaacaaaatgcagacaccctgctccaggtattatttcaggtttagtacaagtctgttaataccctatgtggtttcattaggataactttttacctatccttgaggtcatccatattcttacaggccttccagtcaataatggaagagctcactctatacaaaaccaatatgcaaggcatgtgtttgtccaagcaattggatgtgtgcagtagccaatttcatttactgcattactctttggcctgggaaccctgtggtctgcactacatgtgaatggccttccacttcagtcttaggcagatttgaccttttaggggcagcaatgctgaaggacacagcaatttaaattataatgtgtcaggctgtgttttcacttcaaacatgtatgagtagtcagctgtaattagagaaatgatgacttcctaagagttcagccacgcataattctagatttcaagagcatctaagacttgtggattagcctcatggcatgagagtttcagactcagccttctgagccagtcagggaaagtggagttctgcagcgcaaatgagagcctgggcttggtgtcgagggagctggcttctagttgtgccaccttgggccttgtcttttcctctctctgcctcagtttctcgtctgccaatgagatgttagttagtgattctataattggggcaggtagggttcaggtgagcaaaaagaaagtggagctataggaaatgccaggcctttgaggtgctctatggaagtcaacacagtgtggtttgtccatttaaatgggaataaaaacagaaaaactcagacttggcattttcacaataactgcaatggtttgacataacatttataggcagaaagttaataaactggcattgttcttggcatattattgtactatccctgtaactgccaagagctcaggagccaggctagtgatcacaccaggggttagagttcactgctgaactccctgatggcaggtctgtgtttattactacattaaaacaaagtctctgacttataaagcgaggtcgtaaaaattacaagttgcatgactgaaaaaatgctttagggggaaaatcagtcatatctttaacaccaacaagcaatttcccaccaacgaatgtagtacatactgtgagaggatcataatgaggtcctgaatatttaatatcatcatttactgtgtctgtttgctgctgtttttcgaacctatttggtttaccctgcaagctaaatactccacggcagagcttaattatccttttaattcctctttgaaatcctgtggtgcccccttccccctgccttgtgatgatgatgagtgagtctccccttaattagactgcaaatgtcacttgtgatgagtgtgccattccaggataacagcttgcaccctcctcagaatgttttcagcgaaagagtggggtggctgttctctgctcctggtgctttggcctcatttcacactattagaattctggggctgtaaggccagccagtgtcagctcatgttccattggctctccacctgccatttttagggagctattccttatatagttacaaattcccttgtcatttacttatttggaaacatgggatttactctgacaagctttagcctatgttatgggattcagaacaatgagatcataataattctcactgaccaaagctgggactccatcctgccatttttgtgtggagatattcataattctgcaatactttaaaacatttagaaaacaccccagggtaggtctgtggcccttagacagtgaagtcttaattgtcaatattatttttgtctaattctgtatatatataacttattatattttataatctcaataaacacattaataaaaaaaaaaaaaaaaaaaaaaaa

SEQ ID NO: 23100 - DNA, 2135 bp, Homo Sapiens
gtaaaaaacaacaaaactattcaaaaacttcactctcttcccattaaacttgaactgtggctatattgaactgttttggaggggagggggtagccaggaaggaaacaagagaaagtacgtccatttcattatggattttggagttgtgagtgataggatcccaaaattcatctctaatgtggtttttaaatgctggaggattccaatcaatataaatatatatatatatatacacacacatatataaaaagtataatttttctattttttttttttttttttttttgcagagatttgctgccaggaatcaattttgagggttcagatttagcttggaagaaaaaaaagaaacatacatccttcagtataggagatgagggaatgagagaaaatattttttgaagaagcatttctgtaaaattagaaattactttttttaatctatttaaagtttggcttgaagaatgccatctctgactatatggccttgtattgcaaagcagatcagtggctggggtgcctgttgtgggtgtgagtgtgtacaagagcgattgaagccaaatctgttgtcatgttagtaaatgatttgaaaactgaatgtaatacttgagtagatttttttttctagtttgaaatttagtctgtctttttgaccttactaatatttcatttaacaagttgtaaaactctgattgtacttagagatgtgactaccaatcagtttgatactcaaggaaagggggttattcaagaaattgaaaatttcatcttggacctcagtgcatcggtcaaatggatttcagaggtttaaacttccctgtgattccccctgaatacccccaaaatgagaaacaaaattttttttcttactccatttgttactctctgttctttgactgcccacccacagaaaagcaaaataaccaactacctactcaattgtgtgtttgtaattgctttgagcagtctagtcaaatcatataaattgttctaaatttcagaattgaacattgaagtattaactcttctgttcacacatttagaattttagctcccaagatggtagggcagactgaccgtacagtaatttatttgtcgttagtgttaaagattaagcatagtaactgactcttaagtgttaaataatgtagaagtaaaaaaattttttttaaaggcttaatttgggaggggggacttatttctgtttacagtgtattaccttccttccctcctcttctccccccacacccaacaaaatacagtttggaattcactgaaacagtaccagcaagtcatgagattttttagtaaagatgagaaagatggttgaagaaaattagtgcataatttctcagtgaataaagttgtagctctcatatactaaatagacaagtttacatgctgttatttagaaaatgactaaaatattaaaaaccgtgttgtgttaatctgttttaagtcataccatgttcagagttctatgtaaggtgggttttatttttcttttaagggatagtttgtaatagtaagaactgtcccatatgttagtaaattacatatgtacaaattgaaactgtaaattgtgaacactggaaagcaccattgtgacatagagtaaacatcttagtaatatattaaagtgaatgtaaatggtggttaaaattacattactgtgaaattcatcttccaactctaagttaagctttggagatacatgttagtggttaactgttaagagctttgaaaacactgcacatatctgtacaagccagaattactatttctttgacttattattagcttggcagttgcttttgatttgattgttttatgacatggtatactactatatttactcagtttgaaactattcatttctacacactatttttaaaaattgcctactaggtgaaacataacaataaaactacctgtgctgaaatttgggggaagtttaggtcctttaaaaaaacatattaatcattgactacatctatgataaaagtgcttattttggtttactaagataatgcagttggtggaaatgataaacgttttaagtgttaacatcctttgaatgcgttggatttcagagaataaacattttgtaaaaatcaaaaaaaaaaaaaaaaaaa

SEQ ID NO: 23101 - DNA, 2048 bp, Homo Sapiens
tataagagtacttccccagttttgaggctggacagttaatatactttatatcaattatacatttaatataatttaatttaaaataatttaaagattcttaggagatagtctgactttcctgacctagatgggaatgatcagatagggattttttttgtggcacaggctaaatttgatggtgacatttatattgttgagaatgttacatcttattttaccacaacttttaaaaaatgttacatcttttgcagtaggatcagttgtgaggcacatagtagctgaggctccatggagccacctttcatttctttcagtcagagaggaggacagtctctgtctctgcatttctggtgtcttgcttgtcggtggcagagccatgcttgccggcatttgcttaggcggccatagtagttgctaagtgtacaggtgactgggcagggatgggaggtggccacaggtcagagacaagtgctcagtcagtccctggtgccaggactgtgtgcctcggtgccttgggaaatggaagctccctggtgcagctgcagctgtgggtggaggtagagaagccagcaagaccttggtcttaaccccgtgttcattttcttgctagctgtgtgacgttgggctacctcgcttctctgagtacaaatggtgtgtggtgaatgggtcccaggtatgctacgagctttgagggctgctctttttctcttcatagcgataagtgttaaactgtctttcttaggaaacgttcacagacttgcaacagctgatgtcctctgagtactgtctgactccctcaggcaagttcctgaattcagtaccatcattattatttttgtgtaagactttgacaaagtatagcccctgccaccagagcagcctgtacagtgggtctctaaggtgggacctgccccgggcctgccatgcacgtgtgtgaaacagcgtgaaaagtgtcgcggtaaggtgaccctgggttacccaggcaaggctcggtgtttgtttcagaaagcagagaagtatgtaattgattttaaaagtttctgtttaaaatatttggctatgttttagactatgaaggaatgaactttgcttctctggataagaaagtcacatacattgttccagctccaagtttgttcggccctcgccacaagtggatgtagcgtttggccctttgtgtgccttgctggtgactctggttttgggagctcggatatgtcccagaagcaggcttatggcacttctgtagctcccttgctacccttcctttgtgtctagataagtgactgacatgcttttctttggtctcaggaaagtgggggctcagcaagaactgattaccgagccattcaactagccaaggaaaaaaagcagagaggagcggggagcaatgcaggtgaggccgtgtgtgctgcagccggacgagcaagggcctgagggttctctgtcactgttactggcagaagaaacacagcaggtgtttctgtgctcttggttttacttttctgttcagaatacccttttatcaactccttagttttatttgaacttaagggaaaaaattagtaacaaaattcccagcatcagtatgaacatattttatttgcctaaacaagctttgtgaaagttaagcgttcaaacaccagtgtcagttacctggaaggctactaaggtaaataagcaaagcaggccagttgtcaggaaagcagagattgtgcctggtgctgaatggccttggggcctgatcttggcatggcagagacctggggactgccactgtccccaggtacgtgtacatggagccaaactgtgtgtcctgtggcattgtcagagttatgttgaaatcttatttgaaaatgttagcaacttacttgcatttttaaagaccaaacaagagctggtaacctatggcctcaagcatctgtccttcctaaaaatggaatagtgggatgtagtgcttaatggaaactgctaaatctttttctaaaaactaacagtggatttttaaaatatattgttttttgtgtaaaaaaaaaaaaaaaaaaaaa

SEQ ID NO: 23102 - DNA, 2586 bp, Homo Sapiens
gtacattaaaaataatttaatagccacaatatgatgttctttaagctgcaaattgagtacactgggaatcaacaaatttgatgaagcctgtctgtctcttcaccagtggagtgagtgcagcagttagaaagagaagcaatattgtgcaactggtgcagtggtgagttaatcatagtgtataaccttgtgttcatgaaacaggttgttcattgttctgcatctctcttcatttaaaaaggatacacaattctttcctcattgcatattacaccaaacgtttgagggaaaaatcctcattcgtaaaggattttggatttataatctaaaactcaacaataaagaaataatattccaagtctctggtttcctaatatacataataactgtttataaagaaggtctaagagctgatatttgccaaagtgatagaagagttgttttttcctctctactaccaagctttaagacattaaaagaagtctagtgtatttgaatattttagagaaagctttatcattttttaagatgccaagatgctgcctacgtttgcaaaagttgtctaagaattcaccatgagctatattttcttctggatctttgaccaaggtgatgtcagcttatttctggggaaggtgttgagctcttatacatgaaaatggatataggctattctctgggatgagtgtcatttcaatgctttataaatccatgaagctgcttgtctcataaagtagaactgatacaaattttggttggatatatagagaattttataaatgtattgccttagaatttctgggtggagacccaactacaatgacattgtcatgcaagaactataaagataattagagttaaaagttgtttaaattgtgcccttaaatacagcagaacctggagaaggtcatacttcaaaggtcgattttgagtccgaataaagaaagacctagtaacagatagtttttttttgttcattttcttctaccaagtagaggtttatgccctcagaactaaactagtaaaaatatctgaacaaaaaacctttcgttgttggcataaaaatgtgatacacttagagacattttgtttattgcatataaatctaatttttccataaattagatttatgatattttcataaagcacttgattagtttttcaaggcgtaccatcacaaagatgctttcctgcagagttctttgtatcaacagcctatggttgagatgttttctcatttcctgtagagagagaataccactaacaaacaagcaaaaactttagtgccaaaatagtggaactattttgtcatcttttgagaaaaaaatatacaaagaagtcatcttttcattaagtggattccctggttcctttccagctggttgtggaagtaatggctaacatccttcagctgactttgtctacaaggattattagcaaattctgtaggagcaagcatgtctgaccttaacttaatggatcccttattcaatcagtggcttctgtctttatgtctgttggcatatcaaaatggtttctgttcctagaaaagtaataacatatgcttatctttattctttttccaggtgattttgttttcaaatgctccttgtgaaaacacctagtgttgtagaaaggaaagtggccagaaagaacaacttgggaccatgagtaggtcattaaatagcttagtgatttatcctcatatagggcttataaaccctgtatgtgtttatatgtgcttcacagagttcgtgtcaggctgaaaggagatatgtataagaaagtggtttgtaaattatgttccatttcataaatagacactattcacaaactaaaatctaataaaaaaccacagttgtaatttaaactgcttgatataaaaagaggtatcatagcagggaaaacacactaattttcatacagtagaggtattgaaaactgaaaatgggaaggcaacttgaagtcattgtatttgattgaaaatgtttaatacatctcattattgacaaaatatgtcatcttgtatttatttcaaggaaaccaatgaattctaggtagtatattacaagttggtcaaaatattccatgtacaaatagggcttctgtgtccatagccttgtaagagatactgattgtatctgaaattattttttaaaaaaataaattatcctgctttagtgtgttaaaagtagacgatgttctaatataacactgaagtgcttcattgtatcccaacagtttaccttcaagtaatattatctttatttttaggctaagcacgtttgattattttgtctgtctcctatatagatctgttttgtctagtgctatgaatgtaacttaaaactataaacttgaagtttttattctatatgccccttaatagactgtggttcctgacgcacactgttaggtcattattttgttgtaccaaagttctagtggcttcagaaatcatagcatccaatgattttttggtgtctggctatgaatactatggttgagaattgtattcagtgattgtttctgcacacttttcaaataaaaaatgaatttttatcaattaaaaaaaaaaaaaaaaaaaaa

SEQ ID NO: 23103 - DNA, 1293 bp, Homo Sapiens
gaattcaaagcaaaattagcaaagggaaaaagcaccttgggtgaagtcgggggaggccaggctggagcttccagagtcctcttccagggggttcctacaggatgcacttaatgtctttagcaatgagttgtgacaacatgtaggagatgttgtctagcagggaagctcattagaaattcagtgcccatggtgttttgctaggggccagtcatgtgggcacctctgcctggcaggtaccaaaattctaggctctgggaaggaaagcaggtgctgagcaagaaccatattgtttgtacaaataatttcggcccagtgaactactctcatcagttaggggatggtggggaccctcctgaaatctgggttcccagatgccagcagaattcctaaggagagcagcttcaggcctgtggcgtgaactctgttctactcacgggtgatctcatgcccatcccaccaggctctcgagggcaagcactccccagtcgtgggcgtaagtgaggcctttaatgagctcttctttgccacaggggcctggaaggtcctcagcatgctgggccataatgaagaaaacatcctttccctatagtgtacgtgataataacctaggcatttatggccctgcgtgtggctatcttgcataccttacttttgctcttgcaaaaattctgtcaggtcgggagagttctctctgttttacagatgaggacgcgactctcagttaagaagaaccaactgcagttctctgacctcaaatctagttttatttccactatcatttcctgacttcattctggaaccaccttcctgttgtttttgatgacacatgtgtgtcacttcggttatttacttaaagaaaaaagtctcgttaaaaagagctgggtatagtggctcatggctgtaattccactgctttgggaggctgaggcgggaggatcacttgaggctaggagtttgacgccagcctgggcaacatggtgaaactctgtctctacaaaaataataatgataaataggctgggtgtggtggctcacgcctgtaatcccactttgggaggccaaggtgggcagttcgcttgctgccaggagtttgagaccagcctggtcaacatggtgaaaccctgtctttactaaaaatacaaaaattagccgagtgtgctggcgcacacctgtagtcccagctactggggaggctgaggcaggacaatcgcttgaactcaggaggcagaggttgcctgcactccagcctagatgactgagtaagactctgtctcaaaaaaaaaaaaaaaaaaa

SEQ ID NO: 23104 - DNA, 1984 bp, Homo Sapiens
tgaagaactggtcattttttttgagtgccctcttctcagttttgtttaaacttacactcagtagagtgttgggttgtctgctgacatggagtagaacctggattctggccaaataggccagaatcggaaaggtgaaggtgagtgtgatagtaggtaatctcctcaccccagcacaggccctgggagagaggcaaagcagtttgatgggatctggaggggagggaggtaccctggcccttggtctagcatcagtgagtcctgcccttccaagcccctggaggctagtggcattgcattgtgcccctttttgccacccttctctgatgtgattttgagcgaagaggagtcagtaagcccattgagaccggctgctcccaaagcccgaggactctagctgtgtggggaagggctagcattggtcaggactctgctgacagcactgagtaggcaggaatgtatttgagatttggaagtactgttaatttggtggagtcaggtgaatggataagaggcagatcggcagaaagcatcagtgtggtcccgaggctccctctgttttccttgccatggagtccccagcgccttgtgcctgtttccatttccctctctctttgaaaagtagaaatcagtggtttcttgactcctaaacagcctcctcactatagaaggagcctgagcaggtcagaagaactagaaaagtcctcagatacccccctctgtccagccccctttcccatacacagatatcaatggatgagcaggaaaagaggaggcctggactcactgaagtacttgaagaagcacaagtgtcatagatgtgccgccctttgccctgggtgttctagatcacacagaacacgtttcagctggactaagaatcagactagccaggggttcttctgaacagctcaggccagacctctgggctcctctgggggccctgggacatgatgccttgcagtttccattccattgtccccaggcctcctgacctggtgacagagagtgccctgcagaagtgagtctatttttcccaattcctcttcatgaccagaaaatggcagctggccggttggggtcctgtgggaaagggctaacctgggctgttaggtagacactaggtttaaaggtagacagggagatggcatcatcagggcaggccaggcccacttcctgtgaccccagaccttggcaggcgggtcgtgctgaaaccaggcatctccctcacacctggggaaaggtttagggcaacatgttgcctcttcatcccattaaccctagaaatcttctggttagagtggccccttaccccaaatctggcctaggtctgaagactgcaggatagtcatgatgggcccatcctagagcctggctagctggaagacgcggtatggcagggacaggagggcggcaggaagggctttgtggccctgctggggccaaaggcagttttctgtgctccctttagccccagcctggctggccaggtctcctgtacttcaggggaccatggggccgcccaagccagtcaccttccccttccaagctctccccccatgactgttgatttctggcgcgtggaggcagagttgtgaatccacaaatgctgtagcccatatctcgtaatgtgtctgtgtccacttagagcctcacgacctggctgtgtgtgtgcatgtgtgtgtagtatagtttgtagttgacaatatgtgtatataatagctggtgtatttatatgtgagtgcagaattagtgcccgtggcggttttctgtattttaaacccattgaattggttagttttattttagggaagtgggaaaggcggagtggggggaagtataggaagaaggattcttagcaaaatcattctctaggactattagtcgcgatctcccagtgagccatcacgatgcccttttcaaataaatgttaatgttgtcaccaaaaaaaaaaaaaaaaaaaaaaaaaaaaaaaaaaaaaaaaaaa

SEQ ID NO: 23105 - DNA, 1338 bp, Homo Sapiens
ggcctccctcgttgccccagcctcgcgggccgcctaactgccccgttccaagggtgccaccggaccccgctggagaggaacttctccgttggctgatttcatcaccacccattcccgattccacgtttcctttaagcggggctggcggagccgcaaggcggcaaggaactggattgcgattggtcagcacgtgcctcggtcggcggtacaattggctgaggcgctgggccttgggaagcattccccgacgggattggtcgtcgctctcgcagagcccgcctcccgcagtacaagcggcccccgggtcgggtgggaggaggggactccgggaggaggaacatggcggtggcggacctcgctctcattcctgatgtggacatcgactccgacggcgtcttcaagtatgtgctgatccgagtccactcggctccccgctccggggctccggctgcagagagcaaggagatcgtgcgcggctacaagtgggctgagtaccatgcggacatctacgacaaagtgtcgggcgacatgcagaagcaaggctgcgactgtgagtgtctgggcggcgggcgcatctcccaccagagtcaggacaagaagattcacgtgtacggctattccatggtgagccgcagccccgtcccgccctgccggaggccccagtaccagcttcgaggcccacctgagcctgctgccctgacccgtggccccagctgagcacgcaggcttcctggggttctcccagggtcggcggcagagccctccctccagggcccattgtgttcctgcattcccccatggagcacacgccagacctgaggggtgggacggacacccccaggcatggccggctgtctcctctccctgccttgggaggccttgctgggctctagctgtcctccagcactttgggccctgggcccccagaggcagtcagtacctgggtggagctcagagtccccacctgtgctcttcacaaaaaccaccagcagatgagacccacgtgcgtccctctgggcgcctcaggccccaggatccaccatcaaggcctatggtcctgcccagcacgccatttcaactgagaaaatcaaagccaagtaccccgactacgaggtcacctgggctaacgacggctactgagcactcccagcccggggcctgctgcctccagcagccacttcagagcccccgcctttgcctgcactcctcttgcagggctggccctgcctgctcctgcggcagcctctggtgacgtgctgtccaccaggccttggagacaggctagcctggccacagaattaaacgtgttgccacaccaaaaaaaaaaaaaaaaaaaaa

SEQ ID NO: 23106 - DNA, 3435 bp, Homo Sapiens
tcaatgcactgttcaaggatgtttgagagattttctgtcttgcctgaatacaaaacactgtagggaacctcttgtgcttgactttgcacacacacgggatcttcagggtgggtacatttaaaactgacaagtattgccaaattgccccccaacgtagtttttacaccccacctactactctcagtgaaaaatcaggccctttttattttaagggctaaattgctaatccctgtgtgaaaatgggtgttaacaaaataaaaaataaggaaaatatgcaggcttacccaattttgttatctatacattttacagtctctaatacttagcatagctcctttgggtgtctgcccaccacccttctttctgaacgtggggttccctgggctttccttgtttgacttcagacctggatctaatagggatctggaggtagaatcaagacgaatgttccctttggccttaggtgagtcctttgcatctctgaggccctgttgatgacatccagttctctagacctctgcccaaaccagagcaatccctcctcaaatatgctaagcagaaatgcagacaatataagacacactatatttatattttaggagtttacattaccttcccttctgtttggaaaccaacatctctcaaaattaggtatagttaacacagaataccccaaaataccaccattcttcataattccatttccttatttctggattctttcaagggtaaaaaccttgtttcattcatctttggggcagcatttgcctagtatgtggtaggcgcccagtagattttggataaactgacctgattttctgttaatattccaactggattatttctttctcctcttacagaatgaagatattcaaatgttattttaaacataccctacagcagaaagttttcatcctgtttttaaccctatggctgctctctttgttaaagcttctaaatgtgagacgactctttccgcaaaaagacatttacttggttgagtactccctaagtacctcgccttttgtaagaaacagatacactcatgttaaggatgaagtcaggtatgaagttaactgttcgggtatctatgaacaggagcctttggaaattggaaagagtctggaaataagaagaagggacatcattgacttggaggatgatgatgttgtggcaatgaccagtgattgtgacatttatcagactctaagaggttatgctcaaaagcttgtctcaaaggaggagaaaagcttcccaatagcctattctttggttgtccacaaagatgcaattatggttgaaaggcttatccatgctatatacaaccagcacaatatttactgcatccattatgatcgtaaggcacctgataccttcaaagttgccatgaacaatttagctaagtgcttctccaatattttcattgcttccaaattagaggctgtggaatatgcccacatttccagactccaggctgatttaaattgcttgtcggaccttctgaagtcttcaatccagtggaaatatgttatcaacttgtgtgggcaagattttcccctgaagtcaaattttgaattggtgtcagagttgaaaaaactcaatggagcaaatatgttggagacggtgaaacccccaaacagtaaattggaaagattcacttaccatcatgaacttagacgggtgccttatgaatatgtgaagctaccaataaggacaaacatctccaaggaagcacccccccataacattcagatatttgttggcagtgcttattttgttttaagtcaagcatttgttaaatatattttcaacaactccatcgttcaagacttttttgcctggtctaaagacacatactctcctgatgagcacttttgggctaccttgattcgggttccaggaatacctggggagatttccagatcagcccaggatgtgtctgatctgcagagtaagactcgccttgtcaagtggaattactatgaaggctttttctatcccagttgtactggatctcaccttcgaagcgtgtgtatttatggagctgcagaattaaggtggcttatcaaagatggacattggtttgctaataaatttgattctaaggtggaccctatcttgattaaatgcttggcagaaaagcttgaagaacagcagagagactggatcactttgccctcagaaaagttatttatggatagaaatctcactaccacatcatgatagtaaaatcaggatggaaataagagggtgcctgataaatggagtcagtgtggaattgaataccatactatgcccaatactgtttaaactcagtcctcccatattttaaaaggtgtccaaaattccatacacaagggaaagtgatctagcctttgatgttattagcctgcagttggctaggtttttttaatatttgtttttgcttgtaatctcactgagccaaatcagagatcttaaacattcagtcagtcatcaaacattattgagcacctaactatatgacaggcacttttttagagactgcggcttatcctcatcatagcaacctcggtatctttaagttctccacataacagtcaggattctactgaagaagcttttgaagtttgtggtaatcgtctgatcatataaaccacccatttcagagtagtgtttaagtactgtgaccaacactccacttgtctcttaactcagctttcaagacattccttaaccatcagagcagaggaggaaagactcactacctcagaaaaatctcaaagaatagtccaatttcctgcttgccaaagcataatctgccttttggtgcattacttggtcaattcagggttgaggagactgttggggggcatttataatgtatgaaagttaaggaagggggtgaggatgtgggttgggacaggtagtacctaaagaggagcgaagggatttatacaacatttttatcatgttacaaaacagtatcatgaatggcctcctttttagttcaactgtttctttaaaatgcatttactgattaaaaataagaactgaccaatagctccaagtgtcacacaccagaacattaagcctaagtcctcaattcataagttatcattctagacaagtttctttacaatggaatactttctatggaatcattataattctgttgtgtggaactatcaagctaagagtcactaaactttcttgaaaaggttgtgtgaaatatgacagctttctaaattaatttgtatagtcatttaaaattttttcttctctggcaactgtccaactggaatccagatttaaggtgataaaagctctaagtttcttgcagtctttttctcagcttagttccagagagaaaaaagctaattttcctaaggacacagcaagaatattcattaaggatattttctaaaacccacacttgagaaaaccacccaatga

SEQ ID NO: 23107 - DNA, 1634 bp, Homo Sapiens
acgatgaagtcagtgaggaggaggaatagtaattgtcaatgagcttttaataccaagatacaccccctgcccccaaagaagagtcctcttttagggaatcagaaccttcattgtcctagaagctgaaagattcttggaacattttagcttttactctcaacttgctgttctctttacattccttaagttagactttcgggtgtggcttctctctcaggggtaacatttacttccattttctagaccgaaccaaaagtcttctgcagaatctcccaccgagtgtggtaagaaggaaggacaaaaggctttaggatataaatttcatgttacagagcatgtcattgtcaaaggaaatctgtggccctgagattttaagaacataaaatgtgacatttgatatttctccagcccagggaagtaagatggttagcaatggttgccttaatcaaatggtcccatttttaaccccaaaggaagtgcccacagcaagaggtttgtgtgatgcacttatgtcctccggtgaggaaagggggccacatatgaaaggccccttaggtcagatcctgagagtagcacatttgagtgcagattcctgggccccacctcaaacctactaattctgaatctctgggaatagggccaggaaatctgccctttctacaaactacccaagttgttctgttgcacatcaatgtttgggaaccactgctgtaagggaatcattctggtcaccttgagctttgagctaccactaagccatgaaagaaaatacatcatacagggaagagagaagggaggaggttccaagtagtaactggcagatcctcctgtctggaggtaccaccttctattctggtttctgacttttccttcttgatgaccatagatgtgttccagaggcaaaagagacacattatcccagatggcagaacatgctttcaaaacatataaaatgtcaaagttccagatccttctacatctttagtcctgtctgaggatggtagctggctctctgtagctgatagatggctagagttccatccaaatccttgaccacgacttcatggagatttgaataatctatttgatgagatttctatttcaataacccacctctctcaccccacattcatatccctaaatttgaccctctgggccgagtcacattaccttcaggagacttgatcccagtagactgaggtcttccctttcagcagaaagatttcatttccctggcttgccagtggcactgatttccgaacacccaatgagtttaatattctttcctccttggcattactgccccagccgctttttttttttttttgtgtgtgtctaataaccaggaaaaaaataaagcttaggttttaaaaagttttaaaaataatctgtttcagaaactgtcaaatgtaccatatttgtattaagagttgttgggaatttttgtacaatgaatttacatttatttatggtgacatatttacgcttgtgatcaaataatgatgttaaattcttaaatcatatttgctatgcagctgaagatgatattttgatttgtattttgggggtacctgtgttgagttgataaacatttccatcttcattaaaactgcttccaaactaaaaaaaaaaaa

SEQ ID NO: 23108 - DNA, 1149 bp, Homo Sapiens
ccaggggtgaattactttctcttcgggacattgaacgccttcataaaaagccaaagtctgacaaagagacaagactagcaactgcaatggctggaaagacagaccgaaaagaatttgtgaggaagaaaaccaaaacaaatccattttccagttcgacaaataaagagaagaaaaaacagaagaactttatgatgatgcggtatagccagaatgtccggtcaaaaaataagcgttccttccgagaaaaacagttggcactacgagatgcacttttgaaaaagagaaaaagaatgaagtaacttcctggcaagttttccattcctagaagaatgctaagtttgtgtccttgctctgaaaattggtaaatcaagcatgtttgtttacattaaaaagtccagacacactgtattgtgaaaactgctgaacatgtggcagcaattttgtgtttttattttggagacggctaatggtaggaatgttaatgtaaatagtggtggtaatgtaaaatcatttcatttatcattcatgcaaaaaaaagtatgtattgagtgcctattcattgtcactgtagatgcaaaacgaatgagctgtaaccccttcactcaaggcattgacagcttagctgtgagggtggacacacatatgtgtatttacagtgcagtgtaaatagttctgtagtagaggttaactccatatttctgtgaggtcactgaggccttatggactaactctgtgaggataggagttatatattcttataagacaaaacaaaacaggacaatgttacaagagtaagaggttcttacttgtacataggctttcctgctgaaaacaggcccctgctgtacagattttgggtacataatttagctcttttagtcaatccaagagatttaagtgacccccccccccgtgttttttttgtttttgtttttgttttgaatgccatgtaaaggctttttggttaagacctcacttttaaaactgccttaagtataaatagtacctttggaatacatttagttcatcatttgagctgccttcatactggtttcctcagccttccttcagcctgtaatattttcagcccactgtttaccttgtctcaataaaaggtttctaatgccaaataaaaaaaaaaaaaaaaaa

SEQ ID NO: 23109 - DNA, 3480 bp, Homo Sapiens
aggaaatcggggctcggccccgccggcgcgcgaccccatccccatcccggtccctgcagagcgatccccgggcccagatatggacgcagcagagccgggactccccccaggtcctgagggcaggaagaggtacagtgacatcttccggagcctggacaacctcgaaatctcactggggaacgtgacccttgagatgctggctggagaccctctactctcagaagacccagaacctgacaagacccctacagccactgttaccaacgaagccagctgttggagcggcccctccccagagggtcctgtacccctcacaggggaggaactggacttgcggctcattcggacaaaggggggtgtggacgcagccctggaatatgccaagacctggagccgctatgccaaggaactgcttgcctggactgaaaagagagccagctatgagctggagtttgctaagagcaccatgaagatcgctgaagctggcaaggtgtccattcaacagcagagccacatgcctctgcagtacatctacaccctgtttctggagcacgatctcagcctgggaaccctggccatggagacagtggcccagcagaaaagagactactaccagcccctcgccgccaaacggactgagattgagaagtggcggaaggagttcaaggagcagtggatgaaggagcagaagcggatgaatgaggcggtgcaggcactgcggcgcgcccagctgcagtatgtgcaacgcagcgaggacctgcgggcacgctcccaggggtcccctgaggactcggccccccaggcctcgccgggacctagcaagcagcaggagcggcggcggcgctcgcgagaggaggcccaggccaaggcgcaggaggccgaggcgctgtaccaggcctgtgtccgcgaggccaacgcgcggcagcaggacctggagatcgccaagcagcgaatcgtgtcgcacgtgcgcaagctggtgtttcagggggatgaagtgctgaggcgggtgacgctgagtctcttcgggctgcggggggcgcaggcagagcgtggcccccgcgccttcgccgccctggccgagtgctgtgcgccctttgagccgggccagcgctaccaggagtttgtacgggcgctgcggcccgaggccccgccgcccccgccgcccgccttctccttccaggagttccttccctccttgaacagctcccctctggacatcagaaagaagctctctgggcctcttcctccaaggctggatgagaattcagctgagccaggcccttgggaggatccgggcacaggctggcgctggcaagggactccaggccccactccgggcagcgatgtggacagcgtgggtggcggcagcgagtctcggtccctggactcacccacttccagcccaggcgctggcacgaggcagctggtgaaggcttcgtccacaggcactgagtcctcagatgactttgaggagcgagaccctgacctgggagacgggctggagaatgggctgggcagccccttcgggaagtggacactgtccagcgcggctcagacccaccagctgcggcgactgcggggcccagccaagtgccgcgagtgcgaagccttcatggtcagcgggacggagtgtgaggagtgctttctgacctgccacaagcgctgcctggagactctcctgatcctctgtggacacaggcggctcccagcccggacacccctttttggggttgacttcctgcagctacccagggacttcccggaggaggtaccctttgtggtcacgaagtgcacggctgagatagaacaccgtgccctggatgtgcagggcatttaccgggtcagcgggtcccgggtccgtgtggagcggctgtgccaggctttcgagaatggccgagcgttggtggagctgtcggggaactcgcctcatgacgtctcgagtgtcctcaagcgatttcttcaggagctcaccgagcccgtgatccccttccacctctacgacgccttcatctctctggctaagaccttgcatgcagaccctggggacgaccctgggacccccagccccagccctgatgttatccgctcgctgaagaccctcttggtacagctgcctgactctaactacaacaccctgcggcacctggtggcccatctgttcagggtggctgcacgatttatggaaaacaagatgtctgccaacaacctgggcattgtgtttgggccgacactgctgcggccgccggacggcccgcgggcagccagcgccatccctgtcacctgcctgctggactctgggcatcaggcccagcttgtggagttcctcatcgtgcactacgagcagatctttgggatggatgagctcccccaggccactgagcccccgccccaagacttcagcccagcccctgggcccctcacaaccagctcccaaccgccacccccgcaccttgacccagactcccagcccccagtcctagcctcagaccccggcccagacccccagcaccacagtaccctggagcagcatcccacggccacacctaccgagattccaactccacagagtgaccagagagaggacgtggctgaagacaccaaagatgggggaggggaagtgtccagccaaggcccagaggactcactcctggggacacagtctcgtggccacttcagccgccagccatgtaagtatccccggggcggtgtgaggcctgtaacccaccagctgtccagtctggccctggtggcttccaagctgtgcgaggagacccccatcacatcagtgcccagagggagtttgcgggggcgggggcccagccctgcagctgcctcccctgagggcagccccctgcgccgcaccccgctgcccaagcattttgagattacccaggagacagcccggctactctcgaaattggacagcgaggctgtgcccagggccacctgctgcccggacgtccagcctgaggaagccgaggaccatctctgaccaccctggcaccttaaataaggaagaggcccagattgtgaacacggacccatatatccctacctcccaccacctagtggccaaacaccccgccaggagttcaatgctgggagaggtccagagggttcctataaggaaaaactatttaatacatgacctaggggaggcctaaaacccttttggggataatgtcccagagtccccccactagacacaggtcactgccaagcatcagggccactcgggctcagaggtcactcagggtcaatactcagggtcagtgcaggttatgagatccttggggtccaccctagtctctgacacctgggacaggggtgcttttgctactttggttgtggtcactcccccacacctgcctgcctccttcacggactcgaagtgaccttcctggaggaggtgggcagctcagactccacatgctggtggtgcctgaggtctgatggcctctaataaactgtgtcctataa

SEQ ID NO: 23110 - DNA, 3255 bp, Homo Sapiens
atgagctcccaaagccatccagatggactttctggccgagaccagccagtggagctgctgaatcctgcccgcgtgaaccacatgcccagcacggtggatgtggccacggcgctgcctctgcaagtggccccctcggcagtgcccatggacctgcgcctggaccaccagttctcactgcctgtggcagagccggccctgcgggagcagcagctgcagcaggagctcctggcgctcaagcagaagcagcagatccagaggcagatcctcatcgctgagttccagaggcagcacgagcagctctcccggcagcacgaggcgcagctccacgagcacatcaagcaacaacaggagatgctggccatgaagcaccagcaggagctgctggaacaccagcggaagctggagaggcaccgccaggagcaggagctggagaagcagcaccgggagcagaagctgcagcagctcaagaacaaggagaagggcaaagagagtgccgtggccagcacagaagtgaagatgaagttacaagaatttgtcctcaataaaaagaaggcgctggcccaccggaatctgaaccactgcatttccagcgaccctcgctactggtacgggaaaacgcagcacagttcccttgaccagagttctccaccccagagcggagtgtcgacctcctataaccacccggtcctgggaatgtacgacgccaaagatgacttccctcttaggaaaacagcttctgaaccgaatctgaaattacggtccaggctaaagcagaaagtggccgaaagacggagcagccccctgttacgcaggaaagacgggccagtggtcactgctctaaaaaagcgtccgttggatgtcacagactccgcgtgcagcagcgccccaggctccggacccagctcacccaacaacagctccgggagcgtcagcgcggagaacggtatcgcgcccgccgtccccagcatcccggcggagacgagtttggcgcacagacttgtggcacgagaaggctcggccgctccacttcccctctacacatcgccatccttgcccaacatcacgctgggcctgcctgccaccggcccctctgcgggcacggcgggccagcaggacaccgagagactcacccttcccgccctccagcagaggctctcccttttccccggcacccacctcactccctacctgagcacctcgcccttggagcgggacggaggggcagcgcacagccctcttctgcagcacatggtcttactggagcagccaccggcacaagcacccctcgtcacaggcctgggagcactgcccctccacgcacagtccttggttggtgcagaccgggtgtccccctccatccacaagctgcggcagcaccgcccactggggcggacccagtcggccccgctgccccagaacgcccaggctctgcagcacctggtcatccagcagcagcatcagcagtttctggagaaacacaagcagcagttccagcagcagcaactgcagatgaacaagatcatccccaagccaagcgagccagcccggcagccggagagccacccggaggagacggaggaggagctccgtgagcaccaggctctgctggacgagccctacctggaccggctgccggggcagaaggaggcgcacgcacaggccggcgtgcaggtgaagcaggagcccattgagagcgatgaggaagaggcagagcccccacgggaggtggagccgggccagcgccagcccagtgagcaggagctgctcttcagacagcaagccctcctgctggagcagcagcggatccaccagctgaggaactaccaggcgtccatggaggccgccggcatccccgtgtccttcggcggccacaggcctctgtcccgggcgcagtcctcacccgcgtctgccaccttccccgtgtctgtgcaggagccccccaccaagccgaggttcacgacaggcctcgtgtatgacacgctgatgctgaagcaccagtgcacctgcgggagtagcagcagccaccccgagcacgccgggaggatccagagcatctggtcccgcctgcaggagacgggcctccggggcaaatgcgagtgcatccgcggacgcaaggccaccctggaggagctacagacggtgcactcggaagcccacaccctcctgtatggcacgaaccccctcaaccggcagaaactggacagtaagaaacttctaggctcgctcgcctccgtgttcgtccggctcccttgcggtggtgttggggtggacagtgacaccatatggaacgaggtgcactcggcgggggcagcccgcctggctgtgggctgcgtggtagagctggtcttcaaggtggccacaggggagctgaagaatggctttgctgtggtccgcccccctggacaccatgcggaggagagcacgcccatgggcttttgctacttcaactccgtggccgtggcagccaagcttctgcagcagaggttgagcgtgagcaagatcctcatcgtggactgggacgtgcaccatggaaacgggacccagcaggctttctacagcgaccctagcgtcctgtacatgtccctccaccgctacgacgatgggaacttcttcccaggcagcggggctcctgatgaggtgggcacagggcccggcgtgggtttcaacgtcaacatggctttcaccggcggcctggacccccccatgggagacgctgagtacttggcggccttcagaacggtggtcatgccgatcgccagcgagtttgccccggatgtggtgctggtgtcatcaggcttcgatgccgtggagggccaccccacccctcttgggggctacaacctctccgccagatgcttcgggtacctgacgaagcagctgatgggcctggctggcggccggattgtcctggccctcgagggaggccacgacctgaccgccatttgcgacgcctcggaagcatgtgtttctgccttgctgggaaacgagcttgatcctctcccagaaaaggttttacagcaaagacccaatgcaaacgctgtccgttccatggagaaagtcatggagatccacagcaagtactggcgctgcctgcagcgcacaacctccacagcggggcgttctctgatcgaggctcagacttgcgagaacgaagaagccgagacggtcaccgccatggcctcgctgtccgtgggcgtgaagcccgccgaaaagagaccagatgaggagcccatggaagaggagccgcccctgtag

SEQ ID NO: 23111 - DNA, 1954 bp, Homo Sapiens
acaccctctgccgactccaagacgctgcctcttcctgcgggcgaggcgcgcggtctggtactcgtgcgtcttttatcgcctgagtttccctccgccgactagcgcgcggggcccggttctccatcgcgcgcacggcagcctagcgcaatgaggcgggcaccctgcgttcgagataagttgcgggagatagtaggagcatccacaaactggagagaccatgtgaaggcaatggaagaaaggaaattacttcatagtttcttggctaaatcacaggatggactgcctcctaggagaatgaaggacagttatattgaagttctcttgcctttgggcagtgagcctgaattacgagagaaatatttgactgttcaaaacaccgtaagatttggcaggattcttgaggatcttgacagcttgggagttcttatttgttacatgcacaacaaaatccactccgccaagatgtctcctttatcgatagttacagccctggtggataagattgatatgtgtaagaagagcttgagcccagaacaggacattaagttcagtggccatgttagctgggtcgggaagacatccatggaagtgaagatgcaaatgttccagttacatggtgatgaattttgtcctgttttggatgcaacatttgtaatggtggctcgtgattctgaaaataaagggccggcatttgtaaatccactcatccctgaaagcccagaggaagaggagctctttagacaaggggaattgaacaaggggagaagaattgccttcagctccacgtcgttactgaaaatggcccccagcgctgaggagaggaccaccatacatgagatgtttctcagcacactggatccaaagactataagttttcggagtcgagttttaccctctaatgcagtgtggatggagaattcaaaactgaagagtttggaaatttgccaccctcaggagcggaacattttcaatcggatctttggtggtttccttatgaggaaggcatatgaacttgcgtgggctactgcttgtagctttggtggttctcgaccgtttgtggtagcagtagatgacatcatgtttcagaaacctgttgaggttggctcattgctctttctttcttcacaggtatgctttactcagaataattatattcaagtcagagtacacagtgaagtggcctccctgcaggagaagcagcatacaaccaccaatgtctttcatttcacgttcatgtcggaaaaagaagtgccattggttttcccaaaaacatatggagagtccatgttgtacttagatgggcagcggcatttcaactccatgagtggcccagcgaccttgagaaaggactaccttgtggagccctaagaacaccacatttgttgaaaactagcactctacccacagtgacgtggtatctgatgaagacctgatcgagtgtattgattttagtattgcttcgtgtcctccacacaggaggaggatgtattcagcctttaggatgatcagaaaagcagaaagagagagtggccggatggggctgaggggagaaagaattattaaacaataaatactttcaagacaattttaattgtgaacctaccatgttgcctcccatcttctgaaaaaacaaaaaaattataggcatgagccactgcacccggccggtggaaagcatttttaacaaaaaatttttaggccaggcacagtggtggctcatgcctgtaatcccagcactttgggagactgagatgggaggatcgcttgagaccagcctggggaacatagtgagaccctttctctacaaaaagttaaaaaattatctgagcatggtggtgtgcacctgtagtcccagttaggaggctgaggtgagtggattgcttgagtccgggagtttgagtctgcagtgagctatgatcatgccactgcactccagtctgggtgacagcaagac

SEQ ID NO: 23112 - DNA, 1417 bp, Homo Sapiens
tgtgaggtcgcgttccccagtgttacggagggtccttgaggcaggagtgaaaattgggtctgggggttagtcctggggtggaggtctgggcacgccgggtcggaccccctccatcttcggttttgcacaccccgctttccagcgcggagtcgggcgggggtagggcggcgtcgcgtgcgtgacgtcatccagcggcgccatcggaggctccagtggccttgacctcccgcgtcgtgtaggcctgcgcggcgatgctgcagttcgtccgggccggggcgcgggcctggcttcggcctaccggcagccagggcctgagttccctggcggaagaggcagcgcgtgcgaccgagaacccggagcaggtggcgagcgagggtctcccggagcccgtgctgcgcaaagtcgagctcccggtacccactcatcgacgcccagtgcaggcctgggtcgagtccttgcggggcttcgagcaggagcgcgtgggcctggccgacctgcaccccgatgttttcgccaccgcgcccaggctggacatactgcaccaggttgctatgtggcagaagaacttcaagagaattagctatgccaagaccaagacgagagccgaggtgcggggcggtggcggaaagcctttggccgcagaaaggcactgggcgggcccggcatggcagcatccgctctccgctctggcgaggaggaggtgttgcccatggcccccggggcccacaagttactactacatgctgcccatgaaggtgcgggcgctgggtctcaaagtggcactgaccgtcaagctggcccaggacgacctgcacatcatggactccctagagctgcccaccggagacccacagtacctgacagagctggcgcactaccgccgctggggggactccgtactcctcgtggacttaacacacgaggagatgccacagagcatcgtggaggccacctctaggcttaagaccttcaacttgatcccggctgttggcctaaatgtgcacagcatgctcaagcaccagacgctggtcctgacgctgcccaccgtcgccttcctggaggacaagctgctctggcaggactcacgttacagacccctctaccccttcagcctgccctacagcgacttcccccgacccctaccccacgctacccagggcccagcggccaccccgtaccactgttgatgtgaagcacctcttctgagccaggccgagcccctggacgacttgggagcctcaggcccacgcccacccttcgaggaaggtgtcacctggcccccttcattccacggaggaagctgaggccacagggagcggccatcgccattgggaaggggcgactccacggagagcccagacggggcttcttgcatccattccctctttttgttttttaaaataaattgtatttttgg

SEQ ID NO: 23113 - DNA, 1286 bp, Homo Sapiens
ggcgccgcggacgctgctggagtcgcctggcaacgatgtcgcctggcaactgaataggttggccagtggcgcgggctactggaagcagaaagggctgcggaggcagtgagtggtttctgcagagcttcatttggaaaggcctctgtagttggggaaagatggcccattcccagaactccttggagcttcccattaacatcaatgccacccagattaccactgcctatggccatcgggccctgcccaagctgaaggaggagctgcagtcagaggacctccagacgaggcagaaagccctcatggccctgtgtgacctcatgcatgaccccgagtgtatctacaaggccatgaacataggctgtatggagaacctgaaagctttgctgaaggatagcaacagtatggtgcgcataaagaccaccgaggtgctccacatcacggcaagccatagcgtgggcagatacgcctttctagagcacgacatcgtccttgccctgtccttcctgctgaatgaccccagcccagtctgccgggggaacctgtacaaggcatacatgcagctggtccaggtgcctagaggggcccaagagatcatcagcaaaggtctgatttcctcactggtatggaagctgcaggtggaggtggaggaggaggagttccaggagttcatcctggacacactggtcctctgcctgcaggaggatgccaccgaggccctgggcagcaatgtggtgcttgtcctgaagcagaagctcctcagcgccaaccagaacatccgcagcaaggccgcccgtgcgctccttaatgtcagcatatctcgagagggcaagaaacaggtgtgtcattttgacgtcatccccatcctggtccatctgctgaaagacccagtggagcatgtgaagtctaacgctgccggtgccctgatgttcgccacagtgatcactgaagggaagtatgcggccctggaggcacaagccatcggcctgctcctggagctgctgcactcccccatgaccatagcgcgcctgaatgccaccaaggcccttaccatgctggcagaggcccccgagggccgcaaggccctgcagacgcacgtgcccactttccgtgccatggaggtggagacttacgaaaagcctcaagtggccgaagccttacagcgggcagcccggatcgccatcagtgtcatcgagttcaaaccctgagcccttcattcacctctgtgagtgaataaatgtgctaagtctctttaaaaaaaaaaaaaaaaaaaaaaaaaaaaaaaaaaa

SEQ ID NO: 23114 - DNA, 4933 bp, Homo Sapiens
aaatcatccgtagtgcctccccgggggacacgtagaggagagaaaagcgaccaagataaaagtggacagaagaataagcgagactttttatccatgaaacagtctcctgccctcgctccggaagagcgctaccgcagagccgggtccccaaagccggtcttgagagctgatgacaataacatgggcaatggctgctctcagaagctggcgactgctaacctcctccggttcctattgctggtcctgattccatgtatctgtgctctcgttctcttgctggtgatcctgctttcctatgttggaacattacaaaaggtctattttaaatcaaatgggagtgaacctttggtcactgatggtgaaatccaagggtccgatgttattcttacaaatacaatttataaccagagcactgtggtgtctactgcacatcccgaccaacacgttccagcctggactacggatgcttctctcccaggggaccaaagtcacaggaatacaagtgcctgtatgaacatcacccacagccagtgtcagatgctgccctaccacgccacgctgacacctctcctctcagttgtcagaaacatggaaatggaaaagttcctcaagtttttcacatatctccatcgcctcagttgctatcaacatatcatgctgtttggctgtaccctcgccttccctgagtgcatcattgatggcgatgacagtcatggactcctgccctgtaggtccttctgtgaggctgcaaaagaaggctgtgaatcagtcctggggatggtgaattactcctggccggatttcctcagatgctcccagtttagaaaccaaactgaaagcagcaatgtcagcagaatttgcttctcacctcagcaggaaaacggaaagcaattgctctgtggaaggggtgagaactttctgtgtgccagtggaatctgcatccccgggaaactgcaatgtaatggctacaacgactgtgacgactggagtgacgaggctcattgcaactgcagcgagaatctgtttcactgtcacacaggcaagtgccttaattacagccttgtgtgtgatggatatgatgactgtggggatttgagtgatgagcaaaactgtgattgcaatcccacaacagagcatcgctgcggggacgggcgctgcatcgccatggagtgggtgtgtgatggtgaccacgactgtgtggataagtccgacgaggtcaactgctcctgtcacagccagggtctggtggaatgcagaaatggacaatgtatccccagcacgtttcaatgtgatggtgacgaggactgcaaggatgggagtgatgaggagaactgcagcgtcattcagacttcatgtcaagaaggagaccaaagatgcctctacaatccctgccttgattcatgtggtggtagctctctctgtgacccgaacaacagtctgaataactgtagtcaatgtgaaccaattacattggaactctgcatgaatttgccctacaacagtacaagttatccaaattattttggccacaggactcaaaaggaagcatccatcagctgggagtcttctcttttccctgcacttgttcaaaccaactgttataaatacctcatgttcttttcttgcaccattttggtaccaaaatgtgatgtgaatacaggcgagcgtatccctccttgcagggcattgtgtgaacactctaaagaacgctgtgagtctgttcttgggattgtgggcctacagtggcctgaagacacagattgcagtcaatttccagaggaaaattcagacaatcaaacctgcctgatgcctgatgaatatgtggaagaatgctcacctagtcatttcaagtgccgctcaggacagtgtgttctggcttccagaagatgtgatggccaggccgactgtgacgatgacagtgatgaggaaaactgtggttgtaaagagagagatctttgggaatgtccatccaataaacaatgtttgaagcacacagtgatctgcgatgggttcccagactgccctgattacatggacgagaaaaactgctcattttgccaagatgatgagctggaatgtgcaaaccatgcgtgtgtgtcacgtgacctgtggtgtgatggtgaagccgactgctcagacagttcagatgaatgggactgtgtgaccctctctataaatgtgaactcctcttcctttctgatggttcacagagctgccacagaacaccatgtgtgtgcagatggctggcaggagatattgagtcagctggcctgcaagcagatgggtttaggagaaccatctgtgaccaaattgatacaggaacaggagaaagagccgcggtggctgacattacactccaactgggagagcctcaatgggaccactttacatgaacttctagtaaatgggcagtcttgtgagagcagaagtaaaatttctcttctgtgtactaaacaagactgtgggcgccgccctgctgcccgaatgaacaaaaggatccttggaggtcggacgagtcgccctggaaggtggccatggcagtgttctctgcagagtgaacccagtggacatatctgtggctgtgtcctcattgccaagaagtgggttctgacagttgcccactgcttcgaggggagagagaatgctgcagtttggaaagtggtgcttggcatcaacaatctagaccatccatcagtgttcatgcagacacgctttgtgaagaccatcatcctgcatccccgctacagtcgagcagtggtggactatgacatcagcatcgttgagctgagtgaagacatcagtgagactggctacgtccggcctgtctgcttgcccaacccggagcagtggctagagcctgacacgtactgctatatcacaggctggggccacatgggcaataaaatgccatttaagctgcaagagggagaggtccgcattatttctctggaacattgtcagtcctactttgacatgaagaccatcaccactcggatgatatgtgctggctatgagtctggcacagttgattcatgcatgggtgacagcggtgggcctcttgtttgtgagaagcctggaggacggtggacattatttggattaacttcatggggctccgtctgcttttccaaagtcctggggcctggcgtttatagtaatgtgtcatatttcgtcgaatggattaaaagacagatttacatccagacctttctcctaaactaattataaggatgatcagagacttttgccagctacactaaaagaaaatggccttcttgactgtgaagagctgcctgcagagagctgtacagaagcacttttcatggacagaaatgctcaatcgtgcactgcaaatttgcatgtttgttttggactaatttttttcaatttattttttcaccttcatttttctcttatttcaagttcaatgaaagactttacaaaagcaaacaaagcagactttgtccttttgccaggcctaaccatgactgcagcacaaaattatcgactctggcgagatttaaaatcaggtgctacagtaacaggttatggaatggtctcttttatcctatcacaaaaaaagacatagatatttaggctgattaattatctctaccagtttttgtttctcaagctcagtgcatagtggtaaatttcagtgttaacattggagacttgcttttctttttctttttttataccccacaattcttttttattacacttcgaattttagggtacacgagcacaacgtgcaggttagttacatatgtatacatgtgccatgttggtgtgctgaacccagtaactcgtcatttgatttattaaaagccaagataatttacatgtttaaagtatttactattacccccttctaatgtttgcataattctgagaactgataaaagacagcaataaaagaccagtgtcatccatttaggtagcaagacatattgaatgcaaagttctttagatatcaatattaacacttgacattattggaccccccattctggatgtatatcaagatcataattttatagaagagtctctatagaactgtcctcatagctgggtttgttcaggatatatgagttggctgattgagactgcaacaactacatctatatttatgggcaatattttgttttacttatgtggcaaagaactggatattaaactttgcaaaagagaatttagatgagagatgcaattttttaaaaagaaaattaatttgcatccctcgtttaattaaatttatttttcagttttcttgcgttcatccataccaacaaagtcataaagagcatattttagagcacagtaagactttgcatggagtaaaacattttgtaattttcctcaaaagatgtttaatatctggtttcttctcattggtaattaaaattttagaaatgatttttagctctaggccactttacgcaactcaatttctgaagcaattagtggtaaaaagtatttttccccactaaaaaactttaaaacacaaatcttcatatatacttaatttaattagtcaggcatccattttgccttttaaacaactaggattccctactaacctccaccagcaacctggactgcctcagcattccaaatagatactacctgcaattttatacatgtatttttgtatcttttctgtgtgtaaacatagttgaaattcaaaaagttgtagcaatttctatactattcatctcctgtccttcagtttgtataaacctaaggagagtgtgaaatccagcaactgaattgtggtcacgattgtatgaaagttcaagaacatatgtcagttttgttacagttgtagctacatactcaatgtatcaacttttagcctgctcaacttaggctcagtgaaatatatatattatacttattttaaataattcttaatacaaataaaatggta

SEQ ID NO: 23115 - DNA, 3803 bp, Homo Sapiens
acagtcggcgtttcgccgcctgcccgcggtgcccgcgcacgccggccgccatcgccttcgcgcctggctggcgggggcgctgtcctcccaggccgtccgcgccgctccctggagctcggcggagcgcggcagccagggccggcggaggcgcgaggagccgggcgccaccgccgccgccgccgccgccgccgcgggggccatgaccgtggagcagaacgtgctgcagcagagcgcggcgcagaagcaccagcagacgtttttgaatcaactgagagaaattacggggattaatgacacccagatactacagcaagccttgaaggatagtaatggaaacttggaattagcagtggctttccttactgcgaagaatgctaagacccctcagcaggaggagacaacttactaccaaacagcacttcctggcaatgatagatacatcagtgtgggaagccaagcagatacaaatgtgattgatctcactggagatgataaagatgatcttcagagagcaattgccttgagtttggccgaatcaaacagggcattcagggagactggaataactgatgaggaacaagccattagcagagttcttgaagccagcatagcagagaataaagcatgtttgaagaggacacctacagaagtttggagggattctcgaaacccttatgatagaaaaagacaggacaaagctcccgttgggctaaagaatgttggcaatacttgttggtttagtgctgttattcagtcattatttaatcttttggaatttagaagattagttctgaattacaagcctccatcaaatgctcaagatttaccccgaaaccaaaaggaacatcggaatttgccttttatgcgtgagctgaggtatctatttgcacttcttgttggtaccaaaaggaagtatgttgatccatcaagagcagttgaaattcttaaggatgctttcaaatcaaatgactcacagcagcaagatgtgagtgagtttacacacaaattattagattggttagaagatgccttccaaatgaaagctgaagaggagacggatgaagagaagccaaagaaccccatggtagagttgttctatggcagattcctggctgtgggagtacttgaaggtaaaaaatttgaaaacactgaaatgtttggtcagtacccacttcaggtcaatgggttcaaagatctgcatgagtgcctagaagctgcaatgattgaaggagaaattgagtctttacattcagagaattcaggaaaatcaggccaagagcattggtttactgaattaccacctgtgttaacatttgaattgtcaagatttgaatttaatcaggcattgggaagaccagaaaaaattcacaacaaattagaatttccccaagttttatatttggacagatacatgcacagaaacagagaaataacaagaattaagagggaagagatcaagagactgaaagattacctcacggtattacaacaaaggctagaaagatatttaagctatggttccggtcccaaacgattccccttggtagatgttcttcagtatgcattggaatttgcctcaagtaaacctgtttgcacttctcctgttgacgatattgacgctagttccccacctagtggttccataccatcacagacattaccaagcacaacagaacaacagggagccctatcttcagaactgccaagcacatcaccttcatcagttgctgccatttcatcgagatcagtaatacacaaaccatttactcagtcccggatacctccagatttgcccatgcatccggcaccaaggcacataacggaggaagaactttctgtgctggaaagttgtttacatcgctggaggacagaaatagaaaatgacaccagagatttgcaggaaagcatatccagaatccatcgaacaattgaattaatgtactctgacaaatctatgatacaagttccttatcgattacatgccgttttagttcacgaaggccaagctaatgctgggcactactgggcatatatttttgatcatcgtgaaagcagatggatgaagtacaatgatattgctgtgacaaaatcatcatgggaagagctagtgagggactcttttggtggttatagaaatgccagtgcatactgtttaatgtacataaatgataaggcacagttcctaatacaagaggagtttaataaagaaactgggcagccccttgttggtatagaaacattaccaccggatttgagagattttgttgaggaagacaaccaacgatttgaaaaagaactagaagaatgggatgcacaacttgcccagaaagctttgcaggaaaagcttttagcgtctcagaaattgagagagtcagagacttctgtgacaacagcacaagcagcaggagacccagaatatctagagcagccatcaagaagtgatttctcaaagcacttgaaagaagaaactattcaaataattaccaaggcatcacatgagcatgaagataaaagtcctgaaacagttttgcagtcggcaattaagttggaatatgcaaggttggttaagttggcccaagaagacaccccaccagaaaccgattatcgtttacatcatgtagtggtctactttatccagaaccaggcaccaaagaaaattattgagaaaacattactagaacaatttggagatagaaatttgagttttgatgaaaggtgtcacaacataatgaaagttgctcaagccaaactggaaatgataaaacctgaagaagtaaacttggaggaatatgaggagtggcatcaggattataggaaattcagggaaacaactatgtatctcataattgggctagaaaattttcaaagagaaagttatatagattccttgctgttcctcatctgtgcttatcagaataacaaagaactcttgtctaaaggcttatacagaggacatgatgaagaattgatatcacattatagaagagaatgtttgctaaaattaaatgagcaagccgcagaactcttcgaatctggagaggatcgagaagtaaacaatggtttgattatcatgaatgagtttattgtcccatttttgccattattactggtggatgaaatggaagaaaaggatatactagctgtagaagatatgagaaatcgatggtgttcctaccttggtcaagaaatggaaccacacctccaagaaaagctgacagattttttgccaaaactgcttgattgttctatggagattaaaagtttccatgagccaccgaagttaccttcatattccacgcatgaactctgtgagcgatttgcccgaatcatgttgtccctcagtcgaactcctgctgatggaagataaactgcacactttccctgaacacactgtataaactctttttagttcttaacccttgccttcctgtcacagggtttgcttgttgctgctatagtttttaacttttttttattttaataactgcaaaagacaaaatgactatacagactttagtcagactgcagacaataaagctgaaaatcgcatggcgctcagacattttaaccggaactgatgtataatcacaaatctaattgattttattatggcaaaactatgcttttgccaccttcctgttgcagtattactttgcttttatcttttctttctcaacagctttccattcagtctggatccttccatgactacagccatttaagtgttcagcactgtgtacgatacataatatttggtagcttgtaaatgaaataaagaataaagttttatttatggctaccta

SEQ ID NO: 23116 - DNA, 4095 bp, Homo Sapiens
atggagacgcaactgcagagcattttcgaagaggtggtgaaaacggaagttatagaagaggcttttcctggcatgtttatggatactcctgaagatgagaaaacaaaactaattagctgtttgggggccttcagacagttttggggtggactttctcaggagtctcatgaacagtgtatccagtggattgttaagtttattcatggtcagcatagtcctaaaagaatttcttttctttatgactgcttagcaatggcagttgagactggtctccttccacccaggctggtttgtgaatccctgataaactctgacactcttgagtgggaaagaacacagctttgggccttaacatttaaactggttcggaaaataattgggggagtggattacaagggtgttcgagatctcttaaaagtgattttggagaagattttgacaattcctaatacagtgagctctgctgttgtacagcagcttctggcagcaagagaggttatagcatatatcttggaaagaaatgcctgcttattaccagcctattttgcagtcactgagatcaggaaactgtatcctgaaggcaaacttccacactggttacttggaaacctagtatcagacgttgtggataccttcaggcccacagcaaggataaactccatttgtggtcgctgtagtcttctgccagaagtaaataattcgggtgccatttgtaattcatggaaactggatcctgctactcttcgttttcctttgaaaggccttttgccatatgataaggatctgtttgaaccacagactgctttgttgagatatgtattggagcagccttattccagggatatggtctgcaatatgctaggtttaaataagcagcacaagcagcgctgccctgtgctggaggaccagttggtggatctggttgtttatgccatggagcgatctgagaccgaggagaagtttgacgatgggggaacaagccaactcctgtggcagcatctctcaagtcagctcattttctttgtgcttttccagtttgcaagttttccacatatggtgctttctcttcatcagaagttagcagggcgaggactgattaaaggcagagatcatcttatgtgggttctcctgcaattcatttctggaagtattcagaaaaatgcactagctgattttctccctgtgatgaagctcttcgacttgctatacccagaaaaagaatatatcccagttcctgatattaacaaaccccagtcaacccatgcctttgcaatgacctgtatttggattcatctcaatagaaaagctcaaaatgacaactccaagctacagattccaatacctcattccctaagacttcaccatgagttcctgcagcagagtctaagacataaaagtttacagatgaatgactataagattgctctattgtgtaatgcatactctacaaattcagaatgtgttacattacccatgggagctctggtagaaactatttatggaaatggaattatgagactacctctccctggaacaaactgtatggcttcagcatctattacccccttacctatgaacctcctggattcactgacagttcatgccaaaatgagccttattcacagcattgcaaccagggtgataaaacttgctcatgcaaagtccagtgtggccttggctccagccctagtggaaacttacagtcgtttattggtctatatggaaatagagtctttgggcatcaaaggatttatcagtcagcttttgccaactgtgttcaaatcacatgcatgggggatcttacacacactccttgagatgtttagctaccggatgcatcatattcagcctcattacagagttcagctcctgagtcatcttcatactttggctgcagttgcacaaacaaaccagaaccagctccatctttgtgtcgagagcactgctctcaggcttataacagcattaggtagctcagaggtacaaccgcagtttacacgcttccttagtgatcccaaaacagtgctctcagcagaatctgaagaactgaaccgagccttgatattgaccttggctagagcaactcatgtaacagatttttttacaggctctgattcaattcagggaacttggtgtaaagacatacttcagaccatcatgagtttcactcctcataattgggcttcacacaccctgagctgttttccaggcccactacaggcattcttcaaacaaaataatgtgcctcaggaaagccgttttaatctgaaaaaaaatgtggaggaggagtataggaagtggaagtcaatgagcaacgaaaacgacattattacccacttctctatgcagggctcccctcctctctttctttgtcttctctggaaaatgctcttggaaacagatcatattaatcagattggctatagagtattagagagaattggagccagggccttggtagcccatgtgaggacatttgcagatttcctggtatatgagttttctacatcagcagggggtcagcaactcaataaatgcattgaaattcttaatgacatggtatggaagtataacattgttacactggacagattaattctctgcctggccatgcgtagtcacgaaggaaatgaagcccaggtttgttatttcataattcagttgctgttactcaaaccaaacgattttagaaatcgagtaagtgactttgtgaaggaaaattccccagagcactggttacagaatgactggcacaccaagcacatgaattatcacaagaaatatccagagaagttgtattttgagggcctcgcggaacaggtggatcctcctgtacagatccagtctccctatctgcccatctattttgggaatgtgtgtcttcgattccttccagtatttgatatagtaatccacagatttttagagttgcttccggtatccaaatcactggagactctactggatcatctaggaggcttatataaatttcatgatcgtccagtgacttatctgtataacactctgcactattatgaaatgcacctgagagaccgcgcatttctcaaacgaaaactcgtccatgcgatcattggctctctgaaggataatcgaccgcagggctggtgtctaagtgacacttacctgaaatgcgctatgaatgcacgagaggaaaatccttgggttccagatgacacctactattgcagattgattggcagactagtcgatacgatggctggcaaatctcctggtccctttccaaactgtgactggagattcaatgagtttcccaacccagctgcccatgctctccatgttacttgtgtggagctcatggccttggcagtttcaggcaaagaagttgggaatgcccttctaaatgttgtcctaaaaagtcagcctttagtgccaagagagaacattacagcatggatgaatgcaattggtttgatcatcactgccctaccagagccatattggattgttcttcatgatcgaattgtgagtgtcatcagcagccccagcttgacgtctgaaacagagtgggttggctatccattccgcctctttgatttcactgcctgtcatcagtcctactctgagatgagttgtagctatacgttagctcttgcacatgctgtgtggcaccattctagcatcggacaactttctctcattccaaagtttcttactgaagtacttcttcctatagtgaagaccgaattccagttgctttatgtataccatcttgttggaccatttttacaaagatttcagcaagagagaactcgttgtatgatagagattggtgtggcgttttatgacatgctgctgaatgttgaccagtgtagcacccatttaaattacatggatcccatctgtgacttcctctatcacatgaagtatatgtttactggtgacagcgtgaaagagcaagtagagaagattatctgtaacttaaaaccagctttaaaacttcgtcttcgattcatcacacacattagcaagatggagccagctgcagtgcctccacaagccatgaacagtgggtctccagcacctcagtctaatcaggttgacactctcacctga

SEQ ID NO: 23117 - DNA, 1200 bp, Homo Sapiens
ggtagactcgggtggccgaggggcttcataccagctgaagagcgacaagccgctggcagccgcggatctcaccgccgctcagggtttttagaacttcagccataaaaatgggcagaattttccttgatcatatcggtggtacccgtctgttttcttgtgcaaactgtgatacgatcctgaccaaccgctcagaactcatctccactcgtttcacaggcgccactggcagagcatttctttttaacaaggtagttaacctgcagtacagcgaagttcaagatcgggtcatgctcactggccgccacatggttcgagatgtgagctgcaaaaactgcaatagcaaactgggatggatctatgagtttgccactgaagacagccagcgatataaggaaggccgcgtgatcctggaacgtgctctagttcgagagagtgagggctttgaggagcatgtaccatctgataactcttgaagatacagagagaaatccatcttttcccaggtctccttcactgaaaacaaaaatctacttacatacactgtcaccttagcatcagagtcggattaatgaactgcggaacaagaggttgtgagaatctaagatggaacctttctttctttctttctttttttttaaattttgtattttccatccaacagcagtgtgtagagagaatattatgcagatgccgttaattttttaccctatgtttacatcttgaggcagcagagtctgtctgcagctatgtggtgagctatgtaaggaaaaaaatctgggctgttagagtgaaaaagtgtgttttatgtcaattgtgaaaggaaaatgttaggagtatggtttttaaacttgggcttcattttaaacttttttttttaaacccagttatttcacttgatttgctagcttcagagaagagatccgaatctgtgcccagcgctaaaggctcagtgttagcatggcttgtgctggccggtgtgccatattcttgttggagatgaaccgtagcaccagagcccattcttccttgtcagtcttggcccaaagatgtcaccattcctagttatttgtcaccacataattggtgttgattggaaactttttctgagatgggacagaactgctgggttgtctttttccatgtaacttaagcatagtaatataaataaagtaatagttggaaaaaaaaaaaaaaaaaaaa

SEQ ID NO: 23118 - DNA, 1430 bp, Homo Sapiens
caacacttttcttgtttgtaaacgcgagtgaccagaaagtgtgaatgcggagtaggaatatttttcgtgttctcttttatctgcttgccttttttagagagtagcagtggttcctatttcggaaaaggacgttctaattcaaagctctctcccaatatatttacacgaatacgcatttagaaagggaggcagcttttgaggttgcaatcctactgagaaggatggaagaaggagccaggcaccgaaacaacaccgaaaagaaacacccaggtgggggcgagtcggacgccagccccgaggctggttccggagggggcggagtagccctgaagaaagagatcggattggtcagtgcctgtggtatcatcgtagggaacatcatcggctctggaatctttgtctcgccaaagggagtgctggagaatgctggttctgtgggccttgctctcatcgtctggattgtgacgggcttcatcacagttgtgggagccctctgctatgctgaactcggggtcaccatccccaaatctggaggtgactactcctatgtcaaggacatcttcggaggactggctgggttcctgaggctgtggattgctgtgctggtgatctaccccaccaaccaggctgtcatcgccctcaccttctccaactacgtgctgcagccgctcttccccacctgcttccccccagagtctggccttcggctcctggctgccatctgcttattgctcctcacatgggtcaactgttccagtgtgcggtgggccacccgggttcaagacatcttcacagctgggaagctcctggccttggccctgattatcatcatggggattgtacagatatgcaaaggagagtacttctggctggagccaaagaatgcatttgagaatttccaggaacctgacatcggcctcgtcgcactggctttccttcagggctcctttgcctatggaggctggaactttctgaattacgtgactgaggagcttgttgatccctacaagaaccttcccagagccatcttcatctccatcccactggtcacatttgtgtatgtctttgccaatgtcgcttatgtcactgcaatgtccccccaggagctgctggcatccaacgccgtcgctgtgacttttggagagaagctcctaggagtcatggcctggatcatgcccatttctgttgccctgtccacatttggaggagttaatgggtctctcttcacctcctctcggctgttcttcgctggagcccgagagggccaccttcccagtgtgttggccatgatccacgtgaagcgctgcaccccaatcccagccctgctcttcacatgcatctccaccctgctgatgctggtcaccagcgacatgtacacactcatcaactacgtgggcttcatcaactacctcttctatggggtcacggtt

SEQ ID NO: 23119 - DNA, 4064 bp, Homo Sapiens
atgcccgggccccgaggggctgctggcggcctggcccctgagatgcgcggggcgggggcggcggggctgctggcgctgctgctgctgctgctgctgctgctgctgggcctgggcggcagggtcgagggggggccggccggcgagcggggcgcaggcgggggcggggcgctggcccgcgagcgcttcaaggtggtctttgcgccggtgatctgcaagcggacctgtctcaagggccagtgtcgggacagttgtcagcagggctccaacatgacgctcatcggagagaacggccacagcacagacacgctcacgggctccggcttccgcgtggtggtgtgccctctcccctgcatgaatggcggccagtgctcctcgcgaaaccagtgcctgtgtcccccggacttcactgggcgcttctgccaggtgcccgcaggaggagccggtgggggtaccggcggctcaggccccggcctgagcaggacaggggccctgtccacaggggcgctgccgcccctggctccggagggcgactctgtggccagcaagcacgccatctacgccgtccaggtgatcgctgaccctcctgggcccggggaggggcctcctgcccagcacgcagccttcctggtgcccctaggcccgggacagatctcagcagaagtgcaggccccgccccccgtggtgaatgtgcgcgtccatcacccgcccgaggcctcagtccaggtgcaccgcattgagagctcgaacgccgagagcgcagccccctcccagcacctgctgccgcaccccaagccctcgcacccccggccgcccacccagaagcccctgggccgctgctttcaggacactctgcccaagcagccgtgtggcagcaaccccctccccggcctcaccaagcaggaagactgctgcggtagcatcggcactgcctggggccagagcaagtgccacaagtgtccccagctgcagtacacaggagtgcagaagccagggcctgtacgtggggaagtgggcgctgactgtccccagggctacaagaggcttaacagcacccactgccaggacatcaacgagtgcgcaatgccgggcgtgtgtcgccatggtgactgcctcaacaaccctggctcctatcgctgtgtctgcccacctggccatagtttaggcccctcccgtacacagtgcattgcagacaaaccggaggagaagagcctgtgtttccgcctggtgagccctgagcaccagtgccagcacccactgaccacccgcctgacccgccagctctgctgctgcagtgtcggcaaggcctggggcgcgcggtgtcagcgctgcccaacagatggcaccgctgcgttcaaggagatctgcccagctgggaagggataccacattctcacctcccaccagacgctcaccattcagggcgagagtgacttttcccttttcctgcaccctgacgggccacccaagccccagcagcttccggagagccctagccaggctccaccacctgaggacacagaggaagagagaggggtgaccacggactcaccggtgagtgaggagaggtcagtgcagcagagccacccaactgccaccacgactcctgcccggccctaccccgagctgatctcccgtccctcgcccccgaccatgcgctggttcctgccggacttgcctccttcccgcagcgccgtagagatcgctcccactcaggtcacagagactgatgagtgccgactgaaccagaacatctgtggccacggagagtgcgtgccgggcccccctgactactcctgccactgcaaccccggctaccggtcacatccccagcaccgctactgcgtggatgtgaacgagtgcgaggcagagccctgtggcccggggaggggcatctgcatgaacaccggcggctcctacaattgccactgcaaccgcggctaccgcctgcacgtgggcgccggggggcgctcgtgcgtggacctgaacgaatgcgccaagccccacctgtgcggcgacggcggcttctgcatcaactttcccggtcactacaagtgcaactgctaccccggctaccggctcaaagcctcccggcctcctgtgtgcgaagacatcgacgagtgccgggacccaagctcttgcccggatggcaaatgcgagaacaagcccgggagcttcaagtgcatcgcctgtcagcctggctaccgcagccaggggggcggggcctgtcgcgacgtgaacgagtgcgccgagggcagcccctgctcgcctggctggtgcgagaacctcccgggctccttccgctgcacctgtgcccagggctacgcgcccgcgcccgacggccgcagttgcttggatgtggacgagtgtgaggctggggacgtgtgtgacaatggcatctgcagcaacacgccaggatctttccagtgtcagtgcctctctggctaccatctgtccagggaccggagccactgcgaggacattgatgagtgtgacttccctgcagcctgcattgggggtgactgcatcaataccaatggctcctacagatgtctttgcccccaggggcatcggctggtgggtggcaggaaatgccaagacatagatgagtgcagccaggacccgagcctgtgccttccccatggggcctgcaagaaccttcagggctcctatgtgtgtgtctgcgatgagggcttcactcccacccaggaccagcacggttgtgaggaggtggagcagccccaccacaagaaggagtgctacctgaacttcgatgacacagtgttctgcgacagcgtattggccaccaacgtgacccagcaggagtgctgctgctctctgggggccggctggggcgaccactgcgaaatctacccctgcccagtctacagctcagccgagttccacagcctctgcccagacggaaagggctacacccaggacaacaacatcgtcaactacggcatcccagcccaccgtgacatcgacgagtgcatgttgttcgggtcggagatttgcaaggagggcaagtgcgtgaacacgcagcctggctacgagtgctactgcaagcagggcttctactacgacgggaacctgctggaatgcgtggacgtggacgagtgcctggacgagtccaactgccggaacggagtgtgtgagaacacgcgcggcggctaccgctgtgcctgcacgccccctgccgagtacagtcccgcgcagcgccagtgcctgagcccggaagagatggagcgtgccccggagcggcgcgacgtgtgctggagccagcgcggagaggacggcatgtgcgctggccccctggccgggcctgccctcaccttcgacgactgctgctgccgccagggccgcggctggggcgcccaatgccgaccgtgcccgccgcgcggcgcggggtcccattgcccgacatcgcagagcgagagcaattccttctgggacacaagccccctgctgttggggaagcccccaagagatgaggacagttcagaggaggattcagacgagtgtcgctgcgtgagtggccgctgcgtgccgcggccgggcggcgccgtgtgcgagtgtcccggcggcttccagctcgacgcctcccgcgcccgctgcgtggatatcgacgagtgccgagagctgaaccagcgcgggctgctgtgcaagagcgagcgctgcgtgaacaccagcggctccttccgctgcgtctgcaaagccggcttcgcgcgcagccgcccgcacggggcctgcgttccccagcgccgccgctgacgccgccgacgccgccctcggcccagacctcggtgatcactgagggatttccgcgagctcggcctcacttctgccccgacttgtggctcggacccagggaccttcagggcccgcagaccctcccggcgccttgagacccgaggcgcccctaccggcccccctccccggttagcgggcggttgtaaggtctccggcgggcgctgcctgccttcctcccagagggtgtttcctagaaactgataaatcagatcgtgcctctttacccttggctttcgaaaaaaaaaaaaaaaaaa

SEQ ID NO: 23120 - DNA, 2012 bp, Homo Sapiens
ggcacgaggggccccgctggccgcgggctcggtacccggtgggtcggtggagcgtctgttgggtccgggccgccggcttcgccctcgccatggcgccctggctgcagctcctgtcgctgctggggctgctcccgggcgcagtggccgcccccgcccagccccgagccgccagctttcaggcctgggggccgccgtccccggagctgctggcgcccacccgcttcgcgctggagatgttcaaccgcggccgggctgcggggacgcgggccgtgctgggccttgtgcgcggccgcgtccgccgggcgggtcaggggtcgctgtactccctggaggccaccctggaggagccaccctgcaacgaccccatggtgtgccggctccccgtgtccaagaaaaccctgctctgcagcttccaagtcctggatgagctcggaagacacgtgctgctgcggaaggactgtggcccagtggacaccaaggttccaggtgctggggagcccaagtcagccttcactcagggctcagccatgatttcttctctgtcccaaaaccatccagacaacagaaacgagactttcagctcagtcatttccctgttgaatgaggatcccctgtcccaggacttgcctgtgaagatggcttcaatcttcaagaactttgtcattacctataaccggacatatgagtcaaaggaagaagcccggtggcgcctgtccgtctttgtcaataacatggtgcgagcacagaagatccaggccctggaccgtggcacagctcagtatggagtcaccaagttcagtgatctcacagaggaggagttccgcactatctacctgaatactctcctgaggaaagagcctggcaacaagatgaagcaagccaagtctgtgggtgacctcgccccacctgaatgggactggaggagtaagggggctgtcacaaaagtcaaagaccagggcatgtgtggctcctgctgggccttctcagtcacaggcaatgtgaagggccagtggtttctcaaccaggggaccctgctctccctctctgaacaggagctcttggactgtgacaagatggacaaggcctgcatgggcggcttgccctccaatgcctactcggccataaagaatttgggagggctggagacagaggatgactacagctaccagggtcacatgcagtcctgcaacttctcagcagagaaggccaaggtctacatcaatgactccgtggagctgagccagaacgagcagaagctggcagcctggctggccaagagaggcccaatctccgtggccatcaatgcctttggcatgcagttttaccgccacgggatctcccgccctctccggcccctctgcagcccttggctcattgaccatgcggtgttgcttgtgggctacggcaaccgctctgacgttcccttttgggccatcaagaacagctggggcactgactggggtgagaagggttactactacttgcatcgtgggtccggggcctgtggcgtgaacaccatggccagctcggcggtggtggactgaagaggggcccccagctcgggacctggtgctgatcagagtggctgctgccccagcctgacatgtgtccaggcccctccccgggaggtacagctggcagagggaaaggcactgggtacctcagggtgagcagagggcactgggctggggcacagcccctgcttccctgcaccccattcccaccctgaagttctgcacctgcacctttgttgaattgtggtagcttaggaggatgtcggggtgaagggtggtatcttggcagttgaagctggggcaagaactctgggcttgggtaatgagcaggaagaaaattttctgatcttaagcccagctctgttctgcccccgctttcctctgtttgatactataaattttctggttcccttggatttagggatagtgtccctctccatgtccaggaaacttgtaaccacccttttctaacagcaataaagaggtgtccttgtcccg

SEQ ID NO: 23121 - DNA, 2055 bp, Homo Sapiens
atgagttctgaatgtgatggtggttccaaagctgttatgaatggcttggcatctggcagcaatgggcaagacaaagacatggatcctacaaaaatctgcactgggaagggagcggtgactctccgggcctcgtcttcctacagggaaaccccaagcagtagccctgcgagccctcaggaaacccggcaacacgaaagcaaaccaggtgaatggaaactttcttccagtgctgatgccaatggaaatgcccagccctcttcactcgctgtcaagggctctagaagtgtgcatcccaaccttccttctgacaagtcccaggattccagtcctctactaaatgaagtttcttcttcccttattggaactgattcccaagccttttcatcagaatgcaagccttcatccgcctatccctccacaacgattgtcaatcctacaattgtgctcttgcaacacaatcgagaacagcaaaaacgactcagtagcctttcagatcctgtctcagaaagaagagtgggagagcaggactcagcaccaacccaggaaaaacccacctcacctggcaaggctattgaaaaaagagcaaaggatgacagtaggcgggtggtgaagagcactcaggacttaagcgatgtttccatggatgaagtgggcatcccactccggaacactgagagatcaaaagactggtacaagactatgtttaaacagatccacaaactgaacagagatgatgattcagatctgtactctcccagatactcattttccgaagacacaaaatctcccctttctgtgcctcgctcaaaaagtgagatgagctacattgacggtgtgaaggtagtcaagaggtcggccacactacccctcccagcccgctcttcctcactgaagtcaagctcagaaagaaatgactgggaacccccagataagaaagtagatacaagaaaatatcgtgcagagcccaagagcatttacgaatatcagcctggcaagtcttccgttctgaccaacgaaaagatgagctcagccatcagccctactccgggaatttcttcagagactcctggatatatatattcttccaacttccacgcagtgaagagggaatcagacggggctcctggggatctcactagcttggagaatgagagccaaatttataaaagtgtcttggaaggtggtgtcatccctcttcaggacctgagtgggctcaagcgaccatccagctctgcttccactaaaaattcagaatcgccaagacattttataccagctgattacttggaatccacggaagaatttattcgaagacgtcatgatgataaagagatgagacctgccagagccaaatttgactttaaagctcagacactaaaggagcttcctctgcagaagggagatattgtttacatttataagcaaattgatcagaactggtatgaaggagaacaccacggccgggtgggaatcttcccacgcacctacatcgagcttcttcctcctgctgagaaggcacagcccaaaaagttgacaccagtgcaggttttggaatatggagaagctattgctaagtttaactttaatggtgatacacaagtagaaatgtccttcagaaagggtgagaggatcacactgctccggcaggtagatgagaactggtacgaagggaggatcccggggacatcccgacaaggcatcttccccatcacctacgtggatgtgatcaagcgaccactggtgaaaaaccctgtggattacatggacctgcctttctcctcctccccaagtcgcagtgccactgcaagcccacagcaacctcaagcccagcagcgaagagtcacccccgacaggagtcaaacctcacaagatttatttagctatcaagcattatatagctatataccacagaatgatgatgagttggaactccgcgatggagatatcgttgatgtcatggaaaaatgtgacgatggatggtttgttggtacttcaagaaggacaaagcagtttggtacttttccaggcaactatgtaaaacctttgtatctataa

SEQ ID NO: 23122 - DNA, 2416 bp, Homo Sapiens
ccctaaatcaacacatattcctaggatgtgggaacatatgcaatacttaaatgcacaggctctgggttcagactccctagggttaaattctccctgtgccggctagctgcatgattagatttgtgatcttgacaaagttacctaacgtctctgggcctcacttttctcatctgcaaaatagggaaaatagcaacacttctccataggggtgtggtgaggataaagagtagatgtaaataaagtgttgaatgtagagcctggcacatatcaagctcttaaaaagcaatggccattttgttatttttaccgcaacgacaactgcagttattatctggcttcagagctctctttttaaaaacagtattccctggttttacacccaggtgctaatactattctatgaagctaatgtatagagaccatatctttttaacaaacgtgtatatatgagtcatttccggcacatttgatacacatcatctcgtttggtccttaaaacaagcctaggccataagcagggtacgtgttaccactttgccattcctgttttacagaggcttagacacattgagaagcttttccatagtcacttaacaagtgatgggtgaagccaaatcaagcctttagatctccaagctctttccattaaaccatataaatcacgggttggcaaactttttctgcaaaggggacagatagtaaatagtttaagccttatgggccacatgctgtgtctgtttcatattctgctccttttttatttttattttttttaagaaaagacaccctttaaacatataaaaaccattctgagcaacaggctggtgctaaaaacaggtcatggtaaccattggctctagggttgtagtttactgttgatatagattgtacactgataagccaaaatacaaacctaatgaaactgacatacttaaggaactttactctttgttagcaatcattgttaatatttattgaatggtgactacgtgggaaatgctgttccaagtgtgatagatatattaacttacttaatcctcacacccactctaatttcctaagtactattgtcagactcattttacagacaggaaaagcaaggcatagagaaggtaagtaacttttccgaggtcacatggctattaagtagcagagctgtgattcaaatataagcggtttggcaccagatcctgtgcacttaaccgcttgcatctcggttgggagcactgactggttcagctattgggagggaagaaaggggatggggaagccacataacccctaggagattctgtaataaatatgcttcagagccattcaccttgaagctgaggaggcatggaagcaggccacctgtgttctgtacagcatcaccaggctggaaatctgccatggctttccttcacgccatcacaagaggatacagatgaggctgcagaggcatcttgatttgagaaaagcatttgactggatctcattaaattttaatcattaactgaattcaaaataaattgaaaactggttgacagagcaccaacaaagggtgatgataaatggtgatgcatctagaggggagctatcttccaggggacaactctaaggcaaggacggatgggatttaatgaaggtgttatgtccccagaagaagacaaatagcacagcaaggaacagaggaaggacaggagtgagcagcctgagtaattaataaaccatattaacagctcctccataatcaggccttggtgatcacaactgcttggattttttcttaagctttctttgagtcaggaataggtttgaagcgtcctagagacacacagcatgaatatttcaggtggacattaaaaagaaatctataaatttacagctgggaggatcctgagatctacttcggatcagaaactttcaattacaagattcccaaggccttacttcattccccagagagtaatctttttaataaatgtccaaaagtcatggatttaaaaaaaaatctttaaactcattaatgtcctttgtttcctgcccaaatgcatgcaaactttcataacactggtttgctgagtggaaggttggttttgagtgaactgtttggctcagattcaaactccaatgaacaaatacttccaagtttacttgctgaatttcccatacagagaagttcttccactgggcttgccagaggatttgaaacagtggtgagccctggaaggaagggaatatttactggcccttggacataaacccagcacagtaagactcacatcaggctgaaggcagtgcagtatgaaccgacctgatttgaggaagtttgctctgggactcctctgagctactaaatgaggaggagaaggactaatgggaacacactgactccatcacattagaagttataataaacatttagagaacaacc

SEQ ID NO: 23123 - DNA, 1589 bp, Homo Sapiens
gtctcttcctcgctccctctctttctctcctccctctgccttcccagtgcataaagtctctgtcgctcccggaacttgttggcaatgcctattttttggctttcccccgcgttctctaaactaactatttaaaggtctgcggtcgcaaatggtttgactaaacgtaggatgggacttaagttgaacggcagatatatttcactgatcctcgcggtgcaaatagcgtatctggtgcaggccgtgagagcagcgggcaagtgcgatgcggtcttcaagggcttttcggactgtttgctcaagctgggcgacagcatggccaactacccgcagggcctggacgacaagacgaacatcaagaccgtgtgcacatactgggaggatttccacagctgcacggtcacagcccttacggattgccaggaaggggcgaaagatatgtgggataaactgagaaaagaatccaaaaacctcaacatccaaggcagcttattcgaactctgcggcagcggcaacggggcggcggggtccctgctcccggcgttcccggtgctcctggtgtctctctcggcagctttagcgacctggctttccttctgagcgtggggccagctccccccgcgcgcccacccacactcactccatgctcccggaaatcgagaggaagatccattagttctttggggacgttgtgattctctgtgatgctgaaaacactcatataggattgtgggaaatcctgattctcttttttatttcgtttgatttcttgtgttttatttgccaaatgttaccaatcagtgagcaagcaagcacagccaaaatcggacctcagctttagtccgtcttcacacacaaataagaaaacggcaaacccaccccattttttaattttattattattaattttttttgttggcaaaagaatctcaggaacggccctgggccacctactatattaatcatgctagtaacatgaaaaatgatgggctcctcctaataggaaggcgaggagaggagaaggccaggggaatgaattcaagagagatgtccacggccgaaacatacggtgaataattcacgctcacgtcgttcttccacagtatcttgttttgatcatttccactgcacatttctcctcaagaaaagcgaaaggacagactgttggctttgtgtttggaggataggagggagagagggaaggggctgaggaaatctctggggtaagagtaaaggcttccagaagacatgctgctatggtcactgaggggttagctttatctgctgttgttgatgcatccgtccaagttcactgcctttattttccctcctccctcttgttttagctgttacacacacagtaatacctgaatatccaacggtatagatcacaagggggggatgttaaatgttaatctaaaatatagctaaaaaaagattttgacataaaagagccttgattttaaaaaaaaaagagagagagatgtaatttaaaaagtttattataaattaaattcagcaaaaaaagatttgctacaaagtatagagaagtataaaataaaagttattgtttgaaaaaaaaaaaaaaaaaa

SEQ ID NO: 23124 - DNA, 3983 bp, Homo Sapiens
ggcacgaggccgcgccgaggaggctgccgctctggcttgccagtcccccgccgccgctgcacaccggacccagccgccgtgccgcgggccatggacctgcccaggggcctggtggtggcctgggcgctcagcctgtggccagggttcacggacaccttcaacatggacaccaggaagccccgggtcatccctggctccaggaccgccttctttggctacacagtgcagcagcacgacatcagtggcaataagtggctggtcgtgggcgccccactggaaaccaatggctaccagaagacgggagacgtgtacaagtgtccagtgatccacgggaactgcaccaaactcaacctgggaagggtcaccctgtccaacgtgtccgagcggaaagacaacatgcgcctcggccttagtctcgccaccaaccccaaggacaacagcttcctggcctgcagccccctctggtctcatgagtgtgggagctcctactacaccacagggatgtgttcaagagtcaactccaacttcaggttctccaagaccgtggccccagctctccaaaggtgccagacctacatggacatcgtcattgtcctggatggctccaacagcatctacccctgggtggaggttcagcacttcctcatcaacatcctgaaaaagttttacattggcccagggcagatccaggttggagttgtgcagtatggcgaagatgtggtgcatgagtttcacctcaacgactacaggtctgtaaaagatgtggtggaagctgccagccacattgagcagagaggaggaacagagacccggacggcatttggcattgaatttgcacgctcagaggctttccagaagggtggaaggaaaggagccaagaaggtgatgattgtcatcacagatggggagtcccacgacagcccagacctggagaaggtgatccagcaaagcgaaagagacaacgtaacaagatatgcggtggccgtcctgggctactacaaccgcagggggatcaatccagaaacttttctaaatgaaatcaaatacatcgccagtgaccctgatgacaagcacttcttcaatgtcactgatgaggctgccttgaaggacattgtcgatgccctgggggacagaatcttcagcctggaaggcaccaacaagaacgagacctcctttgggctggagatgtcacagacgggcttttcctcgcacgtggtggaggatggggttctgctgggagccgtcggtgcctatgactggaatggagctgtgctaaaggagacgagtgccgggaaggtcattcctctccgcgagtcctacctgaaagagttccccgaggagctcaagaaccatggtgcatacctggggtacacagtcacatcggtcgtgtcctccaggcaggggcgagtgtacgtggccggagccccccggttcaaccacacgggcaaggtcatcctgttcaccatgcacaacaaccggagcctcaccatccaccaggctatgcggggccagcagataggctcttactttgggagtgaaatcacctcggtggacatcgacggcgacggcgtgactgatgtcctgctggtgggcgcacccatgtacttcaacgagggccgtgagcgaggcaaggtgtacgtctatgagctgagacagaaccggtttgtttataacggaacgctaaaggattcacacagttaccagaatgcccgatttgggtcctccattgcctcagttcgagacctcaaccaggattcctacaatgacgtggtggtgggagcccccctggaggacaaccacgcaggagccatctacatcttccacggcttccgaggcagcatcctgaagacacctaagcagagaatcacagcctcagagctggctaccggcctccagtattttggctgcagcatccacgggcaattggacctcaatgaggatgggctcatcgacctggcagtgggagcccttggcaacgctgtgattctgtggtcccgcccagtggttcagatcaatgccagcctccactttgagccatccaagatcaacatcttccacagagactgcaagcgcagtggcagggatgccacctgcctggccgccttcctctgcttcacgcccatcttcctggcaccccatttccaaacaacaactgttggcatcagatacaacgccaccatggatgagaggcggtatacaccgagggcccacctggacgagggcggggaccgattcaccaacagagccgtactgctctcctccggccaggagctctgtgagcggatcaacttccatgtcctggacactgctgactacgtgaagccagtgaccttctcagtcgagtattccctggaggaccctgaccatggccccatgctggacgacggctggcccaccactctcagagtctcggtgcccttctggaacggctgcaatgaggatgagcactgtgtccctgaccttgtgttggatgcccggagtgacctgcccacggccatggagtactgccagagggtgctgaggaagcctgcgcaggactgctccgcatacacgctgtccttcgacaccacagtcttcatcatagagagcacacgccagcgagtggcggtggaggccacactggagaacaggggcgagaacgcctacagtacggtcctaaatatctcgcagtcagcaaacctgcagtttgccagcttgatccagaaggaggactcagacggtagcattgagtgtgtgaacgaggagaggaggctccagaagcaagtctgcaacgtcagctatcccttcttccgggccaaggccaaggtggctttccgtcttgattttgagttcagcaaatccatcttcctacaccacctggagatcgagctcgctgcaggcagtgacagtaatgagcgggacagcaccaaggaagacaacgtggcccccttacgcttccacctcaaatacgaggctgacgtcctcttcaccaggagcagcagcctgagccactacgaggtcaagctcaacagctcgctggagagatacgatggtatcgggcctcccttcagctgcatcttcaggatccagaacttgggcttgttccccatccacgggatgatgatgaagatcaccattcccatcgccaccaggagcggcaaccgcctactgaagctgagggacttcctcacggacgaggcgaacacgtcctgtaacatctggggcaatagcactgagtaccggcccaccccagtggaggaagacttgcgtcgtgctccacagctgaatcacagcaactctgatgtcgtctccatcaactgcaatatacggctggtccccaaccaggaaatcaatttccatctactggggaacctgtggttgaggtccctaaaagcactcaagtacaaatccatgaaaatcatggtcaacgcagccttgcagaggcagttccacagccccttcatcttccgtgaggaggatcccagccgccagatcgtgtttgagatctccaagcaagaggactggcaggtccccatctggatcattgtaggcagcaccctggggggcctcctactgctggccctgctggtcctggcactgtggaagctcggcttctttagaagtgccaggcgcaggagggagcctggtctggaccccacccccaaagtgctggagtgaggctccagaggagactttgagttgatgggggccaggacaccagtccaggtagtgttgagacccaggcctgtggccccaccgagctggagcggagaggaagccagctggctttgcacttgacctcatctcccgagcaatggcgcctgctccctccagaatggaactcaagctggttttaagtggaactgcctactgggagactgggacacctttacacagacccctagggatttaaagggacacccctacacacacccaggcccacgccaaggcctccctcaggctctgtggagggcatttgctgccccagctactaaggtgctagg

SEQ ID NO: 23125 - DNA, 2990 bp, Homo Sapiens
cgaataagttaattgttttattgttaaaacaaaggcttttgggggtgagtatctgctctatgaaaaatcttctagagatcttggtattaaaaatgtaaaaattttatcattgccattaggaaaactggtagataggctgaataacaaaacagttgcaacttaggagaaaaacagtgagcccaaagactgaacataaggattttttaagttttatggtagcataaagagatataaagtgtatgagaaaaccagtagagatctagaagttctttctggtatctaagaagaatttcagaatttaattaagacagaatgaagggaggagtatttttaagaggtaactaacataatttttatgatcgtccatacagatttggcaatttctacttcctttaattgcagtacctggtgtgtcataagcaatttttacaagtacagtcattttttgttttcccatttcagtgttgtagcatgaaacgattttcagtgatgagcaacctaatttaagtgaacatccatttttaatgctaccacataaggaaatagagctatgattatgattaacaactatgttctatgcaagggtaaccccagacatatgcagctccgtcataactgactcctttgtctggaactatgtcttttatacaatgaatgtgaagtccttcaattttcataaaagatacagttgacattatttataatatagaagtgatggcatgataatacagaaaattaataataattattcaacagaagttcccagccataatatcacttctgaaaaataatgcatgctagtattttttgagaatctgtaatggcttgacacttagctaagcagttaactgctttcatcatattattttatgtaagtctgttttagtctgtgcagaacgctatagaaaaataccatacactgggtaacttataaacaaatttctttctcacggttttggaggctgagaaatcaaagatcaagtcatcagcagattcagtgtctgctgaggggctttttccttgtagactaatggttgcatctagctgtgtcttcacaacccatgatgcaaggggcagggtagctctctgggacttcttttataagagcaccaattccattcataccatttatgcccccatgacctaatcacttctcaaaggcctcacatcctgatactatatgaccccatacctgataccttgggaatcagaatgtcagcatatacatttgggaggacacaaacattttgatcataacaaggtcctagaaaagaaaattgaaatcacagaagtagatttgattatttaacatttgcatctagattgccaacattttatttctgttaatgagtttgcaaattcaaccctgttagagcgataccagcttcataccatcccacagaatcaggagagattttcttgaaactgcttcacagcccagcttctctctcttcacttccacttccatctctgcccagcaagtgttgatcccaagagcatttcctaataaactccttggaaattaatctgtctctgtctcagagtttgtgtctcaggagatcaaacctataaaagtgttccagaatgaacaaggaggttatcaaaaaaaaatacaggcataaaaacaatctgttaatctttgattggcgtataactctgagacaattctccccatgtaaataatgcctaggtgtgctacatttagtatatgaagaaaaggtaaagactcagttatagggcagaacacaggtggctcacgcaagtcatctcagcactgtaggaggccaagacgggaggattgcttgagcccgggagttccagacccgccttggcaacacagtgagacccagtttcataaacaaacaaacaaacaaaaaaagcaaaaaagcacccagttgtagagcaatatgatttttccaacagagggagacaaaatttaaacataagctttaatgccaaatgtcagagaaccattttaattttcacattggtccaattatatatgttgacacattttattaagtattttactcacacaatttcacttacaaatataaaaatatatagaaaataaaatatagatactattataagcttgaggttaatgatatactaaaacattaaaggatgtttataatatcattctgattgctcacaaatatttggagagaatttaataaacaatacatttgtggctacattaacacaactacattacattaatatgacatagagatgaaaaagaccaagttagcttgtgaaaaatgaattcaagaatgtggatgagtttcttagttcagaattgctcaggaattgggacattatgtaggtaagattctggaaagggcaaaaggatgaaaaacaagagaaggcctaacccatctgctacttgattatcttaatgaagcaaatctagagatttattaaagtaactcttgcttattgagcaccatatttaacacaaactatttagctttaaggcaacagttatcatcataatttgcttaaatttttaggagtttactcataaagctttgctttcagtgagataaggccggatgggcaaagagtaaactaccctgcaaatatatgcggataatttaattggtttcatattacaggaatctagagggccaattactttttcagtaataaaaaaataaaagggccagatgcagtggctcatgcctgtaatcccagcactttgggagtccaaggcagagagatcgcttgagctcagcagtttgaaaccaacttgggcaaaatgagaaaacacccatctctaaagaaatatataaattagacagaaatggtgtcatgtgcatgtagtacttgtattcccagctacctcaggaggctgaggtgtgaagatcatttgagcctggagaggtcaaggctgattgagccatgatggtgccagtgtacttcagcctgggtgacagagactgtctcaaaaaaaaaaaaaaaaaaaaaaaaaaaaaaaaaaaaaa

SEQ ID NO: 23126 - DNA, 2614 bp, Homo Sapiens
gcaactcagtaatttttattgcaactggaagacaatacatcacagaaactttatggtaggtctggggaaaagtgttatttacaataaatgatgaaatagtttgtctttggcaatatgattacatacgaagaatgcaaaatgcaggtatggatgccttccaagcaacaccaagtccctagagttcggctgatcgcgcctgcctccacactgtttctttaggtttacatgaacataacagaacatcacgttctttctcctttatggttctccctttctattcatgatattggcagtttcatacagaaaatacagaaaaaaaattggcttttgaaaaattattactctcgtaaattaatttggccgtgtaggtctattggccagccaaggtcagacgaccctaagcatcaatagtaaacctcttggtcttctgattgctttatcacttttttttttttttgtaaaacaaaacaaaactcagaaatgttacagaatcagagtattaaaaaatgtacaagtgtatatgcttcccagacacacatggatacatttttcctccacattttcaccatggcagtattaagtagtgagtgtgaatgacacagcatgaaactggttactgaatcagctatgagctcagatggcctcaacatacatactcaagaaatgttgcatgtttaaataactgagagtgtgctaaatctcatctaaaaaaaaggaggagaggggctggggaactcaggccacagtcatgaaaggatgaatacaatttctaggtttaataggttcaccatatcgaagtctttgagaatccaatatggaatatcaattattttgcaaaaggtagagaaagcagttctcaacttttgcaaatgaaatacagtggaaaaacactgttgtatatattccaaataaatagtctcgatttcaatgctaacaaaacaacaggaagggtactcgtgagcatctcacggttaagtcagaaatgatcgttcacacacgtctgatttcagaagtacaacagcaaggtgcagcaccatagacacatcggtttcggctgttaaaagatggatcgttttaaaaactgtgttttccttccttaatttttggtcagtgaagctagcacttgtttgctgaactgtggaagaactgcaaggtcacacacattattcatgataaagcaaccgagctgacgagtctgtgcttaattcaagaataaccagtaggagagagagaaaacacaaggagttaaccaccatcgccggtgctctctcaaaggaagaggggttaacagatgaattcacaaaggtaggcagatctatacagaacactgaatgccatgtgtaaatcctcatgaaactccagaaacaggaacaccacacaatgtatatactttgatttacacattccgttacaaaggaaaaaaagacaccattacagctttgtaactgtgttaactgcaatataaaccaagtccagagtttggcaggtaactaaaagagggttatcacttaggttatatagcaaaagtgttgatgtatattatatatagtagtataaataataaaaaagtattatttaaattagatcacagtgctgcattatgtgcataacagtgtttgatatagtattggtgggctgggacctacgacactaaggacttaactgtcaacactgggaagtcacaatcaagaggaaacacagagttccaatgttttcttttggtggcaaaaaaaatcctgaagatgaaagaaaaatacttctctacagaaacataaaaatcaattgcaacatctgggcagctgtgatccaccagaaagaaacgagtcccaacctggattaaagggaaagagaaatcacatggaatttaatccaatctcatctagaaaagcttcccatttaggtcacttgtacgtaactccaattccttctccaagagcccttccaggagaggcccaaggcgccccccacagagtggaatgagtggaacttgcgtcagtagcccttggcctgggcagtcctggcgtggtgcagaactctgagctgggcacagaaggcctccacctggttctcactctacagagcccactgcctgatgctgtccctcaggcaggagcctccttcaacacaacggcccctcccagaaggctctgtggtagtaactgctgtggccagcaagcactagacacattgaatgcctctgcaaaacaaaagaaaactctgttcttgggaatcggcctctggcacattccttcttaaaaactcccaagattgagacctgccacaatcgttttggccatggttttctccaaccaccagtgaaatatgggtttggttcattttagtttcagatagatggcttcaccaaagaactcttgaaagaatactgattagggaggggcagggaagtaggagcttatggtatattataaggctgggaaaaatctatgatgcaaaccctttccacatagtactagataaaaaaaaaaaaaaaaaaaaaaaaaaaaaaaaaaaaaaaaaaaaaaaaaaaaaaaaaaaaaaaaaaaaaaaaaaaaaaaaaaaaaaaaaaaaaaaaaaaaaaaaaaaaaaaaaaaaaaaaaaaaaaaaaaaaaaaaaa

SEQ ID NO: 23127 - DNA, 1765 bp, Homo Sapiens
tgtggtggttgtttttaagtgtggagggcaaaaggagataccatcccaggctcagtccaacccctctccaaaacggcttttctgacactccaggtagcgagggagttgggtctccaggttgtgcgaggagcaaatgatgaccgccaaggccgtagacaaaatcccagtaactctcagtggttttgtgcaccagctgtctgacaacatctacccggtggaggacctcgccgccacgtcggtgaccatctttcccaatgccgaactgggaggcccctttgaccagatgaacggagtggccggagatggcatgatcaacattgacatgactggagagaagaggtcgttggatctcccatatcccagcagctttgctcccgtctctgcacctagaaaccagaccttcacttacatgggcaagttctccattgaccctcagtaccctggtgccagctgctacccagaaggcataatcaatattgtgagtgcaggcatcttgcaaggggtcacttccccagcttcaaccacagcctcatccagcgtcacctctgcctcccccaacccactggccacaggacccctgggtgtgtgcaccatgtcccagacccagcctgacctggaccacctgtactctccgccaccgcctcctcctccttattctggctgtgcaggagacctctaccaggacccttctgcgttcctgtcagcagccaccacctccacctcttcctctctggcctacccaccacctccttcctatccatcccccaagccagccacggacccaggtctcttcccaatgatcccagactatcctggattctttccatctcagtgccagagagacctacatggtacagctggcccagaccgtaagccctttccctgcccactggacaccctgcgggtgccccctccactcactccactctctacaatccgtaactttaccctggggggccccagtgctggggtgaccggaccaggggccagtggaggcagcgagggaccccggctgcctggtagcagctcagcagcagcagcagccgccgccgccgccgcctataacccacaccacctgccactgcggcccattctgaggcctcgcaagtaccccaacagacccagcaagacgccggtgcacgagaggccctacccgtgcccagcagaaggctgcgaccggcggttctcccgctctgacgagctgacacggcacatccgaatccacactgggcataagcccttccagtgtcggatctgcatgcgcaacttcagccgcagtgaccacctcaccacccatatccgcacccacaccggtgagaagcccttcgcctgtgactactgtggccgaaagtttgcccggagtgatgagaggaagcgccacaccaagatccacctgagacagaaagagcggaaaagcagtgccccctctgcatcggtgccagccccctctacagcctcctgctctgggggcgtgcagcctgggggtaccctgtgcagcagtaacagcagcagtcttggcggagggccgctcgccccttgctcctctcggacccggacaccttgagatgagactcaggctgatacaccagctcccaaaggtcccggaggccctttgtccactggagctgcacaacaaacactaccaccctttcctgtccctctctccctttgttgggcaaagggctttggtggagctagcactgccccctttccacctagaagcaggttcttcctaaaacttagcccattctagtctctcttaggt

SEQ ID NO: 23128 - DNA, 2700 bp, Homo Sapiens
tgggagcggtttagagcccgggcgcctcctggggggtggggaaacggtttcgtgaggagaatttgagttaaaattataagacctaattatgagtgatcaaattaaattcattatggacagtctcaataaggagccctttaggaagaactataatttaatcacgtttgattccttggagccaatgcaactattacaagttctcagtgatgttctggctgagattgacccaaagcaacttgtggatatcagagaggagatgccagagcagacagccaaacgaatgttgagccttcttggtattcttaagtacaaaccttcaggaaatgccacagatatgagtacttttcgtcagggtttggtgattggaagtaaacctgtaatttacccagtgctccactggcttcttcagaggactaatgaactgaagaaaagagcatatttagctcgttttttaataaaacttgaggtaccaagtgagtttcttcaggatgaaactgtggctgacaccaataaacagtatgaagagttaatggaagcctttaaaactttgcataaagaatatgagcagctcaagatatctggattttctacagcagaaataagaaaggatatcagtgcaatggaagaagaaaaggatcagctcattaagagagttgaacatttgaagaaaagggttgagacagctcagaatcatcaatggatgcttaaaatagcaaggcaacttcgagttgaaaaagagagagaagaatatcttgcacaacagaaacaggaacaaaagaatcagctatttcatgcagtgcaaagattgcaaagagtacaaaaccagctgaaaagcatgcgccaagctgcagcagatgcaaagcctgaaagtttaatgaagaggctagaggaggagataaaatttaatttatatatggtaactgaaaaatttcctaaagaattagaaaataagaaaaaggaattacattttttacaaaaagtagtttcagagccagctatgggccattctgatcttcttgaacttgaatctaaaataaatgaaataaacacagaaattaaccagttgattgaaaagaaaatgatgagaaatgagcccattgaaggcaaactctcactgtataggcaacaggcatctatcatttcccgtaaaaaagaagccaaagctgaggaacttcaggaggccaaggagaagttagccagcctagagagagaagcatcagtaaagagaaatcagacccgtgaatttgatggtactgaagttttaaagggagatgagttcaaacgatatgtcaataaacttcgaagcaagagtacagttttcaaaaagaagcatcagataatagctgaacttaaagctgaattcggtcttttgcagaggactgaagaacttcttaagcaacgtcatgaaaatattcaacaacaactgcaaactatggaggagaaaaagggtatatctggatatagttacacccaagaagagctagaaagagtatctgcactgaagagtgaagttgatgaaatgaaaggacgaacattggatgatatgtctgaaatggtgaaaaaactgtattcattggtatctgaaaagaagtcagctcttgcctcagttataaaagagctacgacagttgcgtcaaaaatatcaagaactgacccaggagtgtgatgaaaagaaatcccagtatgatagctgtgcagcaggcctcgaaagcaatcggtccaaattagaacaggaagttagaagactccgtgaagaatgtcttcaagaagaaagtagataccattatacaaattgtatgattaagaacctagaagttcaacttcgtcgtgctactgatgagatgaaggcatatatctcttctgatcaacaagaaaaaagaaaggcaattagggaacagtataccaaaaatactgctgaacaagaaaaccttggaaagaaacttcgggaaaaacaaaaagttatacgagaaagtcatggtccaaatatgaaacaagcaaaaatgtggcgtgatttggaacaattaatggaatgtaagaaacagtgctttctgaaacaacaaagccaaacttccattggtcaggtaattcaggagggtggggaggaccggctaatactgtgaattcttgtgtcatcgtttggggttttacttgataccactagctataagcctaatctcataatgtatttcttttttgaaactgatttgtatagcattttgttttcagaagagccattctttattaagttttcatagaaaataatgttaaggtagatttagtttgaatgttttttcatatgaaaaagaggcttttattcttttccatagtttagacatcactggcgtcttctgagttttatgagacaggaaactaagtttactatctgtaaatgtaaacatatgtccattaagaaacatgtagtttttttttagaatgtaataacccagtggcttactgtttttcttaatctcttttaaaaaaactttagaagaatcttttaggaactaatatctcttgttctgaagaaacatttatctgacgttcagcagttcctacagttttacttcagtttatttttcttctgtaaaatgcaagaaaatttaatattttgactaacatgtcttttctgtttgtatcatttaaaggcaaataaacttggtacgtatttcatatctatttaaaaaatgtaaaaaaaaaaaaa

SEQ ID NO: 23129 - DNA, 3052 bp, Homo Sapiens
actggcggcggcagggctggcggcttaggccgcagaggtctgtgggcctgagccacgctggactctgtccgttctgcgatgactgctgctctggccgtcgtcacgacgtcgggtttggaagatggggtgcctaggtcccgtggcgaagggaccggggaagtggtcttggagcgggggcccggcgcggcctaccacatgttcgtggtgatggaggacttggtggagaagctgaagctgctccgctacgaggaggagttcctccggaagagcaacctgaaggccccgtccagacactattttgcactgcctaccaaccctggcgaacagttctacatgttttgtactcttgctgcttggttgattaataaagcgggacgtccctttgagcagcctcaagaatatgatgaccctaatgcaacaatatctaacatactatccgagcttcggtcatttggaagaactgcagattttcctccttcaaaattaaagtcaggttatggagaacatgtatgctatgttcttgattgcttcgctgaagaagcattgaaatatattggtttcacctggaaaaggccaatatacccagtagaagaattagaagaagaaagcgttgcagaagatgatgcagaattaacattaaataaagtggatgaagaatttgtggaagaagagacagataatgaagaaaactttattgatctcaacgttttaaaggcccagacatatcacttggatatgaacgagactgccaaacaagaagatattttggaatccacaacagatgctgcagaatggagcctagaagtggaacgtgtactaccgcaactgaaagtcacgattaggactgacaataaggattggagaatccatgttgaccaaatgcaccagcacagaagtggaattgaatctgctctaaaggagaccaagggatttttggacaaactccataatgaaattactaggactttggaaaagatcagcagccgagaaaagtacatcaacaatcagcttgagaatttggttcaagaatatcgtgcagctcaagcccagctgagtgaggcaaaggagcgataccagcagggaaatggaggagtgacggaaagaaccagactcctctctgaggttatggaagaattagaaaaggtaaaacaagaaatggaagaaaagggcagcagcatgactgatggtgctcctttggtgaagattaaacagagcttaacaaaactgaagcaagaaactgtagagatggacattagaattggcattgtggaacacacactactccaatcaaagctgaaggagaagtccaacatgactaggaacatgcatgccacagttattccagaaccagcaacaggcttttattaaaacatactggttttcatgtttctgattagttgggttttttatatcaaactatatttcatgttgcatagatttcaaaacataattttatgttcaatgggtatttttttacatatacatactcacatattatatcatggtgattatgatggttaaagcctttacactgaatgtaatgtttaataaagaaattacaaattctcactttctaagaagctttcactaatcattacctatgttaaagctcccacctggtggctcatttttcatagcattccttgtgtaagccaaggtatatgacctgcgttttctgcagatgctgctgctgtcacaacatgaactgctgacacagtcctttaccttgctccacctctgcagtgatcataagtgctttgtgcccagaggccactgaagatggtaggcaggattctttccaagaacccaaactgcctttgcctcagctttatggttacctaaaattgccactttttttaggttaaaaaaaacttcagtatcctcattaacatttgaagttggtttcttatgaatatttcgtggctaaaatgattttatagggaatctatcttctaggatctaagccactaaataaaaggataaatgaatgatgataagtcagtcactcatgtttgactctgttcttagaatgaagagaaggtgcatatgcatgtctcaatttctacctttttctgtggtatcggctatactagggaaccattttgtagaagaaggaacgatgacaggtcgcatgaagatcagcctctagtactgatgatctttacttatgcatcttcctgagcaactttctaggctaggatttctaaattggtgaaaaaagcagcattagagtgccagaattagcactggggaaaactggccaggggaacacaaagcaggagacagcctgcgttaatttttttttttaataattttcaaaagcagtggtagaaaatttgataagaatgctttatgtttaggacaacaaaaataattttaaaaagttattttttaccctaatacttttctccactgaatattattatttttttcttagctttttctttctagatgtattccccaacatgctcacatacacagatctttccctttccttactagacctctctttagtttaagataagtttagacaggagaaagtgtatgtaaactacctgaaaggatgacaatcaatacaatgacaaatatgccagtttatttaatttgtttaaaaaaaaaaaggcagaaaacccaccatgggaaaataagcattttttaaaatctgaagttgctcttttcctgtgtggtctttgggaggagtctagtacaaaaactgaaaacctttggtcctgggaatttattttcatggctgttgtcatggctgagtagttttttgatgaattcaatcaatgcagagaacgcttttagataaatcagaactctccttaaaatgcatttcaatcagaagcaaagtacacccattatttatgcagacatgtaaaaaatctaaaaattcttgcaatgagtagtataagccacctatttttacttccttctctgaaatattccagttaactcagcttgggttctgtgctcctcctctcttcctatagaacactgtgcataccttgaataaagagcttattatactaaaaaaaaaaaaaaaaaaaaa

SEQ ID NO: 23130 - DNA, 4387 bp, Homo Sapiens
cggcccgaggtcctgtgggaagtgaggatctcaggacgggggcggggctccgacagaggcggcgattgtggcggcccatttgtaaatgctgcggagattgaggtgtcggttcgtgctgctgagctgcccaggcttcacggagcggtgttggtaatcaatagctcttctagcctttgcattgtttaaatataatagtgtcattggactaagatgttcctgatgccaacctcttcagagttaaacagtgggcagaacttcctaacccagtggatgaccaatccttctcgggctggggtcatattaaatcgtggatttcctattttggaagcagacaaagagaagcgagcagctgtggacatttctaccagctttcctattaaaggcacacatttttctgatagcttcagctttataaatgaagaagattcacttcttgaagaacagaagttggagtcaaacaacccttacaaaccacagtcagataaatctgaaacccatacagcctttccttgcattaaaaagggaccacaggtagcggcatgtcacagtgctcctggacaccaggaagaaaacaaaaatgacttcatcccagatcgtgcgagtgaattcaaagaaggggcttataaagacccactttttaaaaaacttgaacagctgaaagaagtacaacagaagaagcaggaacaattgaagaggcaacagttggagcaactacagagactcatggaagaacaagagaagctgctcaccatggtgtctgggcagtgcacacttccaggtttgagtttactgcctgatgatcagagccagaagcacaggtctccaggaaataccaccactggagagagagccacatgctgcttcccatcatatgtctacccggacccaacccaggaagaaacatacccgtccaacattttatcccatgagcaaagcaacttctgtagaactgctcatggagattttgtcttaacttcaaaacgtgcgtctcctaatttattttctgaggcacagtatcaagaagcacctgtggaaaaaaataatttaaaagaagaaaaccgtaaccatcctacaggagaaagtatcttatgttgggagaaagtgacagaacagattcaggaagcaaatgataagaacttacaaaaacatgatgattcctcagaagtggctaatattgaagaaaggcccattaaagctgctattggagaaaggaaacagacctttgaagattacttagaagaacaaattcagttggaagagcaagaactgaagcaaaaacagctgaaggaagcagaaggaccattgccaatcaaagcaaaaccaaaacaaccatttttaaaacgaggagaaggtttagctagatttactaatgccaaatctaagtttcaaaaaggcaaagaaagtaaactagtgactaaccagagcacttccgaggaccagccgctgtttaaaatggatagacagcaactccagcggaaaaccgctcttaaaaataaagagctgtgtgcagacaaccctatccttaaaaaggacagtaaagctagaaccaagagtggttctgtcaccctcagtcagaagccgaaaatgctgaagtgtagtaacaggaaaagtctttctccgtcaggattgaaaatacagacggggaagaaatgtgatgggcagtttagagaccagatcaaatttgaaaacaaagtcacatctaataataaagaaaatgtaactgagtgtccaaaaccttgcgatactggctgcacagggtggaataagacacaaggtaaagacagacttcctctttcaacagggccggccagccggctggctgctaagagccccataagggagaccatgaaagagtctgaatcttctcttgacgtttctcttcagaaaaagttagagacttgggaacgagaaaaggaaaaggaaaatttggaattagatgaatttttgtttttagaacaagctgctgatgaaatatcattttctagtaattcctcatttgtactgaaaatcttagaaagggatcaacagatctgcaaaggtcaccggatgtcttccacccctgtcaaagctgtgccacagaagacaaatccggcagatcccattagtcattgtaaccgcagtgaggatttggaccacactgcacgtgagaaggagagtgagtgtgaagtcgcacccaaacaacttcattcattgtcctcagctgatgaattgagggaacagccttgtaaaatcaggaaagccgtccaaaagagcacttctgaaaatcagactgaatggaatgcacgtgacgatgaaggtgttccaaatagtgacagtagcactgactctgaggaacagcttgatgttaccataaaaccatcgactgaggatagagagaggggcatcagcagcagagaggatagcccacaagtctgtgatgataaggggccttttaaggacaccaggacccaagaagataaaaggagagatgttgatctggatttgtctgataaagattacagtagcgatgagtctatcatggaaagcataaaacataaagtgtctgagccctcgagatcctcatccctaagtctgagtaaaatggactttgatgatgaaagaacttggactgaccttgaagagaatttgtgtaaccatgatgttgttcttgggaatgaatccacttatgggacgccgcagacatgctaccctaataatgaaataggtatcctggacaaaacaataaaaaggaagattgcaccagtcaagaggggagaagacttgagcaagtccaggaggagcagaagtcctcctacatcggagctgatgatgaaattctttccttctttgaaaccaaaaccaaagtcagattcacacttgggaaatgaactcaagttaaacataagtcaagaccaaccacctggtgacaatgctcgatcccaggttttgagagagaaaattattgaattggaaacagaaatagaaaagtttaaagctgagaacgcatctttagctaaacttcgcattgaacgagaaagtgccttggaaaaactcaggaaagaaattgcagacttcgaacaacagaaagcaaaagaattagctcgaatagaagagtttaaaaaggaggagatgaggaagctacaaaaggaacgtaaagtttttgaaaagtatactacagctgcaagaacttttccagataaaaaggaacgtgaagaaatacagactttaaaacagcaaatagcagatttacgggaagatttgaaaagaaaggagaccaaatggtcaagtacacacagccgtctcagaagccagatacaaatgttagtcagagagaacacagacctccgggaagaaataaaagtgatggaaagattccgactggatgcctggaagagagcagaagccatagagagcagcctcgaggtggagaagaaggacaagcttgcgaacacatctgttcgatttcaaaacagtcagatttcttcaggaacccaggtagaaaaatacaagaaaaattatcttccaatgcaaggcaatccacctcgaagatccaagtctgcacctcctcgtgatttaggcaatttggataagggacaagctgcctctcccagggagccacttgaaccactgaacttcccagatcctgaatataaagaggaggaggaagaccaagacatacagggagaaatcagtcatcctgatggaaaggtggaaaaggtttataagaatgggtgccgtgttatactgtttcccaatggaactcgaaaggaagtgagtgcagatgggaagaccatcactgtcactttctttaatggtgacgtgaagcaggtcatgccagaccaaagagtgatttactactatgcagctgcccagaccactcacacgacatacccggagggactggaagttttacatttttcaagtggacaaatagaaaaacattacccagatggaaggaaagaaatcacgtttcctgaccagactgttaaaaacttatttcctgatggacaagaagaaagcattttcccagatggtacaattgtcagagtacaacgtgatggcaacaaactcatagagtttaataatggccaaagagaactacatactgcccagttcaagagacgggaatacccagatggcactgttaaaaccgtatatgcaaacggtcatcaagaaacgaagtacagatccggtcggataagagttaaggacaaggagggtaatgtgtcaatggacacggagctgtgacgatcctcatgtgatcatgaagtaacagtaactgactttttatgttaaaaaatgtacatttactgtggattctgtttaatttattgtgtatgtgtggggaaaagattggattttaaaataaaagtttaccctgtggcattttcaaaaaaaaaaaaaaaaa

SEQ ID NO: 23131 - DNA, 3591 bp, Homo Sapiens
cgctgagaggcaggaggcactagggatcgtccgcaggattgggactgatacagaggccgccacggagcccgccggagccaccgttcctgctgctgccgccgctgcccgaatcggaaccgtcgggccgcagccgccggcaatgccgcgaaggaagaggaatgcaggcagtagttcagatggaaccgaagattccgatttttctacagatctcgagcacacagacagttcagaaagtgatggcacatcccgacgatctgctcgagtcacccgctcctcagccaggctaagccagagttctcaagattccagtcctgttcgaaatctgcagtcttttggcactgaggagcctgcttactctaccagaagagtgacccgtagtcagcagcagcctaccccagtgacaccgaaaaaataccctcttcggcagactcgttcatctggttcagaaactgagcaagtggttgatttttcagatagagaaactaaaaatacagctgatcatgatgagtcaccgcctcgaactccaactggaaatgcgccttcttctgagtctgacatagacatctccagccccaatgtatctcacgatgagagcattgccaaggacatgtccctgaaggactcaggcagtgatctctctcatcgccccaagcgccgtcgcttccatgaaagctacaacttcaatatgaagtgtcctacaccaggctgtaactctctaggacaccttacaggaaaacatgagagacatttctccatctcaggatgcccactgtatcataacctctcagctgacgaatgcaaggtgagagcacagagccgggataagcagatagaagaaaggatgctgtctcacaggcaagatgacaacaacaggcatgcaaccaggcaccaggcaccaacggagaggcagcttcgatataaggaaaaagtggctgaactcaggaagaaaagaaattctggactgagcaaagaacagaaagagaaatatatggaacacagacagacctatgggaacacacgggaacctcttttagaaaacctgacaagcgagtatgacttggatcttttccgaagagcacaagcccgggcttcagaggatttggagaagttaaggctgcaaggccaaatcacagagggaagcaacatgattaaaacaattgcttttggccgctatgagcttgatacctggtatcattctccatatcctgaagaatatgcacggctgggacgtctctatatgtgtgaattctgtttaaaatatatgaagagccaaacgatactccgccggcacatggccaaatgtgtgtggaaacacccacctggtgatgagatatatcgcaaaggttcaatctctgtgtttgaagtggatggcaagaaaaacaagatctactgccaaaacctgtgcctgttggccaaactttttctggaccacaagacattatattatgatgtggagcccttcctgttctatgttatgacagaggcggacaacactggctgtcacctgattggatatttttctaaggaaaagaattcattcctcaactacaacgtctcctgtatccttactatgcctcagtacatgagacagggctatggcaagatgcttattgatttcagttatttgctttccaaagtcgaagaaaaagttggctccccagaacgtccactctcagatctggggcttataagctatcgcagttactggaaagaagtacttctccgctacctgcataattttcaaggcaaagagatttctatcaaagaaatcagtcaggagacggctgtgaatcctgtggacattgtcagcactttgcaagcccttcagatgctcaaatactggaagggaaaacacctagttttaaagagacaggacctgattgatgagtggatagccaaagaggccaaaaggtccaactccaataaaaccatggatcccagctgcttaaaatggacccctcccaagggcacttaaagtgacctgtcattccgagccagcgaaccccagcagtaggaatccgtaccctagggatctgtctgtcatttctctgttgctcttgtgattggcaagtacagtatcctttgggaaggccatccccctcaggactgtcctggctccgacctttgtgtacactgcagacgctggttctgaggaactgttgtttcggcctcagtgaggttgcctggatgggatctgtattagacttgagtgcaggtctctcagcactgacccaaggagttctgttatggtactgtacctgtccagtcactggttctctcctcatgtcctctcgccccatgaggttgtgttgtgtcttctaagcgtggtactagtgcttgccacctggtcaccagacctccaaatatggctgccaccaccaggacctttccagttactccttatatgtgtgttctatggaggggcagggaaaaggtggcacttgtgagtgtgtgtggattggcagggggtccattcactttgggttccatcttgctttaaatttcttcattttgattaagagacctctttttgatctgtattgggctaaccagagccaaatacttttgaagagtttcccagggactagtcatggtaatagcatataattgatctgaatgagatggagagaagaatgaaggggtggtggttctgggtttgatttgagttcacctgtgggcagtgggcagtgggcagtgtcttggtgaaagggaacggatactactttttgcctcaccgtaaagtactcactagtaaatatttccttctctctttactcccactttttacgtttgcaggtgccaaagtaatgtccacttttccctttcatgctgcatattaactggttaattatactgcagaaaccttttcacctccactagtctgatacagtacatctgtacttccatataccttgcactgattttgtctgagtgccctgggagaagtagaaaatgattgaaagtgacttccgtatctcagcccatgactcagcaaggcagaatggccacccctgccaaagtttgcttctcttttcaacagtgcctcaccctccctctaggattaaagtgcttctgcccttccacgaactcctcctccatttcctttttgggatttgtcaccatccttctattctctggtcttctatttttggtgttgttcaagtgaaggaagagatgttccctctaatttctctctagcccattataacctgctatcttggggcaacttttgatgtatgacatgtcacccttcccaacttggtctcctccaacatgctgtcttcatgtggagccctcaccacaatccctgactccggtcatttgtgcctttctcttgtcatctctgtacactacttatattcactgtgggttgggggagctaattttaagcatgttcagtggcagctcccctccagtttcagtgtcactgttaaaatttatcaaaaagcaacttcactaggggttttcttaagggataaaggccttttacagaagctaaacccttccccacatgtggtagaatgtgctcttctatatctactcctcaataaagcatgttctctgctcaaaaaaaaaaaaaaaaaaaaaaaa

SEQ ID NO: 23132 - DNA, 857 bp, Homo Sapiens
gttaactggctctccttcctcacacagttcatcataacccaaccccccacccccgggtcatgaaaatcacagaacttataaacacattgaaccctagatctcaggcttcctgacctaccgccagtggccccttgctggccaccctatagggtcctccttccctggcagccccccatgtgggagaaatacctgattctcccaatctgcagtgggagagctttgctgaattccatcccaaagtcaaacatgggcaagaggtgaggatttcacttttaccctcaagtccgatttgtctgtgattttaaactaactgtgtatgtattgatgtttggaagattgtttgaattttaaagtgataatagtacttaatgttatccagtattgttcattaaatggtgttatcctaaagctgcacttgggatttttacctaacgctttactgattctctcaagcacatggcaaagtttgatttgcactccgttcatttctgacacgttttgctgcctcctacctttctaagcgtcatgcaaattcgagaatggagaaggacgctgccggtccctgagcggtgtggagagggcggaaggtggactccagcgcagcttgaggggctgaggacggaggctgcagcatctgtgtcgttctactgagcacgcttctctgcctcgctcctgactcagcactttgttcactggctcagcagttatgtttacacatcatttttatgttcctgctttgtaattcatgtttgagatgggtggccactgtacagatatttattacgctttccagactttctgaatagatttttttgaataaacatggttttatgaagtgtaaaaaaaaaaaaaaaaaa

SEQ ID NO: 23133 - DNA, 6906 bp, Homo Sapiens
gcccgggcaggtggttgcagcattgcagaagagaaaagtagtttgttggcagagaatcaggtattaatggaaagactcaatcaatctgattctatagaagaccctaacagtccagcaggaagaaggcatttgcagctccagactcaattagaacagctccaagaagaaacattcagactagaagcagccaaagatgattatcgaatacgttgtgaagagttagaaaaggagatctctgaacttcggcaacagaatgatgaactgaccactttggcagatgaagctcagtctctgaaagatgagatcgacgtgctgagacattcttctgataaagtatctaaactagaaggtcaagtatcactagaattcagcggccgctgaattctagggaggcgcgccccccggctgggcgccgcgcgcaccatggggctcccagcgctcgagttcagcgactgctgcctcgatagtccgcacttccgagagacgctcaagtcgcacgaagcagagctggacaagaccaacaaattcatcaaggagctcatcaaggacgggaagtcactcataagcgcgctcaagaatttgtcttcagcgaagcggaagtttgcagattccttaaatgaatttaaatttcagtgcataggagatgcagaaacagatgatgagatgtgtatagcaaggtctttgcaggagtttgccactgtcctcaggaatcttgaagatgaacggatacggatgattgagaatgccagcgaggtgctcatcactcccttggagaagtttcgaaaggaacagatcggggctgccaaggaagccaaaaagaaatatgacaaagagacagaaaagtattgtggcatcttagaaaaacacttgaatttgtcttccaaaaagaaagaatctcagcttcaggaggcagacagccaagtggacctggtccggcagcatttctatgaagtatccctggaatatgtcttcaaggtgcaggaagtccaagagagaaagatgtttgagtttgtggagcctctgctggccttcctgcaaggactcttcactttctatcaccatggttacgaactggccaaggatttcggggacttcaagacacagttaaccattagcatacagaacacaagaaatcgctttgaaggcactagatcagaagtggaatcactgatgaaaaagatgaaggagaatccccttgagcacaagaccatcagtccctacaccatggagggatacctctacgtgcaggagaaacgtcactttggaacttcttgggtgaagcactactgtacatatcaacgggattccaaacaaatcaccatggtaccatttgaccaaaagtcaggaggaaaagggggagaagatgaatcagttatcctcaaatcctgcacacggcggaaaacagactccattgagaagaggttttgctttgatgtggaagcagtagacaggccaggggttatcaccatgcaagctttgtcggaagaggaccggaggctctggatggaagccatggatggccgggaacctgtctacaactcgaacaaagacagccagagtgaagggactgcgcagttggacagcattggcttcagcataatcaggaaatgcatccatgctgtggaaaccagagggatcaacgagcaagggctgtatcgaattgtgggggtcaactccagagtgcagaagttgctgagtgtcctgatggaccccaagactgcttctgagacagaaacagatatctgtgctgaatgggagataaagaccatcactagtgctctgaagacctacctaagaatgcttccaggaccactcatgatgtaccagtttcaaagaagtttcatcaaagcagcaaaactggagaaccaggagtctcgggtctctgaaatccacagccttgttcatcggctcccagagaaaaatcggcagatgttacagctgctcatgaaccacttggcaaatgttgctaacaaccacaagcagaatttgatgacggtggcaaaccttggtgtggtgtttggacccactctgctgaggcctcaggaagaaacagtagcagccatcatggacatcaaatttcagaacattgtcattgagatcctaatagaaaaccacgaaaagatatttaacaccgtgcccgatatgcctctcaccaatgcccagctgcacctgtctcggaagaagagcagtgactccaagcccccgtcctgcagcgagaggcccctgacgctcttccacaccgttcagtcaacagagaaacaggaacaaaggaacagcatcatcaactccagtttggaatctgtctcatcaaatccaaacagcatccttaattccagcagcagcttacagcccaacatgaactccagtgacccagacctggctgtggtcaaacccacccggcccaactcactccccccgaatccaagcccaacttcacccctctcgccatcttggcccatgttctcggcgccatccagccctatgcccacctcatccacgtccagcgactcatcccccgtcaggtctgttgcagggtttgtttggttttctgttgctgccgttgttctctcattggctcggtcctctcttcatgcagtgttcagcctcctcgtcaactttgttccctgccatccaaacctgcacttgctttttgacaggccagaagaagcggtacatgaagactccagcacaccgttccggaaggcaaaagccttgtatgcctgcaaagctgaacatgactcagaactttcgttcacagcaggcacggtcttcgataatgttcacccatctcaggagcctggctggttggaggggactctgaacggaaagactggcctcatccctgagaattacgtggagttcctctaaccgtgggccccagcagaactgctgagctttacatggtatccatgacaactgctgattccagtgtcgaggccatttctctttgccactgagaaatgcagcgtgactgactctgttgctacctgtcaacatgaatgtttctgtgagctctggtgtcactcatctccatgatcatctcagccaacatgcatcagtactgcaagaaaagaagtcaatcagcagaggagagcatttgataactaagaggaagacttgcaaagccgttttctcatgagtaccctgaatagggggcactcattttgtttcaacggtccaaacgcccaaccttcagaaagaggaagtcagatagaaatagtccctgagagcacactgtgtagctaagcctgctggggctgggtgaagaaattggcgctgagatccaggctggatccattgcttttgtttacaataggcactctctctaccccacctctcagtacttgagacttaaagtgctacaggcagctggatctgtttgcatgcaggatgaagagggttaaaacactgtttatataagatccaatctctcaccatctctaaagcagccgttggcctgtcatcagtgagatacaatccagtcttctcatgcacgggaacacacacaccctgcgtttctccctcccaggctaggaacctctctgccaccaagggctgccatccatcgcctagtaaccacggcaacccaacctactctaaaaccaaaccaaaaaaataaaataacacatcctctttgcatgacacattttttttctcccctttttggtacactttttttgaatggttttctaacaacttgaagcacaggatcaaggaattagggtggtctacttgaggcagatgggatagtagctgggaactgttccctttctgattaatttcagcagcatcggaatatatttggagcacaccctagtaacctcttgagattaaattacatagtcttaatatttctgttcctccatgcaactgatgtttgttttttaaagggtaagatgctgcctcccaatgggtgatgccatctgactggtttccccatgtcctcccattcacccatctctgctcccacccttgcctgcctctaacccaccactggccagcccccttgccctactctgggctgctgaacactggtgctgtggtggttttcaaggttaattcctaggctaaccgtatggcctatagtttaaaagcacatctatgttcactgccactctgaaaaagggaattatttctcagtctttcaaggcttgagactaatataggccattgtgattcaggaagaaacccaaggttggagggtgggatgagtaccctctgaaaaagggaatttgctggtgaaaagaggctggatcttgtggaagactgtcttggatggggaagtactacctggagatttcaaattcacttggcctgcaaacaacagagttatccgtatcttccacatgtgaatgtcattgcaagggtgactctagacaaactacaaaccgatggaccgtcaagctccccaggagccccttggatggcagcgttgcttcagagtgtttcctgtttctggaattccttgttagggaactttaaagaagaaaagaaaaacttgaattgtgttgaattactgtatcttttactttttttttttgaaaagataaacttgtaaatagagtgatttgaaatactatatggcaaagttttatatttgatattctttaagttagttgctcacacacttaggctttgattgctgaagaagtatgtttaagagggagagaggggaggcaaagctgaagagagtcaaggtcactgtccccgcttcggcctgaaggaaagagaagacatttctatggccttgctctctgctgtcctgttggtgggcacgacacatcagtggtgttcagtctttatgtgtttttaagcatcccttgggctttggatttggagatgggaagagcatctccaggcaatgagtttttcaaagaatgcctacttagtagtaagatgaagctcaggatttaaataagtggggtcaggcattcgagtttttgtctttcttctcaggtgtatttcttggtacccccaagatatcaggccagaaagagatgagtcagttgctgtgctctttacttctttttctccacatcttctgaggctttagaaatgtggacaagctagttttcaaattttgtgtgcgtctgtaagttcttaaagaaccagcttcttagaatgttcagttctcaatgtgctgctgctttcccttctcctaaacattttaaaactcttccctttcacctccaattcccgtgatcccaaaagaagaggaagactccaggaggggtatagattgtgccgtcatagctttacaggtggttttaaagttagcaggggtttgtcatggtgattcactactcagtttatcagctcaaggattatacagctcttttccgggaactcacccaggagcaagcgagacactaccattgaatcagggaatgagaattaagaatggacaggaccaagacagaactcaagaaagccactggggaaaactcgagaagaaagggagtatactagtaggttagatctgtgaacctgaggacaagaagaccttgggaaatggaggcctcaggggatgtgcattcacatactattacgcttctcaaagagagaccaacatcatgcttttaacacatttgatgaggttttttatttgtgtttttgtttgttttttgagatggagtctcactctgtggcccaggctggagtgcagtggcgcggtcttggctcactgcaacctccgcctcccgggttcaagtgattctcctgtctcagcctcccaagtagctgggactgcaggcatgagccatcacacccggctggttttttgtgtttttagtagagatggggttttgccatgtttgccgggctgatctcgaactcctgacctcaagtgatctgcccacttcggacccccaaagtgctgggattccaggtgtgagccgctgcggccgaccacatttgatgtttgaagttgtaatctgtcccatcataaacttacctggagctcatgtggaggaacagaaggccaagatccttgctttgggggtgcctcacgaagcatccctgtagacacttggccccagcttcactgcttggaagcatgtccctccctcttgagttggctctgatttgaaatcgggagaaacagagctgctgccaatgggatcttttaggtaactccctccctagcttccgtgtgtctgtgcagtgcccatgagctgctgccaatgggatctttcaggtaccccctccccagcttccctgtggctgtgcggtgcccttgacagatggcttctctgtttccctttgcccagccaggctcccctccttcctattagctacaaaactggataaacttcagaatatgagccaatgagtaggaaggaacttgaagactaaagattttactctctcccctatccatgccccctacctctgactctctctgtgtgaacaggaaactttagggtagatgaggagaatgaattggttatcagagtggaagaccatggcccaggatccctgagctttcccagtagcctccagtttcctttgtaagacccagggatcacttagccatagcctgaatcttttaggggtattaaggtcagcctctcactcttccttcaggttactaacaaaatttcgtagctaaagaatgccatggccgggtgcagtggctcacgcctataatcccagcactttgggaggccgaggcgggcggatcacgaggtcaggagattgagaccatcctggctacgacggtgaagccccgtctctgctaagagtgcaaaaaattagccgggtgtggtggcgggcgcctgtagtcccagctactctggaggctgaggcaggagaatggcatgagcccgggaggcggagattgcggtgagccaagatcgcgcccctgcactccagcctgggtgacagagccagactccgtctcaaagg

SEQ ID NO: 23134 - DNA, 17734 bp, Homo Sapiens
tcaaaacaccatctattaaagctgacaattgtcacaagcagaattgaatactcaaagggaagttaacttcacacagaaaaacacttcatatttcattcaacttgcaacgtatttactgagcgtctaccgtgtgtaaggcagcctgctaggaaatggggtacgaccctcctcctcacagagcttacattctgacaggggaacccgaagtgaacaagcatgatctgcaacaggtatgagatgtcaagaaagcctattacagaggcacccaggcccagtctacggggtcactaaaggctatgggataaactgatctgaaggatgagcacaaatcaatcatcgagaggctgagagcagctcaagtcgggggaataagatgtgcgagaagcaggagagagcaggatgaaataaaatcaggcccgtgtgatgcgtggtgaacagtgagtacccagagaagcgaagctgggggctgaggggctggtcaggaacacgggcttaattcatcaacccaacagcaaacatcagtgcaacaatgtaagcacatttaccttctgggtcataatgtaatttcttccaaagccagtggtggcactcagatatttgatcagaggattgacagattcaggcttttggtggaaaagccatacctggaaaggaaggatgtgtcaatgatttgtttcttctgcccaaggtgagtgaggctggtggagagtcactatctgcactttatagagctccccagacaaattataaacatcctctcaaatatcatcagtgaatggtttggcaaatatattgagaaccaattaaaatatagtttaaaagcacttgcttctacaaccaatttgtattcccacaataaatgtatttatttctgtaacacttaccaaaacaagagcatcaaagccaattccttcacactgccctccctcccacctgctcttcatgaggagtcctttattcctgcatgtttcctgttctttgggccggaattccggggcgcgatgtcggctcactacaacctctgcctcctggattcaagcaattctgtacctcagcctcccgagtggctgtgattgcagatgaacgggaccgggttcagaagaaaacgttcaccaagtgggtcaacaagcacttaatgaaggtccgcaagcacatcaatgatctttatgaagatctgcgggatggccataacctgatctctctgttggaggtcctctcaggcatcaaactgccccgggagaagggcaggatgcgttttcataggctgcagaatgtgcagattgccctggacttcctaaagcagcgacaggtgaaactagtgaatattcgcaatgatgacatcacagatggcaaccccaagttgaccctgggtctgatctggaccattattttgcatttccagatctctgacatctacattagtggagaatcaggggatatgtcagccaaggagaaactactcctgtggacccagaaggtgacagctggttacacaggaatcaaatgcaccaacttttcctcctgctggagtgatgggaagatgttcaatgcactcattcaccgataccgacccgatctagtagacatggagagggtgcaaatccaaagtaaccgagagaatctggaacaagcttttgaagtggcagaaagactgggggtcactcgcctgctggatgcagaagatgtggatgtgccatctccagatgaaaagtctgtaatcacttatgtgtcttcgatttatgatgccttccctaaagttcctgagggtggagaagggatcagtgctacggaagtggactccaggtggcaagaataccaaagccgagtggactccctcattccctggatcaaacagcatacaatactgatgtcagataaaacttttccccaaaaccctgttgaactaaaggcactttataaccaatatatacacttcaaagaaacagaaattctggccaaggagagagaaaaaggaagaattgaggaattatataaattactagaggtgtggattgaatttggccgaattaaactgcctcaaggttatcaccctaatgatgtggaagaagagtggggaaagctcatcatagagatgctggaacgagagaaatcacttcggccggctgtggagaggctggaattgctgctacagattgcaaacaaaatccagaatggtgctttgaactgtgaagaaaaactgacactagctaagaatacactgcaggctgatgctgctcacctggaatcaggacaaccggtacaatgtgagtcagatgtcattatgtacattcaggagtgtgaaggtctcatcaggcagctgcaggtggatctccagatcctgcgggatgagaattactaccagctagaagagctggcttttagggtcatgcgtcttcaggatgagctggtcaccttgcgtctagagtgtacaaacctgtaccggaagggtcatttcacttcacttgaattggttccaccctctactttaaccaccactcatctgaaagcagaacccttaaccaaggcaacccattcttcttctacctcctggttccgaaagcctatgactcgggctgaacttgtggccatcagctcctctgaagatgaaggcaatctccgatttgtgtatgaactactgtcttgggtagaagagatgcagatgaaactggagcgagcagagtggggcaatgacctgcctagtgtggagttgcagctagaaacacagcagcacatccatacgagtgtagaagagctgggctcaagtgtcaaggaggccaggttgtatgagggaaagatgtcccagaatttccataccagctatgctgaaactcttggaaagctggagacacagtattgtaaattgaaggaaacttctagcttccggatgaggcaccttcagagcctgcataaatttgtttccagagctacagctgagttgatctggttgaatgagaaggaggaggaggaactagcatatgactggagtgacaacaattccaatatctcagccaagagaaattacttctctgagttgacaatggaactggaggagaaacaggatgtgtttcgttctctacaagatacagcagaactactttcacttgagaaccacccagccaagcagacagtggaggcttacagtgctgctgtccagtcccagttgcagtggatgaagcagctgtgcctgtgtgttgagcagcatgtgaaagagaatactgcttattttcagttcttcagtgatgcacgagagctggagtcattcttgaggaacctccaagattccattaaacgaaaatattcctgtgaccacaacaccagcttatcccgccttgaagacctgctccaggactccatggatgaaaaggagcagcttatacagtccaagagttccgttgccagtctcgttgggagatcaaaaaccatcgttcagctaaaaccacgcagtccagaccatgtgttaaagaacaccatttctgtcaaggctgtctgtgactacaggcagatcgagattactatttgcaaaaatgatgaatgtgtgctagaagataattctcagcggaccaaatggaaagtgatcagccccacagggaacgaggcaatggtgccgtcagtctgcttcctcatccccccacccaataaggatgccattgagatggccagcagggtcgaacaatcttatcagaaggttatggccctttggcatcagctgcatgttaacaccaaaagccttatctcttggaactatctgcgtaaagaccttgaccttgtacagacctggaacctagaaaagcttcgatcctcagcaccaggggagtgccatcagattatgaagaaccttcaggcccactatgaagactttctgcaggatagtcgtgactctgtgctgttctcagtggctgatcgcttgcgcttggaagaggaggtggaagcttgtaaagcccgcttccagcacctgatgaagtccatggagaatgaggacaaagaggagactgtggccaagatgtacatttcagagttgaagaacatccggctacgcctggaggagtatgaacagagggtggtcaaacgaattcagtctctagccagctctaggactgacagagatgcctggcaggacaatgcattaaggattgcagagcaagagcacacccaggaggatttacagcaattgaggtcagacttggatgcagtttctatgaaatgtgacagctttctccatcagtctccatctagttcaagtgtcccaactctgcgctcagaactgaatctgctggtggagaagatggaccatgtctatggtctctctactgtatatctgaataagttaaagacagttgatgttatagtacgtagcatacaggatgctgaactcttggtcaaaggttatgagattaagctgagtcaagaagaagtagtactggcagatctctcagctctggaggcccattggtcgacattacggcactggcttagtgatgtgaaggacaagaattcagtgttttcagtcctggatgaggaaattgccaaggccaaggtagtggcagagcagatgagtcgtctgacaccagagcgaaatctggatttggagcgctatcaggaaaaaggctcccagctgcaggagcgttggcaccgagtcattgcccagctcgagattcgccaatctgagctagaaagtatccaggaagttctgggagattaccgagcctgccatggaactctcatcaagtggattgaggaaaccactgcccagcaggaaatgatgaagccaggccaggcagaggatagcagagtgctttcggagcagctcagccagcagacggccctatttgcagaaattgagagaaatcagacaaaactggatcaatgtcaaaaattttcccagcagtactctactattgtaaaggactatgaattgcaactgatgacatacaaggcctttgtggaatcgcagcagaaatcccctggcaagcgccgtcgcatgctttcctcttcagatgccatcactcaagagttcatggacttaaggactcgctacacggcattggtgactttaacaactcagcacgtgaaatacatcagtgatgcactccggcgtctggaggaggaggagaaagtggtagaagaggagaaacaagaacatgtggagaaggttaaagaacttttgggctgggtgtctaccctagcgaggaatacacaaggaaaagctacctcatccgagaccaaagaatcaacagacattgaaaaagctattttggaacagcaggttctgtcagaagagctgacaacaaagaaagaacaagtctctgaagctattaaaacatcacagatcttcttggccaagcatggtcataagctctcagaaaaagagaagaaacaaatatctgagcaattgaatgccctaaacaaggcttaccatgacctttgtgatggttctgcaaatcagcttcagcagcttcagagccagttggctcaccagacagaacaaaagaccctgcagaaacaacaaaatacctgtcaccagcaactggaggatctttgcagttgggtaggacaggcagaaagagcactggcaggccaccaaggcagaaccacccagcaggatctctctgctttgcagaagaaccaaagtgacttgaaggatttacaggatgacattcagaatcgtgccacctcatttgccactgttgtcaaggacattgaggggttcatggaagagaatcagaccaagctgagcccacgtgagttgacagctcttcgggaaaagcttcatcaggctaaggagcaatatgaggcgctccaggaagagacacgtgtggcccagaaggaactggaggaagcagtgacctccgccttacagcaggagactgaaaagagtaaagcagcaaaggaactggcagagaacaagaagaagatcgatgctctcctggattgggtaacttcagtaggatcatctggtggacagctgctgaccaaccttccaggaatggagcagctctcgggagctagcttggagaaaggagccttggacaccactgatggttacatgggggtgaatcaagccccagagaaactggacaagcaatgtgagatgatgaaggcccgtcaccaagaattgctgtcccagcagcaaaatttcattctggccacccagtcagctcaggccttcttggatcagcatggccacaatctcacacctgaggagcaacagatgctgcaacagaagctgggagagctaaaggaacaatactctacttccctggcccaatcagaggcagaactgaagcaggtgcagacacttcaggatgagttgcagaaatttctgcaggatcataaagagtttgaaagctggttggaacgatccgagaaagagctggagaacatgcataagggaggcagcagccccgagacccttccctccctgctaaagcggcaaggaagcttctcagaggatgtcatttcccacaaaggagacttgagatttgtgactatctcaggacagaaagtcttggacatggaaaacagttttaaggaaggcaaagaaccatcagaaattggaaacttagtaaaggacaagttgaaggatgcaacagaaagatacactgctctccactcaaagtgtacacgattaggatctcacctgaatatgctgttaggccagtatcatcaattccaaaacagtgctgacagcctgcaggcctggatgcaggcttgtgaggccaacgtggagaagctcctctcagatactgttgcctctgaccctggagttctccaggagcagcttgcaacaacaaagcagttgcaggaggaattggctgagcaccaagtacctgtggaaaaactccaaaaagtagctcgtgacataatggaaattgaaggggagccagccccagaccacaggcatgttcaagaaactacagattccatactcagccacttccaaagcctctcctatagcctggctgagcgatcttctctgctgcagaaagcaattgcccaatctcagagtgtccaggaaagcctggagagcctgttgcagtctattggggaagttgaacaaaacctggaagggaagcaggtgtcatcactctcatcaggagtcatccagaaagccttagccacaaatatgaaattgaagcaggacattgctcggcaaaagagcagcttggaggccacccgtgagatggtgacccgattcatggagacagcagacagtactacagcagcagtgctgcagggcaaactggcagaggtgagccagcggttcgaacagctctgtctacagcagcaagaaaaggagagctccctaaagaagcttctaccccaggcagagatgtttgaacacctctctggtaagctgcagcagttcatggaaaacaaaagtcggatgctggcctctggaaatcagccagatcaagatattacacatttcttccaacagatccaggagctcaatttggaaatggaagaccaacaggagaacctagatactcttgagcacctggtcactgaactgagctcttgtggctttgcgctggacttgtgccagcatcaggacagggtacagaatctaagaaaagacttcacagagctacagaagacagttaaagagagagagaaagatgcatcatcttgccaggaacagttggatgaattccggaagctggtcaggaccttccagaaatggttgaaagaaactgaagggagtattccacctacggaaacttctgtgagtgctaaagagttagaaaagcagattgaacacctgaagagtctactagatgactgggcaagtaagggaactctggtggaagaaatcaattgcaaaggtacttctttagaaaatctcatcatggaaatcacagcacctgattcccaaggcaagacagatctgacggagatccagtgtgacatgtcagatgtaaacttgaagtatgagaaactagggggagtactccatgaacgccaggaaagccttcaggctatcctcaacagaatggaggaggtccacaaggaggcaaactctgtgctgcagtggctggaatcaaaagaggaagtcctgaaatccatggatgccatgtcatctccaaccaagacagaaacagtgaaagcccaagctgaatctaacaaggccttcctggctgagttggaacagaattctccaaaaattcaaaaagtaaaggaagccctggctggattactggtgacatatcccaactcacaggaagcagaaaattggaagaaaattcaggaagaactcaattcccgatgggaaagggccactgaggttactgtggctcggcaaaggcagctagaggaatctgcaagtcatctggcctgcttccaggctgcagaatcccagctccggccgtggctgatggagaaagaactgatgatgggagtgctggggcccctgtctattgaccccaacatgttgaatgcacaaaagcaacaggtccagtttatgctaaaggaatttgaagcacgcaggcaacagcatgagcaactgaatgaggcagctcagggcatcctaacaggccctggagatgtctctctgtccaccagccaagtacagaaagaactccagagcatcaatcagaaatgggttgagctgactgacaaactcaactcccgttccagccaaattgaccaagctattgttaagagcacccagtaccaggaactgctccaggacttatcagagaaggtgagggcagttggacaacggctgagtgtccagtcagctatcagcacccaaccagaggctgtaaagcagcaattggaagagaccagtgaaattcgatctgacttggagcagttagaccacgaggttaaggaggctcagacactgtgcgatgaactctcagtgctcattggtgagcagtacctcaaggatgaactgaagaagcgtttggagacagttgccctgcctctccaaggtttagaagaccttgcagccgatcgcattaacagactccaggcagctcttgccagcacccagcagttccagcaaatgtttgatgagttgaggacctggttggatgataaacaaagccagcaagcaaaaaactgcccaatttctgcaaaattggagcggctacagtctcagctacaggagaatgaagagtttcagaaaagtcttaatcaacacagtggctcctatgaggtgattgtggctgaaggggaatctctacttctttctgtacctcctggagaagagaaaaggactctacaaaaccagttggttgagctcaaaaaccattgggaagagcttagtaaaaaaactgcagacagacaatccaggctcaaggattgtatgcagaaagctcagaaatatcagtggcatgtggaagaccttgtgccatggatagaagattgtaaagctaagatgtctgagttgcgagtcactctggatccagtgcagctagagtccagtctcctaagatcaaaggctatgctgaatgaggtggagaagcgccgctccctgctggaaatattgaatagtgctgctgacattctgatcaattcttcagaagcagatgaggatggaatccgggatgagaaggctgggatcaaccagaacatggatgctgttacagaagagctgcaggccaaaacagggtcactcgaagaaatgactcagaggctcagggagttccaggaaagctttaagaatattgaaaagaaggttgaaggagccaaacaccaacttgagatctttgatgctctgggttctcaagcctgtagcaacaagaacctggagaagctaagagctcaacaggaagtgctgcaggccctagagcctcaggtagactatctgaggaactttactcagggtctggtagaagatgccccagatggatctgatgcttctcaacttctccaccaagctgaggtcgcccagcaagagttcctcgaagttaagcaaagagtgaacagtggttgtgtgatgatggaaaacaagctggaggggattggccagtttcactgccgggtccgagagatgttctctcaattggcagacctggatgatgagctagatggcatgggtgctattggcagagacactgatagcctccagtcccaaatcgaggatgtccggctattccttaacaaaattcacgtcctcaaattagacatagaggcctctgaagcagagtgtcgacatatgctagaagaagaggggactctggatttgttaggtctcaaaagggagctagaagccctgaacaaacagtgtggcaaactgacagagagggggaaagctcgtcaggaacagctggaactgacactaggccgtgtagaggacttctacaggaaattgaaaggactcaatgacgcgaccacagcagcagaggaggcagaggccctccagtgggtagtggggaccgaagtggaaatcatcaaccaacaattagcagattttaaaatgtttcagaaagaacaagtggatcctcttcagatgaaattgcagcaggtgaatggacttggccagggattaattcagagtgcaggaaaagactgtgatgtacagggtttagaacatgacatggaagagatcaatgctcgatggaatacattgaataaaaaggtcgcacaaagaattgcacagctacaggaagctttgttgcattgtgggaagtttcaagatgccttggagccattgctcagctggttggcagataccgaggagctcatagccaatcagaaacctccatctgctgagtataaagtggtgaaagcacagatccaagaacagaagttgctccagcggctcctagatgatcgaaaggccacagtagacatgcttcaagcagaaggaggcagaatagcccagtcagcagagctggctgatagagagaaaatcactggacagctggagagtcttgaaagtagatggactgaactactcagtaaggcagcagccaggcaaaaacagctggaagacatcctggttctggccaaacagttccatgagacagctgagcctatttctgacttcttatctgtcacagagaaaaagcttgctaactcagaacctgttggcactcagactgccaaaatacagcagcagatcattcggcacaaggctctggaagaagacatagaaaaccatgcaacagatgtgcaccaggcagtcaaaattgggcagtccctctcctccctgacatctcctgcagaacagggtgtgctgtcagaaaagatagactcattgcaggcccgatacagtgaaattcaagaccgctgttgtcggaaggcagccctacttgaccaagctctgtctaatgctaggctgtttggggaggatgaggtggaggtgctcaactggctggctgaggttgaggacaagctcagttcagtgttcgtaaaggatttcaaacaggatgtcctgcacaggcagcatgctgaccacctggctttaaatgaagaaattgttaatagaaagaagaatgtagatcaagctattaaaaatggtcaggctcttctaaaacaaaccacaggtgaggaggtgttacttatccaggaaaaactagatggtataaagactcgttacgcagacatcacagttactagctccaaggccctcagaactttagagcaagcccggcagctggccaccaagttccagtctacttatgaggaactgaccgggtggctgagggaggtggaggaggagctggcaaccagtggaggacagtctcccacaggggaacagataccccagtttcagcagagacagaaggaattaaagaaggaggtcatggagcacaggctggtgttggacacagtgaatgaggtgagccgtgctctcttagagctggtgccctggagagccagagaagggctggataaacttgtgtccgatgctaacgagcagtacaaactagtcagtgacactattggacaaagggtggatgaaattgatgctgctattcagagatcacaacagtatgagcaagctgccgatgcagaactagcttgggttgctgaaacaaaacggaaactgatggctctgggtccaattcgcctggaacaggaccagaccacagctcagcttcaggtacagaaggctttctccattgacattattcgacacaaagattcaatggatgaactcttcagtcaccgtagtgaaatctttggcacatgtggggaggagcaaaaaactgtattacaggaaaagacagagtctctaatacagcaatatgaagccattagcctactcaattcagagcgttatgcccgcctagagcgggcccaggtcttagtaaaccagttttgggaaacttatgaagagctcagcccctggattgaggaaactcgggcactaatagcacagttaccctctccagccattgatcatgagcagctcaggcagcaacaagaggaaatgaggcaattaagggaatctattgctgaacacaaacctcatattgacaaactactaaagataggcccacaactaaaggaattaaaccctgaggaaggggaaatggtggaagaaaaataccagaaagcagaaaacatgtatgcccaaataaaggaggaggtgcgccagcgagccctggctctggatgaagccgtgtcccagtccacacagattacagagtttcatgataaaattgagcctatgttggagacactggagaatctttcctctcgcctgcgtatgccaccactgatccctgctgaagtagacaagatcagagagtgcatcagtgacaataagagtgccaccgtggagctagaaaaactgcagccatcctttgaggccttgaagcgccgtggagaggagcttattggacgatctcagggagcagacaaggatctggctgcaaaagaaatccaggataaattggatcaaatggtattcttctgggaggacatcaaagctcgggctgaagaacgagaaatcaaatttcttgatgtccttgaattagcagagaagttctggtatgacatggcagctctcctgaccaccatcaaagacacccaggatattgtccatgacttggaaagcccaggcattgatccttccatcatcaaacaacaggttgaagctgctgagactattaaggaagagacagatggtctgcatgaagagctggagtttattcggatccttggagcagatttgatttttgcctgtggagaaactgagaagcctgaagtgaggaagagcattgatgagatgaataatgcttgggagaacttaaacaaaacatggaaagagaggctagaaaaacttgaggatgctatgcaagctgctgtgcagtatcaggacactcttcaggctatgtttgactggctagataacactgtgattaaactctgcaccatgccccctgttggcactgacctcaatactgttaaagatcagttaaatgaaatgaaggagttcaaagtagaagtttaccaacagcaaattgagatggagaagcttaatcaccagggtgaactgatgttaaagaaagctactgatgagacggacagagacattatacgagaaccactgacagaactcaaacacctctgggagaacctgggtgagaaaattgcccaccgacagcacaaactagaaggggctctgttggcccttggtcagttccagcatgccttagaggaactaatgagttggctgactcataccgaagagttgttagatgctcagagaccaataagtggagacccaaaagtcattgaagttgagctcgcaaagcaccatgtcctaaaaaatgatgttttggctcatcaagccacagtggaaacagtcaacaaagctggcaatgagcttcttgaatccagtgctggagatgatgccagcagcttaaggagccgtttggaagccatgaaccaatgctgggagtcagtgttacagaaaacagaggagagggagcagcagcttcagtcaactctgcagcaggcccagggcttccacagtgaaattgaagatttcctcttggaacttactagaatggagagccagctttctgcatctaagcccacaggaggacttcctgaaactgctagggaacagcttgatacacatatggaactctattcccagctgaaagccaaggaagagacttataatcaactacttgacaagggcagactcatgcttctaagccgtgacgactctgggtctggctccaagacagaacagagtgtagcacttttggagcagaagtggcatgtggtcagcagtaagatggaagaaagaaagtcaaagctggaagaggccctcaacttggcaacagaattccagaattccctacaagaatttatcaactggctcactctagcagagcagagtttaaacatcgcttctccaccaagcctgattctaaatactgtcctttcccagatagaagagcacaaggtttttgctaatgaagtaaatgctcatcgagaccagatcattgagctggatcaaactgggaatcaattaaagttccttagccaaaagcaggatgttgttctgatcaagaatttgttggtgagcgtgcagtctcgatgggagaaggttgtccagcgatctattgaaagagggcgatcactagatgatgccaggaagcgggcaaaacaattccatgaagcttggaaaaaactgattgactggctagaagatgcagagagtcacctggactcagaactagagatatccaatgacccagacaaaattaaacttcagctttctaagcataaggagtttcagaagactcttggtggcaagcagcctgtgtatgataccacaattagaactggcagagcactgaaagaaaagactttgcttcccgaagatactcagaaacttgacaatttcctaggagaagtcagagacaaatgggatactgtttgtggcaagtctgtggagcggcagcacaagttggaggaagccctgctcttttcgggtcagttcatggatgctttgcaggcattggttgactggttatacaaggtggagccacagctggctgaggaccagcccgtgcacggggaccttgacctcgtcatgaacctcatggatgcacacaaggttttccagaaggaactgggaaagcgaacaggaaccgttcaggtcctgaagcggtcaggccgagagctgattgagaatagtcgagatgacaccacttgggtaaaaggacagctccaggaactgagcactcgctgggacactgtctgtaaactctctgtttccaaacaaagccggcttgagcaggccttaaaacaagcggaagtgtttcgagacacagtccacatgctgttggagtggctttctgaagcagagcaacttcgctttcggggagcacttcctgatgacacagaggccctgcagtctctcattgacacccataaggaattcatgaagaaagtagaagaaaagcgagtggacgttaactcagcagtagccatgggagaagtcatcctggctgtctgccaccccgattgcatcacaaccatcaaacactggatcaccatcatccgagctcgcttcgaggaggtcctgacatgggctaagcagcaccagcagcgtcttgaaacggccttgtcagaactggtggctaatgctgagctcctggaagaacttctggcatggatccagtgggctgagaccaccctcattcagcgggatcaggagccaatcccgcagaacattgaccgagttaaagcccttatcgctgagcatcagacatttatggaggagatgactcgcaaacagcctgacgtggaccgggtcaccaagacatacaaaaggaaaaacatagagcctactcacgcgcctttcatagagaaatcccgcagcggaggcaggaaatccctaagtcagccaacccctcctcccatgccaatcctttcacagtctgaagcaaaaaacccacggatcaaccagctttctgcccgctggcagcaggtgtggctgttagcactggagcggcaaaggaaactgaatgatgccttggatcggctggaggagttgaaagaatttgccaactttgactttgatgtctggaggaaaaagtatatgcgttggatgaatcacaaaaagtctcgagtgatggatttcttccggcgcattgataaggaccaggatgggaagataacacgtcaggagtttatcgatggcattttagcatccaagttccccaccaccaagttagagatgactgctgtggctgacattttcgaccgagatggggatggttacattgattattatgaatttgtggctgctcttcatcccaacaaggatgcgtatcgaccaacaaccgatgcagataaaatcgaagatgaggttacaagacaagtggctcagtgcaaatgtgcaaaaaggtttcaggtggagcagatcggagagaataaataccggtttggggattctcagcagttgcggctggtccgtattctgcgcagcaccgtgatggttcgcgttggtggaggatggatggccttggatgaatttttagtgaaaaatgatccctgccgagcacgaggtagaactaacattgaacttagagagaaattcatcctaccagagggagcatcccagggaatgacccccttccgctcacggggtcgaaggtccaaaccatcttcccgggcagcttcccctactcgttccagctccagtgctagtcagagtaaccacagctgtacatccatgccatcttctccagccaccccagccagtggaaccaaggttatcccatcatcaggtagcaagttgaaacgaccaacaccaacttttcattctagtcggacatcccttgctggtgataccagcaatagttcttccccggcctccacaggtgccaaaactaatcgggcagaccctaaaaagtctgccagtcgccctgggagtcgggctgggagtcgagccgggagtcgagccagcagccggcgaggaagtgacgcttctgactttgacctcttagagacgcagtctgcttgttccgacacttcagaaagcagcgctgcagggggccaaggcaactccaggagagggctaaacaaaccttccaaaatcccaaccatgtctaagaagaccaccactgcctcccccaggactccaggtcccaagcgataacactgtctaagcacccccaagccactatccactttgaatcctgctccatacattgggtgtatatttattctgaacgggagaagttatattgttaaaagtgtaaaagaataattgtgttatgaagctgccttattttttttctttttgtaagttactattttcatgtgaatatttatgtagataaaatttgcctcctggtaaccctgtaatggatggggcccagaaatgaaatatttgagaaaaacaagtgaaaaggtcaagatacaaatgtgtattaaaaaaaaaaaaaagcctattaatagggtttctgcgcggtgcagggttgtaaacctgctttatcttttaggattattcctaaatgcatcttctttataaacttgacttgctatctcagcaagataaattatattaaaaaaataagaatcctgcagtgtttaaggaactctttttttgtaaatcacggacacctcaattagcaagaactgaggggagggctttttccattgtttaatgttttgtgatttttagctaaagagagggaacctcatctaagtaacatttgcacatgatacagcaaaaggagttcattgcaatactgtctttggatattgtttcagtactgggtgtttaaaggacaaatagctgcta

SEQ ID NO: 23135 - DNA, 999 bp, Homo Sapiens
cggagcccacattagcttttgaagggaatatgggctgggcatggtggctcatgcctataatcccagcactttgggaggccgaggtgggtggatcatctgaggtcaggagttcgagcccagcccacattagcttttgaagggaatatttttatgttcataggaaaaaaagcatagctcctctatataaccaacttcttttagtactactgatagctagtatgttaagtttgatggactaattataatcttttttttatattcctagtatgctggattctatgattggcagatttaacatttatccttctcgtaattcacaaccctaaagttccatttactaataatttataattttgctggaacatgaatttgaatcttacatgcaacaattggattgagagttttgggagggcagtatgtgggacctgttcacatagtccatcagtctagcagccccatctcagtgtggctttgtttttgcaatttgactttgagtttgtggtaactcctgtggtgtaaatcattgcttcaggttctgagcaacagtgtatattatagctgcattgcaggtttcaggatttgcagggtatggggatgtatccaccattattgttaaagatttaccttagcagacacattagtatactcttctatttaaaaatcctttataagagtggtattatatggctatcctggtattctttcatattgttagtactttgaaatttttgctgatgttcaattagtaaaattaatggccccctaacagcagttgtactgtttgtatgttaaacttgatacatttagaagttaatgttaaagcctaatcctaaatttttaaaaggtgaaaaagtttttactggcaattgggtggccttgggacctgtgtgaagagcatagactgtagtttggtggaaagagcaaagactttgaagttctcggattctgtgtgtattctgctcctagcagagtgacctcaggcaaatgactttataggca

SEQ ID NO: 23136 - DNA, 3210 bp, Homo Sapiens
gagctcaatccctgggcagggaaaagggggtcctcggggctccccgctcgctgtcctttttctggacaggcagttccttggccacctggtagggccgcgttgcctggcaacggcagggtccttcttggctcggcggcgctcggggcctgaggggagaaaaccgccgcggagggcactgggggtggcggcacggtccgggaggtggtcgcgcgactgctggagccaggtctccacctctgcacctgagagaagatgaacacggccgaccaggccagggtggggcccgcggacgacgggcctgcgccgtctggggaggaggagggagaggggggcggcgaggcgggcgggaaggagccagcagcggacgcggccccggggcccagcgctgcattccgcctcatggtgactcggcgggagccggccgtgaagctgcagtatgcggtgagcggcctggaaccgctggcttggtccgaggaccaccgcgtgtctgtgtccacggcccgcagcatcgctgtgctggagctcatctgcgacgtgcacaacccgggccaggacctggttatccaccgcacctcggtgcccgcaccgctcaacagctgtctcctcaaagttggctcaaaaacagaagttgctgagtgcaaggagaaattcgccgcctccaaggaccccacggtcagtcagactttcatgttggatagggtgttcaaccctgaggggaaggctttaccaccaatgagaggattcaagtacaccagctggtctcccatgggttgcgatgctaatggcaggtgcctcttggcagcactgaccatggacaatcgcctgaccatccaggcaaatctcaacagactgcagtgggtccagctggttgacctgactgagatctatggagaacgtctttatgagaccagttacaggctctctaaaaatgaggccccggaaggaaatctcggggattttgctgagtttcagaggagacacagcatgcagaccccagtcagaatggagtggtcgggcatctgtaccacccagcaggtcaagcataacaacgaaagccgggacgttggcagtgtgctcctggctgtcctctttgaaaacggtaatatcgccgtgtggcagtttcagctgccgtttgtaggaaaagaatccatctcttcatgcaacacaattgagtcaggaatcacctctcccagtgtattgttttggtgggaatatgagcacaataatcgaaaaatgagtggccttattgtggggagtgcttttggacccataaaaattcttcctgtcaatctcaaagcagtcaaaggctatttcactttaaggcagcctgttatcttgtggaaagaaatggaccagttacctgtgcacagtatcaaatgtgtgccactttatcatccttaccagaagtgtagttgcagcttagtagtggctgcaagaggctcttatgtattttggcgtcttcttctgatctccaaagcagggctgaatcttcacaattcccatgtcacaggccttcactcactgccaattgtctccatgactgcagacaaacagaatggaacagtctatacttgctccagtgacggaaaggtgaggcaggtgattccgattttcacagatgttgcattgaagtttgaacaccagttgattaaactctcagatgtgtttggctcagtgaggactcacgggatagcagtgaagccctgcggtgcatacctggccatcatcaccactgagggcatgatcaacggcctccaccctgttaacaaaaactaccaggtccaatttgttactctcaaaacctttgaagaagcagctgctcagctcctggaatcttcagttcaaaacctttttaagcaggtagatttaatagacctagtacgctggaagattttaaaagataaacatatccctcaatttttacaagaagctttggaaaaaaagattgaaagcagtggagtcacctatttttggcgttttaagcttttcctcctgaggattttatatcagtcaatgcagaaaaccccttcagaagccttgtggaaacccacccatgaggactcaaaaatcttactagtggattcgcctgggatgggcaatgctgacgatgaacagcaggaagaaggcacttcttccaaacaggtggtgaagcaaggcctgcaggagaggagcaaggaaggagatgtagaggagcccactgatgactcgctccccacgactggagatgctggaggccgtgagccaatggaagagaaactcctggaaatccaagggaaaatcgaagctgtggagatgcacttgaccagggaacacatgaagccagtcttaggagaagtgtatctgcacacctggatcacagaaaacactagcatccccacccgcggactctgtaactttttaatgtctgatgaagagtatgatgacagaactgcacgggtgctgattggacatatctcaaagaagatgaacaaacagactttccctgagcactgtagtttgtgtaaagagatcttgccattcacagatcgcaaacaggcagtctgttccaatggccacatttggctccggtgcttcttaacctaccagtcctgccagagtttgatatatagaaggtgtttgctccatgacagcattgcccggcatccagctccagaagatcccgactggattaagaggttactgcaaagcccctgccctttctgtgattctcctgtcttctaaataatcagtgacgggaagatggaagggcatgatgaactctgccatagaaaacttcctccagcctgaagagaaggatgcactggaggaagccggaccctcacgagtggagagaagtccttggtgatcgtaaagagggcccctggagctcatttctgaatcgcactctccatttccagagactaaaggatgtcctttggaaatggctggactcagagagttggagtgcttttcacatgagcattagccccagctttgtaaccaatgaggaacacttacttgtttttaagtatcttgacgaagcaatttgaacacagtgtcccgtcatttctagaaacagaatggtctcttctagagagcttggataagaccttgctgggttgagttaggttttaatccttgccttggtttggaactgccttcgggctccagaacttaaattgcttggtccgtggcatctgatgtaccaacagagattaaaagtgggaattc

SEQ ID NO: 23137 - DNA, 1268 bp, Homo Sapiens
ccgggggcttctcagttttattttatcaatctatatgcatatccttatgccagtctcacacagtgttaattactgtagctttgtagtcagttttgaaatcaagaagtatgagtccttcgttcttatttttcaaaattatcttggctgttctgtgtcccgtgtgtttctagataaattttaggatcatcttgtcaatttctggggatattggctgggttcttggtttacttccatgtgttctctttaaatggctagactgggctttggttttttcagtatcgggttggaatctgagaggggaaatggaaacgaaggagaagccgaagcccaccccagattacctgatgcagctgatgaacgacaagaagctcatgagcagcctgcccaacttctgcgggatcttcaaccacctcgagcggctgctggacgaagaaattagcagagtacggaaagacatgtacaatgacacattaaatggcagtacagagaaaaggagtgcagaattgcctgatgctgtgggacctattgttcagttacaagagaaactttatgtgcctgtaaaagaatacccagattttaattttgttgggagaatccttggacctagaggacttacagccaaacaacttgaagcagaaaccggatgtaaaatcatggtccgaggcaaaggctcaatgagggataaaaaaaaggaggagcaaaatagaggcaagcccaattgggagcatctaaatgaagatttacatgtactaatcactgtggaagatgctcagaacagagcagaaatcaaattgaagagagcagttgaagaagtgaagaaattattggtacctgcagcagaaggagaagacagcctgaagaagatgcagctgatggagcttgcgattctgaatggcacctacagagatgccaacattaaatcaccagcccttgccttttctcttgcagcaacagcccaggctgctccaaggatcattactgggcctgcgccggttctcccaccagctgccctgcgtactcctacgccagctggccctaccataatgcctttgatcagacaaatacagaccgctgtcatgccaaacggaactcctcacccaactgctgcaatagttcctccagggcccgaagctggtttaatctatacaccctatgagtacccctacacattggcaccagctacatcaatccttgagtatcctattgaacctagtggtgtattagagtggattgaaatgccagtcatgcctgatatttcagcccattga

SEQ ID NO: 23138 - DNA, 1316 bp, Homo Sapiens
ccgggggcttctcagttttattttatcaatctatatgcatatccttatgccagtctcacacagtgttaattactgtagctttgtagtcagttttgaaatcaagaagtatgagtccttcgttcttatttttcaaaattatcttggctgttctgtgtcccgtgtgtttctagataaattttaggatcatcttgtcaatttctggggatattggctgggttcttggtttacttccatgtgttctctttaaatggctagactgggctttggttttttcagtatcgggttggaatctgagaggggaaatggaaacgaaggagaagccgaagcccaccccagattacctgatgcagctgatgaacgacaagaagctcatgagcagcctgcccaacttctgcgggatcttcaaccacctcgagcggctgctggacgaagaaattagcagagtacggaaagacatgtacaatgacacattaaatggcagtacagagaaaaggagtgcagaattgcctgatgctgtgggacctattgttcagttacaagagaaactttatgtgcctgtaaaagaatacccagattttaattttgttgggagaatccttggacctagaggacttacagccaaacaacttgaagcagaaaccggatgtaaaatcatggtccgaggcaaaggctcaatgagggataaaaaaaaggaggagcaaaatagaggcaagcccaattgggagcatctaaatgaagatttacatgtactaatcactgtggaagatgctcagaacagagcagaaatcaaattgaagagagcagttgaagaagtgaagaaattattggtacctgcagcagaaggagaagacagcctgaagaagatgcagctgatggagcttgcgattctgaatggcacctacagagatgccaacattaaatcaccagcccttgccttttctcttgcagcaacagcccaggctgctccaaggatcattactgggcctgcgccggttctcccaccagctgccctgcgtactcctacgccagctggccctaccataatgcctttgatcagacaaatacagaccgctgtcatgccaaacggaactcctcacccaactgctgcaatagttcctccagggcccgaagctggtttaatctatacaccctatgagtacccctacacattggcaccagctacatcaatccttgagtatcctattgaacctagtggtgtattaggtgcggtggctactaaagttcgaaggcacgatatgcgtgtccatccttaccaaaggattgtgaccgcagaccgagccgccaccggcaactaa

SEQ ID NO: 23139 - DNA, 952 bp, Homo Sapiens
ttcggcacgagtctttatccttcaggcagttctacaactctcctctcaggaggcccgctacaaagcatttgggacatgtgtctctcacataggtgccatcttagccttctacacaccttcagtcatctcttcagtcatgcaccgtgtggcccgctgtgctgcgccacacgtccacattctcctcgccaatttctatctgctcttcccacccatggtcaatcccatcatctacggcgttaagaccaagcagatccgtgacagtcttgggagtattcccgagaaaggatgtgtgaatagagagtgaggaataagtggaaaaagagtggggcacagtgaagctgtaagtgggccagggctgtgctgagagtagatgggtgctagactccacgtttagttcttttcttgtattatggaaagaataaatgatgtcctgaagctcagtgccaacagtctgtttagaatttgtgggtctttgcccttggtagcctctggattgaacctggggactgtgctgtctcctcacagagccctgactcctgtcagtaaacttgacagagtcttgaccctccggcctcatggtgactttgctgaaggacacaaagatgcttccaagttcattgcctaagagaagactgtgaaaatctgaatttccatctctgacttgttggaaatttggtgaattatccactcagattcccgagttaggacctctactccatccagtgcaggagttctgctacattctaacagttgaaccctagactctacctaaacactgtcagtgctggtgcacatgcatcctttaggcctatttattccaagtgagacagctctgcttgttagaaggttatttcttcaactaagccagtctgtattctttgacttctttttacctcctcatcctcatggctattccatctcattaaatactttgaaaaaaaaaaaaaaaaaa

SEQ ID NO: 23140 - DNA, 1975 bp, Homo Sapiens
  misc_feature (921)..(921): n is a, c, g, or t
ttttgctgttcgatctggtggagctactggcgtggtagttaaaggcccagatgataggaatcccatctcatttagaatggatgacaaaggagaagtgaagtgcattaagttttccttagaaaataagatattggctgttcagaggacctcaaagactgtggatttttgtaattttatccctgataattcccagctggaatacacacaggagtgcaagactaagaatgccaacattctaggattctgctggactagttcaactgaaattgtcttcataacagatcaaggaatcgaattttaccaggtattaccagagaaacggagtctgaaactcttgaagagccacaatctcaatgtgaattggtacatgtactgccccgagagcgccgtgatcttgctgtctaccacggtcctggagaatgtcctgctgccttttcactttagggctggcactatgtcgaagctgcccaaatttgagattgaattaccagctgcgcctaagtcaactaaacccagcctttccgaacgagacatcgcaatggctaccatatacgggcagctgtatgttctcttcttgaggcatcattctcggacctccaacagcacaggagcggaggtggtcctctatcatctaccacgagaaggtgcctgtaaaaagatgcacatattgaagttaaataggacgggaaagtttgccctgaacgtggtggacaacctggtagtcgtgcatcatcaggatacagagacatcggtaatattcgatatcaagttacggggagagtttgacggctccgttaccttccaccaccccgtgcttcctgctcgatcgatccagccctatcagatccccatcacaggtcctgctgccgtgaccagccagtctcctgttccatgtaaactctattcttcatcttggattgnctttcaacctgacatcattatcagcgcaagccaaggttacctctggaacctccaagtgaaacttgagcccatagtaaatctcttaccagacaaaggaagactcatggactttctcctccagagaaaggaatgcaagatggtcatcctgtctgtctgttcacagatgttaagtgagtcagacagagcatcgctgcccgtgatagccactgtttttgataaactcaaccatgagtataaaaagtacctggatgccgagcagagttatgcgatggcggtggaagcagggcagagccgaagcagcccgctcctcaagaggccggtgcggacccaggcggtgctggaccagtcagatgtgtacacccatgtcctgtcagccttcgtggatttcttcctctacggagtatttaaacactatcggcaaaagaaggagatgcctcataaatttgtgatagccgtgctgatggaatacattcgttctcttaaccagtttcagattgcagtacagcattacctacatgaacttgttatcaaaacccttgtccagcacaaccttttttatatgctgcatcagttcctgcagtaccacgtcctcagcgactccaaacctttggcttgtctgctgttatccctagagagtttctatcctcctgctcatcagctatctctggacatgctgaagcgactttcaacagcaaatgatgaaatagtagaagttctcctttccaaacaccaagtgttagctgccttaaggtttatccggggcattggtggccatgacaacatttctgcacgaaaatttttagatgctgcaaagcagactgaagacaacatgcttttctatacaatattccgcttttttgaacagcgaaaccagcgtttgcgagggagccccaatttcacaccaggggaacactgtgaagaacatgttgcttttttcaaacagatttttggagaccaagctctaatgaggcctacaacattctgaaatcacttgctgtttttttatataaaaatgtgtacaaagttaatttattgcattaataaagctctttaa

SEQ ID NO: 23141 - DNA, 1838 bp, Homo Sapiens
cgccgtgcgcaggcgcggagctagacctcgctgcagcccccatcgcctcggggagtctcacccaccgagtccgcccgctggcccgtcagtgctctccccgtcgtttgccctctccagttcccccagtgcctgccctacgcaccccgatggcggagctgcggcctagcggcgcccccggccccaccgcgcccccggcccctggcccgactgcccccccggccttcgcttcgctctttcccccgggactgcacgccatctacggagagtgccgccgcctttaccctgaccagccgaacccgctccaggttaccgctatcgtcaagtactggttgggtggcccagaccccttggactatgttagcatgtacaggaatgtggggagcccttctgctaacatccccgagcactggcactacatcagcttcggcctgagtgatctctatggtgacaacagagtccatgagtttacaggaacagatggacctagtggttttggctttgagttgacctttcgtctgaagagagaaactggggagtctgccccaccaacatggcccgcagagttaatgcagggcttggcacgatacgtgttccagtcagagaacaccttctgcagtggggaccatgtgtcctggcacagccctttggataacagtgagtcaagaattcagcacatgctgctgacagaggacccacagatgcagcccgtgcagacaccctttggggtagttaccttcctccagatcgttggtgtctgcactgaagagctacactcagcccagcagtggaacgggcagggcatcctggagctgctgcggacagtgcctattgctggcggcccctggctgataactgacatgcggaggggagagaccatatttgagatcgatccacacctgcaagagagagttgacaaaggcatcgagacagatggctccaacctgagtggtgtcagtgccaagtgtgcctgggatgacctgagccggccccccgaggatgacgaggacagccggagcatctgcatcggcacacagccccggcgactctctggcaaagacacagagcagatccgggagaccctgaggagaggactcgagatcaacagcaaacctgtccttccaccaatcaaccctcagcggcagaatggcctcgcccacgaccgggccccgagccgcaaagacagcctggaaagtgacagctccacggccatcattccccatgagctgattcgcacgcggcagcttgagagcgtacatctgaaattcaaccaggagtccggagccctcattcctctctgcctaaggggcaggctcctgcatggacggcactttacatataaaagtatcacaggtgacatggccatcacgtttgtctccacgggagtggaaggcgcctttgccactgaggagcatccttacgcggctcatggaccctggttacaactctgaacctatcctcggagctctgccctcccgtcctggaacgtctttctgccctgaggagagggtagtcagcatctccaattttcagcagctcaagaaccttggcccccacaggacttcgcagatgtcacattgcccctcagtcccctgaatgcccttcggacccaaccccaattccccaagcccctgaccccctagctgccggggttcccactcccagtgccacaaccccctcacctccctggcagcccctcagcgagcctgaggcccagcacccgctggctccccagcacatggtcccctcccatgggctgttgcccagggaaccggggcgcggtgggaacgagctgctggcctcggcatgtttcaataaagttgctgtgctgggagctactc

SEQ ID NO: 23142 - DNA, 1758 bp, Homo Sapiens
aggagaaaagggcgctggggctcggcgggaggaagtgctagagctctcgactctccgctgcgcggcagctggcggggggagcagccaggtgagcccaagatgctgctgcgctcgaagcctgcgctgccgccgccgctgatgctgctgctcctggggccgctgggtcccctctcccctggcgccctgccccgacctgcgcaagcacaggacgtcgtggacctggacttcttcacccaggagccgctgcacctggtgagcccctcgttcctgtccgtcaccattgacgccaacctggccacggacccgcggttcctcatcctcctgggttctccaaagcttcgtaccttggccagaggcttgtctcctgcgtacctgaggtttggtggcaccaagacagacttcctaattttcgatcccaagaaggaatcaacctttgaagagagaagttactggcaatctcaagtcaaccaggatatttgcaaatatggatccatccctcctgatgtggaggagaagttacggttggaatggccctaccaggagcaattgctactccgagaacactaccagaaaaagttcaagaacagcacctactcaagaagctctgtagatgtgctatacacttttgcaaactgctcaggactggacttgatctttggcctaaatgcgttattaagaacagcagatttgcagtggaacagttctaatgctcagttgctcctggactactgctcttccaaggggtataacatttcttgggaactaggcaatgaacctaacagtttccttaagaaggctgatattttcatcaatgggtcgcagttaggagaagattttattcaattgcataaacttctaagaaagtccaccttcaaaaatgcaaaactctatggtcctgatgttggtcagcctcgaagaaagacggctaagatgctgaagagcttcctgaaggctggtggagaagtgattgattcagttacatggcatcactactatttgaatggacggactgctaccagggaagattttctaaaccctgatgtattggacatttttatttcatctgtgcaaaaagttttccaggtggttgagagcaccaggcctggcaagaaggtctggttaggagaaacaagctctgcatatggaggcggagcgcccttgctatccgacacctttgcagctggctttatgtggctggataaattgggcctgtcagcccgaatgggaatagaagtggtgatgaggcaagtattctttggagcaggaaactaccatttagtggatgaaaacttcgatcctttacctgattattggctatctcttctgttcaagaaattggtgggcaccaaggtgttaatggcaagcgtgcaaggttcaaagagaaggaagcttcgagtataccttcattgcacaaacactgacaatccaaggtataaagaaggagatttaactctgtatgccataaacctccataacgtcaccaagtacttgcggttaccctatcctttttctaacaagcaagtggataaataccttctaagacctttgggacctcatggattactttccaaatctgtccaactcaatggtctaactctaaagatggtggatgatcaaaccttgccacctttaatggaaaaacctctccggccaggaagttcactgggcttgccagctttctcatatagtttttttgtgataagaaatgccaaagttgctgcttgcatctgaaaataaaatatactagtcctgacactg

SEQ ID NO: 23143 - DNA, 1707 bp, Homo Sapiens
atgcctagcacagaccttctgatgttgaaggcctttgagccctacttagagattttggaagtatactccacaaaagccaagaattatgtaaatggacattgcaccaagtatgagccctggcagctaattgcatggagtgtcgtgtggaccctgctgatagtctggggatatgagtttgtcttccagccagagagtttatggtcaaggtttaaaaagaaatgttttaagctcaccaggaagatgcccattattggtcgtaagattcaagacaagttgaacaagaccaaggatgatattagcaagaacatgtcattcctgaaagtggacaaagagtatgtgaaagctttaccctcccagggtctgagctcatctgctgttttggagaaacttaaggagtacagctctatggacgccttctggcaagaggggagagcctctggaacagtgtacagtggggaggagaagctcactgagctccttgtgaaggcttatggagattttgcatggagtaaccccctgcatccagatatcttcccaggactacgcaagatagaggcagaaattgtgaggatagcttgttccctgttcaatgggggaccagattcgtgtggatgtgtgacttctgggggaacagaaagcatactcatggcctgcaaagcatatcgggatctggcctttgagaaggggatcaaaactccagaaattgtggctccccaaagtgcccatgctgcatttaacaaagcagccagttactttgggatgaagattgtgcgggtcccattgacgaagatgatggaggtggatgtgagggcaatgagaagagctatctccaggaacactgccatgctcgtctgttctaccccacagtttcctcatggtgtaatagatcctgtccctgaagtggccaagctggctgtcaaatacaaaataccccttcatgtcgacgcttgtctgggaggcttcctcatcgtctttatggagaaagcaggatacccactggagcacccatttgatttccgggtgaaaggtgtaaccagcatttcagctgacacccataagtatggctatgccccaaaaggctcatcattggtgttgtatagtgacaagaagtacaggaactatcagttcttcgtcgatacagattggcagggtggcatctatgcttccccaaccatcgcaggctcacggcctggtggcattagcgcagcctgttgggctgccttgatgcacttcggtgagaacggctatgttgaagctaccaaacagatcatcaaaactgctcgcttcctcaagtcagaactggaaaatatcaaaggcatctttgtttttgggaatccccaattgtcagtcattgctctgggatcccgtgattttgacatctaccgactatcaaacctgatgactgctaaggggtggaacttgaaccagttgcagttcccacccagtattcatttctgcatcacattactacacgcccggaaacgagtagctatacaattcctaaaggacattcgagaatctgtcactcaaatcatgaagaatcctaaagcgaagaccacaggaatgggtgccatctatggcatggcccagacaactgttgacaggaatatggttgcagaattgtcctcagtcttcttggacagcttgtacagcaccgacactgtcacccagggcagccagatgaatggttctccaaaaccccactga

SEQ ID NO: 23144 - DNA, 3901 bp, Homo Sapiens
attacaggtgtaaatcaccacacctgggctgctttattttatagcacgtgaccctggaacgcaaaccctgatgcctgtccccaccacccgagcgctccttctctgatattggccccaagccgatgcatcacaggatgaatgaaatgaacctgagtccagtggggatggcgcagctgacttcatcctctgtgagcaatgccttgccagtctcaggaagtcacctgggattggctgcctcacccactcacagtgccatccctgccccaggcctcccagtggcaattccaaacctgggtccctccctgagctctctgccttctgctctgtctttaatgctaccaatgggtattggggatcgaggggtgatgtgtgggttacctgaaagaaactacaccctacctccaccaccttaccctcacctggagagcagttatttcagaaccattctacctggcattttatcttatttagctgacagaccacctccacagtacatccaccctaactctataaatgttgatggtaatacagcattatctatcaccaataacccttcagcactagatccctatcagtccaatggaaatgttggattagaaccaggcattgtttcaatagactctcgctctgtgaacacacatggtgcccaaagtcttcatcccagtgatggccatgaggtggccttggacacagcaatcactatggagaacgtttctagggttaccagcccaatttcgacagatggaatggcagaggagcttacgatggacggtgttgcaggcgagcattcccaaatcccaaatggctccagaagtcatgaacctctgtctgtggattctgtgagcaacaaccttgcagcagacgctgtaggacatggtggtgtgatacccatgcatgggaatggcctggagctccctgtggtcatggagacagaccacattgcaagtcgggtcaatggcatgtctgacagtgccctcagtgactccattcacactgtggccatgagcaccaactctgtaagcgtggcactctctacctcacacaaccttgcctccctagaatctgtttccctccatgaagttggcctcagcctagaacctgtggctgtctcctccatcacccaggaggttgctatggggacaggtcatgtagatgtatcttcagacagtctttcttttgtatcaccttcactgcaaatggaagactccaattcaaacaaggagaacatggcaaccttgtttacaatttggtgtactctgtgtgaccgcgcctatccctcggactgtcccgaacatggaccagtgacttttgttcctgacactccaatagagagcagagcaaggctttctctcccaaagcagcttgttctccgtcagtcaattgtgggagcagaagttggtgtatggactggagaaaccattcctgtgcggacttgctttggacctctaattggccagcagagtcactccatggaagtagcagaatggacagacaaggcagttaaccatatctggaagatataccacaatggtgtcctagaattctgcatcattacaactgatgaaaatgaatgtaattggatgatgtttgtgcgcaaagccaggaaccgggaagagcagaatttggtggcttatcctcatgatggaaaaatctttttctgcacctcacaagatatccctcctgaaaatgaactgcttttttattatagccgagattatgctcaacagattggtgttcctgaacacccagatgtgcatctctgtaactgtggcaaggagtgcaattcttacacagagttcaaagcccatctgaccagccacatccataaccatcttcctacccagggacatagcggcagcatcgggccaagtcacagcaaagaaaggaagtggaagtgctcaatgtgcccccaagcttttatctctccttccaaacttcatgtctactttatgggtcacatgggtatgaagccccacaagtgtgatttctgtagcaaggcttttagtgatcccagcaacctgcggacccacctcaagatacatacaggtcagaagaactacaggtgtaccttgtgtgacaagtctttcacccagaaggctcacctgggagtccacatggttatccacactggggagaagaatcttaagtgtgattactgtgacaagttgtttatgcggaggcaggacctcaagcagcacgtgctcatccacactcaagaacgccagatcaagtgtcccaagtgtgataagctgttcttgagaacaaatcacttaaagaagcatctcaattctcatgaaggaaaacgggattatgtctgtgaaaaatgtacaaaggcttatctaaccaaataccatctcacccgccacctgaaaacctgcaaagggcccacctccagttcgtcagcaccagaggaggaagaagaggatgactcagaagaggaagatctagcagactctgtggggacagaagactgtaggattaacagtgctgtgtattcagcggatgagtctctttctgcacataaataaaaggaaaggaaccggcatttctggatgaaaatgcaaatggaaaaatacacatacccagttatctactataatggtttttatataaaatggttctgatttattttcagccagtaatcaaaacagactgggaatgaataaagcacttacagaagagtctctaatgaaaacactttaaaacagattgggaaaactgagcatgtgtcctattttaagtggtggactgggagggaagtgtaacttctgaggctttattacatgataatctgggagatgcatttatctgaatcaaagctgccttctgctcaaacaaatcagatttatttcacattcttccattattccattttcctgctggtcctgtgacttggtaacattctaaacggtccttgccccatagccatcctgattgctgatagtgttttatgcagactcttgtgacttatactcaccacagaatggattgggacacagcagcataagtgtgctacttggcagctagtaagtttaaagcaggacctgccttaactgctcctggccacttggaagtttagggtagatcttgttttccaaagtttcggcaggtgctggagggcaaataaaaaagcagcagtcagtcagtagtcagtgatggagagaacaagaggagagatgcctggcctctgcccaagaaattagctttgatggaagcctgagcaagtcacctggttattgtaacgtggagatctttgtaggtttagacatggctccctgtctccagtaaacatccagccattcagacaaagggggcctggagatacagagagcccaaataatgcctgctggattgtctcctgatgagtacatgtggactcacctgaggaagggaaggaagggaataatcttttatgtttcatttaccttatgaaaagtgttaaaacattgccaactcaaaataacattatttaatgcatgtgcaaagttaggtcttcccagttgtctcagtgctgaggaacctcatcagagaagcatggaagatgccaaaggatttttggaaggtaaagaaggctgaatagtgaccacatgggcctgttttcagggtcccagcttagttaagtcacccatgcacctggtcattgtgtctcccgtgcacatccagcgtttctcagaagcagacccacccttaagttgacaggattgatggaacatgctctcctgctcaaggcacaacctctgggctggagtagaggactctggtgggaaggttttgctgctaatgtatttatggaatgaatgtatttcattcaaatctgtattcctctaggaaggattaaaattaaacttttttaaaataccggaaaaaaaaaaaaaaaaaaaaaaaaaaaaaaaaaaaaaaa

SEQ ID NO: 23145 - DNA, 2396 bp, Homo Sapiens
ggcaccaggtctcccaggcttcctcagcgtcgacgccggggagcgccctggggttgggagcgcccggggcccgcgaaggaggaggtggctcaggtgtcagggcgcaccgtgggaaccggccccgggggaggcgtggaaacgcggggcctgggactcgaccagcctctcccgtgcggatcgcaaaatctcggagctgaaacagcccgttgttcgcagcctccctctgacccgccaccctgcacattgttttccattcgcccgggtcgcgggtgggaggagaggcacgccggggttctggagcttggccgcgcgccaggcttgtggccttcgtccccctggggccactggggcggccacgcctctccggcgggaggagagaacgcgtgggtccgggtggctgctccggcccttccgcctccagctcggccatggggtcgcgcagctcccacgccgcggtcattcccgacggggacagtattcggcgagagaccggcttctcccaagccagcctgctccgcctgcaccaccggttccgggcactggacaggaataagaagggctacctgagccgcatggatctccagcagataggggcgctcgccgtgaaccccctgggagaccgaattatagaaagcttcttccccgatgggagccagcgagtggatttcccaggctttgtcagggtcttggctcattttcgccctgtagaagatgaggacacagaaacccaagaccccaagaaacctgaacctctcaacagcagaaggaacaaacttcactatgcatttcagctctatgacctggatcgcgatgggaagatctccaggcatgagatgctgcaggttctccgtctgatggttggggtacaggtgacagaagagcagctggagaacatcgctgaccgcacggtgcaggaggctgatgaagatggggatggggctgtgtccttcgtggagttcaccaagtccttagagaagatggacgttgagcaaaaaatgagcatccggatcctgaagtgactccgtttgtgccttgggcttgctcctgcaaccagtatctccttggaattcatccaaagcccccatggacgcatggacgcagggcgacaataaactgtattttcgtttctaactctatttagggccaagagaagaaagctggaaggatgtgtactaaagtctagctcagcagtccccaacctttttggcatcagggacagtttttccacggatgggtgacaggggatggttttgggatgattcaagtgcattacatttattgtgcactttatttctattatgattacattgtaatatataatgaaataattatacaactcaccataatgtagaatcagcaggagccctgagcttgttttcctgcaattagacggtcccatatgggagtgatgggagacagtgacagatcatcaggcattagattctcataaggagtgcacaatctagatcctttggtgtgcagttcacagtaggatttgggctcctatgataatctaatgccactgctgatctgacaggaggcagagctcaggcggtaatgcaagcaatggggagtggctgtaaatatagatgaagcttcagctcgcctgccgctcaccttgtgctgtgcagcccggttcctaacagaccacagaccccacaccaggtctatctcatttggtctcagagctgtgaatcagccagcaatattttagttgcaaatcactgaaaacccaactcaaagtgacttaagtcagaaagaaattttatgaattcaggtaattaaaaagtccagaagtatctgcctttaggcacagctggatccaagggcacaaatgatgtcatcaggctccagttattctccatctcccagctcagctttttctgtctgtaagcctgattttcaggaaggctctttcctagtgatggagatgaccaccatcagctccaggcttctatcctgctaacccagtaacccagtgggaagagatttacttattccaataattccaagtggagagtgtcattgacccgtttggggtctcatctctacttctaggggaatgaaacactttgagtggccaggcctgtgtcatgtgctaattcctagagccagggaaataaggtctgaggattcaggatggggtgaaaggtggttgcttaaaggaaaatgaaatacaattagcagaataaggggaaacgagtggtctgctctgctcgggcaaaacaagagatgcccattactgtgagggacccttgaagtctggactcttaaatgggtttttgctgatttcctgggtgcatgctaggatgatggggcttgatgcagtagggaagagacgatgtaaaaataataaacaatatataccttcaaaaaaaaaaaaaaaaaaaaaaaaa

SEQ ID NO: 23146 - DNA, 5881 bp, Homo Sapiens
gggagatgaggtgggaggattgcttgagcccaggagttcaagaccagcccggggcaacatagtgaaaccctgtctgtacaaaaataaatctcgggagcgtggttgagcggctggcgcggttgtcctggagcaggggcgcaggaattctgatgtgaaactaacagtctgtgagccctggaacctccactcagagaagatgaaggatatcgacataggaaaagagtatatcatccccagtcctgggtatagaagtgtgagggagagaaccagcacttctgggacgcacagagaccgtgaagattccaagttcaggagaactcgaccgttggaatgccaagatgccttggaaacagcagcccgagccgagggcctctctcttgatgcctccatgcattctcagctcagaatcctggatgaggagcatcccaagggaaagtaccatcatggcttgagtgctctgaagcccatccggactacttccaaacaccagcacccagtggacaatgctgggcttttttcctgtatgactttttcgtggctttcttctctggcccgtgtggcccacaagaagggggagctctcaatggaagacgtgtggtctctgtccaagcacgagtcttctgacgtgaactgcagaagactagagagactgtggcaagaagagctgaatgaagttgggccagacgctgcttccctgcgaagggttgtgtggatcttctgccgcaccaggctcatcctgtccatcgtgtgcctgatgatcacgcagctggctggcttcagtggaccagccttcatggtgaaacacctcttggagtatacccaggcaacagagtctaacctgcagtacagcttgttgttagtgctgggcctcctcctgacggaaatcgtgcggtcttggtcgcttgcactgacttgggcgttgaattaccgaaccggtgtccgcttgcggggggccatcctaaccatggcatttaagaagatccttaagttaaagaacattaaagagaaatccctgggtgagctcatcaacatttgctccaacgatgggcagagaatgtttgaggcagcagccgttggcagcctgctggctggaggacccgttgttgccatcttaggcatgatttataatgtaattattctgggaccaacaggcttcctgggatcagctgtttttatcctcttttacccagcaatgatgtttgcatcacggctcacagcatatttcaggagaaaatgcgtggccgccacggatgaacgtgtccagaagatgaatgaagttcttacttacattaaatttatcaaaatgtatgcctgggtcaaagcattttctcagagtgttcagaaaatccgcgaggaggagcgtcggatattggaaaaagccgggtacttccagagcatcactgtgggtgtggctcccattgtggtggtgattgccagcgtggtgaccttctctgttcatatgaccctgggcttcgatctgacagcagcacaggctttcacagtggtgacagtcttcaattccatgacttttgctttgaaagtaacaccgttttcagtaaagtccctctcagaagcctcagtggctgttgacagatttaagagtttgtttctaatggaagaggttcacatgataaagaacaaaccagccagtcctcacatcaagatagagatgaaaaatgccaccttggcatgggactcctcccactccagtatccagaactcgcccaagctgacccccaaaatgaaaaaagacaagagggcttccaggggcaagaaagagaaggtgaggcagctgcagcgcactgagcatcaggcggtgctggcagagcagaaaggccacctcctcctggacagtgacgagcggcccagtcccgaagaggaagaaggcaagcacatccacctgggccacctgcgcttacagaggacactgcacagcgtcgatctggagatccaagagggtaaactggttggaatctgcggcagtgtgggaagtggaaaaacctctctcatttcagccattttaggccagatgacgcttctagagggcagcattgcaatcagtggaaccttcgcttatgtggcccagcaggcctggatcctcaatgctactctgagagacaacatcctgtttgggaaggaatatgatgaagaaagatacaactctgtgctgaacagctgctgcctgaggcctgacctggccattcttcccagcagcgacctgacggagattggagagcgaggagccaacctgagcggtgggcagcgccagaggatcagccttgcccgggccttgtatagtgacaggagcatctacatcctggacgaccccctcagtgccttagatgcccatgtgggcaaccacatcttcaatagtgctatccggaaacatctcaagtccaagacagttctgtttgttacccaccagttacagtacctggttgactgtgatgaagtgatcttcatgaaagagggctgtattacggaaagaggcacccatgaggaactgatgaatttaaatggtgactatgctaccatttttaataacctgttgctgggagagacaccgccagttgagatcaattcaaaaaaggaaaccagtggttcacagaagaagtcacaagacaagggtcctaaaacaggatcagtaaagaaggaaaaagcagtaaagccagaggaagggcagcttgtgcagctggaagagaaagggcagggttcagtgccctggtcagtatatggtgtctacatccaggctgctgggggccccttggcattcctggttattatggcccttttcatgctgaatgtaggcagcaccgccttcagcacctggtggttgagttactggatcaagcaaggaagcgggaacaccactgtgactcgagggaacgagacctcggtgagtgacagcatgaaggacaatcctcatatgcagtactatgccagcatctacgccctctccatggcagtcatgctgatcctgaaagccattcgaggagttgtctttgtcaagggcacgctgcgagcttcctcccggctgcatgacgagcttttccgaaggatccttcgaagccctatgaagttttttgacacgacccccacagggaggattctcaacaggttttccaaagacatggatgaagttgacgtgcggctgccgttccaggccgagatgttcatccagaacgttatcctggtgttcttctgtgtgggaatgatcgcaggagtcttcccgtggttccttgtggcagtggggccccttgtcatcctcttttcagtcctgcacattgtctccagggtcctgattcgggagctgaagcgtctggacaatatcacgcagtcacctttcctctcccacatcacgtccagcatacagggccttgccaccatccacgcctacaataaagggcaggagtttctgcacagataccaggagctgctggatgacaaccaagctcctttttttttgtttacgtgtgcgatgcggtggctggctgtgcggctggacctcatcagcatcgccctcatcaccaccacggggctgatgatcgttcttatgcacgggcagattcccccagcctatgcgggtctcgccatctcttatgctgtccagttaacggggctgttccagtttacggtcagactggcatctgagacagaagctcgattcacctcggtggagaggatcaatcactacattaagactctgtccttggaagcacctgccagaattaagaacaaggctccctcccctgactggccccaggagggagaggtgacctttgagaacgcagagatgaggtaccgagaaaacctccctctcgtcctaaagaaagtatccttcacgatcaaacctaaagagaagattggcattgtggggcggacaggatcagggaagtcctcgctggggatggccctcttccgtctggtggagttatctggaggctgcatcaagattgatggagtgagaatcagtgatattggccttgccgacctccgaagcaaactctctatcattcctcaagagccggtgctgttcagtggcactgtcagatcaaatttggaccccttcaaccagtacactgaagaccagatttgggatgccctggagaggacacacatgaaagaatgtattgctcagctacctctgaaacttgaatctgaagtgatggagaatggggataacttctcagtgggggaacggcagctcttgtgcatagctagagccctgctccgccactgtaagattctgattttagatgaagccacagctgccatggacacagagacagacttattgattcaagagaccatccgagaagcatttgcagactgtaccatgctgaccattgcccatcgcctgcacacggttctaggctccgataggattatggtgctggcccagggacaggtggtggagtttgacaccccatcggtccttctgtccaacgacagttcccgattctatgccatgtttgctgctgcagagaacaaggtcgctgtcaagggctgactcctccctgttgacgaagtctcttttctttagagcattgccattccctgcctggggcgggcccctcatcgcgtcctcctaccgaaaccttgcctttctcgattttatctttcgcacagcagttccggattggcttgtgtgtttcacttttagggagagtcatattttgattattgtatttattccatattcatgtaaacaaaatttagtttttgttcttaattgcactctaaaaggttcagggaaccgttattataattgtatcagaggcctataatgaagctttatacgtgtagctatatctatatataattctgtacatagcctatatttacagtgaaaatgtaagctgtttattttatattaaaataagcactgtgctaataacagtgcatattcctttctatcatttttgtacagtttgctgtactagagatctggttttgctattagactgtaggaagagtagcatttcattcttctctagctggtggtttcacggtgccaggttttctgggtgtccaaaggaagacgtgtggcaatagtgggccctccgacagccccctctgccgcctccccacagccgctccaggggtggctggagacgggtgggcggctggagaccatgcagagcggccgtgagttctcagggctcctgccttctgtcctggtgtcacttactgtttctgtcaggagagcagcggggcgaagcccaggccccttttcactccctccatcaatgaatggggatcacagagacattcctccgagccggggagtttctttcctgccttcttctttttgctgttgtttctaaacaagaatcagtctatccacagagagtcccactgcctcaggttcctatggctggccactgcacagagctctccagctccaagacctgttggttccaagccctggagccaactgctgctttttgaggtggcactttttcatttgcctattcccacacctccacagttcagtggcagggctcaggatttcgtgggtctgttttcctttctcaccgcagtcgtcgcacagtctctctctctctctcccctcaaagtctgcaactttaagcagctcttgctaatcagtgtctcacactggcgtagaagtttttgtactgtaaagagacctacctcaggttgctggttgctgtgtggtttggtgtgttcccgcaaaccccctttgtgctgtggggctggtagctcaggtgggcgtggtcactgctgtcatcagttgaatggtcagcgttgcatgtcgtgaccaactagacattctgtcgccttagcatgtttgctgaacaccttgtggaagcaaaaatctgaaaatgtgaataaaattattttggattttgtaaaactc

SEQ ID NO: 23147 - DNA, 3773 bp, Homo Sapiens
ggcgattgagaggggctgagggaattgtcctctgtggaagggactttcttttggccctaggccccttcctgcccctgtcgtcagcagagagatggaaaacttgatgactagctccaccctaccgcccctttttgcagatgaagacggttccaaggagagtaatgatctggctaccactgggttaaatcacccagaggttccatacagtagtggcgccacatcatccaccaacaatccagaatttgtggaggatctctctcaaggtcagttgcttcagagtgagtcttcaaatgcagcagaaggcaatgaacagaggcatgaagatgagcaacgaagtaaacgaggaggttggtccaaaggaagaaagaggaagaaacctcttcgagacagcaatgcacccaaatccccccttacaggatatgttcggttcatgaatgagcgtcgagaacaacttcgagcaaagagaccagaagtcccatttccagaaatcacaaggatgttaggcaatgaatggagtaaactgcctcctgaggaaaaacagcgctaccttgatgaagcagacagagataaggagcgttacatgaaggaactggaacagtatcagaaaacagaggcctacaaggtcttcagtaggaaaacccaggaccgtcagaaaggcaaatctcataggcaagatgcagcccggcaggccactcatgatcatgagaaagaaacagaggtaaaggaacggtctgtttttgacatccctatatttacagaggaattcttgaaccatagcaaagctcgggaagcagagctccgccagcttcgcaaatccaacatggagtttgaggagaggaatgcagccctgcaaaagcacgtggagagcatgcgcacagcagtggagaagctggaggtggatgtgatccaggagcggagccgcaacacagtcttacagcagcacctggagaccctgcggcaggtgctgaccagcagctttgccagcatgcccttgcctggaagtggagagacacctacagtggacaccattgactcatatatgaacagactgcacagtattattttagctaatccccaagacaatgaaaacttcatagctacagttcgagaagttgtgaacagactcgatcgttagggaatggtcttagaactccaagatgttccataagtgtttttacttgtgaggaatgagaagccatccatggaaatttgaactgagtgggggcagagaaagagtgcagatccctttgcttgtgaaagaattatcagtgagtgaaaggccatcaccccaggaagccaaatgagggagcagcaacatgtatatgagcttcctatggaattgtccttatgtgaagctttgaaggtgtacagccactctcccgggtcttcaggttcctaccatttccatttctgttaaagtggatctgcatatcttcagcttactaggtgacccggatgctgacatctgctgctgcagaaaggaagacttttcattgtaatttcgcttagacccttttatcagtggagctccagttttcttacctagctgtcacttttttaaatgcctctgggggttatttttgctttccttggcccccaccaatttatacatctccattttctgacctctggactaactggttgctcagcaaggttctgaaggagagtttcttgcattggacaggcccagtcttctcccatcattgccctgctgtgactccaaagaaaggagcttcttgctgacagtgccctgtggagcaaggctgtgtttcctaccccacacggtgctcagtgggtgccagccctcagtgtggctttgtgattgctgccctaaaggagaatgctctttccttcctcactggtactgcctgctgttttctaagcattgctcctgcacagacatggagtcccagccccagcaaggctcttctgttcccatctgttgacaatgtcttgtggagcatttttgctgaggaaaaggtcacttgtaaacagaggagaaagggaaagagtacaaagccctaagtttattgtaagtgaaaactgagggaattcctgtcttctttaggagtaatgattcatagatctagataggtggaaatatcattcaaaatagtcacttgagctcacaaaaaaagcaaggaagaattctcatgtcctttgtcttccttctgtagccattaactgctgaatccatgtgaggaagacaggcttcccttccttccccctccttagtgattttttctttaacagcataagtaaagaggactttctggttcatttttgtttgttttgttttgttatgttttgtttacagatgaggtcttgctgtgttgcccaggctggagtgcggtggctattcacagatgctatcatagcacactacagcctccaactcttgggctcaagcatcacgcctagcagtttctggttcctttaacagcaaaaggaaagagaggttctgattcttacctcagggttttttggttgttcattgtttttgtttttgtttttgttttgacactgcagagcacaaggctaaaggttacagctgagatctttggaaccaaaggcagagcaagcagagcccgttgtctgggccccacaccactgcaggcaggtggatagaagtgcggcccctctcatagtatgcccataagtcagggcatagggcagaactacctgtcatgttgctacaccatcctgtcttctcagcatctccttgcctgttttctttattagtccaaaggaaaacaacagcaacaaaatctgtttttaaaatgtcttatatgaacatatatcaaatatccatgcgctgaaacccacataccatcacttggcaattttttagaataagaccccattattatctattgctataaacstagccagttctcttgctcttctgtattttcctatttccctgccatcatctgctatttctgccacttctcttagactccttgtctgcaaagcccaagctagaactcactgtctatggcagaaggacatccagagcccattctggagttttgttttttccttctgccagatgctttgtgtcctgtcttccttcctcctcatatttctgtttctcatttgtgttcagttttgtgcagcattgctagcactgcttttgtgaccagaaaaggccataacatggtccaggatcatcattcttctgactctagatgggacacttgacagtgacttgaaacatttgcatattcaggaatgcatgagatttcaagagagcctacagtatgaaatcattttcacaaaataagcagcttgcttctgaaatgctgtctttcccagtagctactcacctgcctctggtggctgggattcagatgccacaaaactgtcagtatctatagaccaggtctgtgccacctcctctctcctctgtgctcagtgaggaggcagtaaatgaagttacaggctagcacaatacctaattcatgtttcccagtacacctgtagatattactgtacttttatgttctcaagaaataagttgttgcctattcagtgttacagatttctttgtttctttttaattaaaatacaagaagcagctgaggaaagggagacaaggtattttatttctgactgattttagaaaaaacttgtgtacatgtgtttggaactgttgaaatgccaagttttctgtataagtgtttttgtaattaaactttcagattttctttgttttttaagaagttgatgtgcttgtttgacatttgtctcattaaaacttttctacgtcg

SEQ ID NO: 23148 - DNA, 2180 bp, Homo Sapiens
  misc_feature (2016)..(2016): n is a, c, g, or t
gagttggcaggatggcagagggcaaggcaggcggcgcggccggcctcttcgccaagcaggtgcagaagaagtttagcagggcccaggagaaggtgctgcagaaattggggaaagctgtagaaaccaaagatgaacgatttgaacaaagcgctagcaacttctaccaacaacaggcagaaggccacaagctgtacaaggacctgaagaacttccttagtgcagtcaaagtgatgcatgaaagttcaaaaagagtgtcagaaaccctgcaggagatctacagcagcgagtgggacggtcatgaggagctgaaggccatcgtatggaataatgatctcctttgggaagactacgaggagaaactggctgaccaggctgtaaggaccatggaaatctatgttgcccagttcagtgaaattaaggagagaattgccaagcggggtcggaaactcgtggactatgacagtgcccgacaccacctggaggcagtgcagaatgccaagaaagatgaggccaagactgccaaggcagaggaagagttcaacaaagcccagactgtgtttgaagatctgaaccaagaactactagaggagctgcctattctttataatagtcgtattggctgctatgtgaccatcttccaaaacatttccaacttgagggatgtcttctacagggaaatgagcaagctgaaccacaatctctacgaggtgatgagcaaactggagaagcaacattccaataaagtctttgtggtgaagggactgtcaagcagcagcaggcgctctttagtcatttctcccccagttcgaacagctacagtctccagtcctcttacctcacctactagtccctctacactttccttgaagagtgagagtgaatctgtctcagcaactgaagatctggcacctgatgcagcccaaggggaagacaattctgagatcaaggagctcttagaagaggaggaaatagagaaggaaggatctgaagcaagctcctctgaggaagatgagcctctaccagcctgcaatggccccgcccaggcccagccctctcctaccactgagagggccaagtcccaggaggaagttctccccagctccacaactccatcaccaggcggagccctgagcccttcagggcagccttcatcatctgccacagaagtagtcctccgaacccgcaccgcaagtgaaggatctgaacaaccaaagaagagagcctctatccagaggacctcagcaccccctagtaggcctcctccacccagagccactgcaagccccaggccctcctcagggaacataccttccagccctacagcctctggagggggttcacccaccagccctagggcctccttggggactgggactgcaagtcctaggacctccctagaggtctctcctaatccagaaccaccagagaagccagtaagaactcctgaggccaaagaaaatgaaaacatccacaatcagaaccctgaagaactttgtacttcccccaccttaatgacatctcaggttgcttcagagcctggagaggcaaagaagatggaagacaaggaaaaggataataagcttatctcagctgactcctcggagggccaagaccagcttcaagtctccatggtaccagaaaacaacaacctcacagcacctgaacctcaagaagaggtatccacaagtgaaaatccacaactctgaagagaaactaccaagactcctcctgccccaaacctcgccagagaagctcttcaaccagagggtataggtcagagggatataagagccagcatccatccctgggttctcagtaggaatgctggtgctgtctaaagacctggcattaatggaggcggaggagcagccttacgggagggatggagggaggcaggctggggagaagagaacattagactcagggaatatttaattctggttttagcattattagaataagactttatacattaactaaagtggagctttaatcactataaaaagcaaaagtatntatagacacagacacttgcctatacagagacataaccacacacactcagaggatagtgaacaaatctgtctttgacttacgacccattttgcaagacttaaagccgaaagaacacattttcagattgttaaataaagtctgattctgactaaaaaaaaaaaaaa

SEQ ID NO: 23149 - DNA, 9044 bp, Homo Sapiens
  misc_feature (1227)..(1227): n is a, c, g, or t
  misc_feature (7661)..(7661): n is a, c, g, or t
  misc_feature (7823)..(7823): n is a, c, g, or t
cgaccctggagggagagagagccagagagcggccgagcgcctaggaggcccgccgagcctcgccgagccccgccagccccggcgcgagagaagttggagaggagagcagcgcagcgcagcgagtcccgtggtcgcgccccaacagcgcccgacagcccccgatagcccaaaccgcggccctagccccggccgcacccccagcccgcgccagcatgatgaacaacagcggctactcagacgccggcctcggcctgggcgatgagacagacgagatgccgtccacggagaaggacctggcggaggacgcgccgtggaagaagatccarcagaacacattcacgcgctggtgcaatgagcacctcaagtgcgtgggcaagcgcctgaccgacctgcagcgcgacctcagcgacgggctccggctcatcgcgctgctcgaggtgctcagccagaagcgcatgtaccgcaagttccatccgcgccccaacttccgccaaatgaagctggagaacgtgtccgtggccctcgagttcctcgagcgcgagcacatcaagctcgtgtccatagacagcaaggccatcgtggatgggaacctgaagctgatcctgggcctgatctggacgctgatcctgcactactccatctccatgcccatgtgggaggatgaagatgatgaggatgcccgcaaacagacgcccaagcagcggctgcttggctggatccagaacaaggtgccccagctgcccatcaccaacttcaaccgtgactggcaggacggcaaagctctgggcgccctggtggacaactgcgcccccggtctctgccccgactgggaggcctgggaccccaaccagcccgtggagaacgcccgggaggccatgcagcaggccgacgactggcttggggtgccccaggtcattgcccctgaggagattgtggaccccaacgtggatgagcattctgttatgacctacctgtcccagttccccaaggccaagctcaaacctggtgcccctgttcgatccaagcagctgaaccccaagaaagccatcgcctatgggcctggcatcgagccacagggcaacaccgtgctgcagcctgcccacttcaccgtgcagacggtggacgcgggcgtgggcgaggtgctggtctacatcgaggaccctgaaggccacaccgaggaggctaaggtggttcccaacaatgacaaggatcgcacctatgctgtancctatgtgcccaaggtcgctgggttacacaaggtgaccgtgctctttgctggccagaacattgaacgcagtccctttgaggtgaacgtgggcatggccctgggagatgccaacaaggtgtcagcccgtggccctggcctggaacctgtgggcaatgtggccaacaaacccacctactttgacatctacactgcgggggccggcactggcgatgttgctgtggtgatcgttgacccacagggccggcgggacacagtggaggtggccctggaggacaagggtgacagcacgttccgctgcacatacagacctgccatggaggggccacataccgtgcatgtggcctttgcgggtgcccccatcacccgcagtcccttccctgtccatgtgtcggaagcctgtaaccccaacgcctgccgcgcctctgggcgaggcctgcagcccaagggtgttcgcgtgaaagaggtggctgacttcaaggtgtttaccaagggtgccggcagcggggagctcaaggtcacggtcaaggggccaaagggcacagaggagccagtgaaggtgcgggaggctggggatggtgtgttcgagtgcgagtactacccggtggtgcctgggaagtatgtggtgaccatcacgtggggcggctacgccatccctcgcagcccctttgaggtacaggtgagcccagaggcaggagtgcaaaaggtccgggcctggggtcctggtttggagactggccaggtgggcaagtcagccgattttgtggtggaagccattggcaccgaggtggggacactgggcttctccatcgaggggccctcacaagccaagatcgaatgtgacgacaagggggatggctcctgcgatgtgcggtactggcccacggagcctggggagtacgctgtgcacgtcatctgtgacgatgaggacatccgagactcacccttcattgcccacatcctgcccgccccacctgactgcttcccagataaggtgaaggcctttgggcctggcctggagcctaccggctgcatcgtggacaagcccgctgagttcaccattgatgctcgtgcagctggcaagggagacctgaagctctatgcccaggacgccgacggctgtcccatcgacatcaaggtgatccccaacggcgacggcaccttccgctgctcctacgtgcccaccaagcccattaagcacaccatcatcatctcctggggaggcgtaaacgtgcccaagagccccttccgggtgaacgtgggcgagggcagccaccccgagcgggtaaaggtgtacggccccggagtggagaagacaggcctcaaggccaatgagcccacctacttcacggtggactgcagcgaggcggggcaaggcgacgtgagcatcggcatcaagtgcgccccaggcgtggtgggccctgcagaggctgacattgacttcgacatcatcaagaatgacaacgacaccttcaccgtcaagtacacgccaccaggggcgggccgctacaccatcatggtgctgtttgccaaccaggagatccccgccagccccttccacatcaaggtggacccatcccacgatgccagcaaagtcaaggccgagggccctgggctgaatcgcacaggtgtggaagtcgggaagcccacccacttcacggtgctgaccaagggagccggcaaggccaagctggatgtgcagtttgcagggacagccaagggcgaggttgtgcgggactttgagatcatagacaaccatgactactcctacactgtcaagtacaccgctgtccagcagggcaacatggcagtgacagtgacttatggcggggaccctgtccccaagagcccctttgtggtgaatgtggcacccccgctggacctcagcaaaatcaaagttcagggccttaatagcaaggtggctgtgggacaggaacaagcattctctgtgaacacacgaggggctggcggtcagggccaactggatgtgcggatgacttcgccctctcgccggcccatcccctgcaagctggagccaggcggtggagcggaagcccaggctgtgcgctacatgcccccggaggaggggccctacaaggtggatatcacctacgatggtcacccggtgcctggcagcccgtttgctgtggagggtgtcctgccccctgatccctccaaggtctgtgcttatggcccgggtctcaagggtggactggtaggcacccccgcgccattctccatcgacaccaagggggctggcacaggtggcctggggctgaccgtagagggcccctgcgaggccaagatcgagtgccaggacaatggtgatggctcatgtgctgtcagctacctgcccacggagcctggcgagtacaccatcaacatcctgtttgctgaggcccacatccctggctcgcccttcaaagccaccattcggcctgtgtttgacccgagcaaggtgcgggccagtggaccgggcctggagcgcggcaaggtcggtgaggcagccaccttcactgtggactgctcagaggcaggcgaggcggagctgaccattgagatcctgtcggatgccggggtcaaggccgaggtgctgatccacaacaacgcggatggcacctaccacatcacctacagccctgccttccctggcacctacaccattaccatcaagtatggcgggcatcccgtgcccaaattccccacccgtgtccatgtgcagcctgcggtcgataccagtggcgtcaaggtctcagggcctggtgttgagccacacggtgtcctgcgggaggtgaccactgagttcactgtggatgcaagatccctaacagccacaggcggcaaccacgtgacggctcgtgtgctcaacccctcgggggccaagacagacacctatgtgacagacaatggggacggcacctaccgagtgcagtacaccgcctacgaggagggcgtgcatttggtggaggtcctgtatgatgaggtcgctgtgcccaagagccccttccgagtgggcgtgaccgagggctgtgatcccacccgcgtccgagccttcgggccaggcctggagggtggcttggtcaacaaggccaaccgattcactgtggagaccaggggagcgggcaccgggggccttggcctagccatcgagggtccctcggaagccaagatgtcctgcaaggacaacaaggatggtagctgcaccgtggagtacatccccttcactcctggagactatgacgtcaacatcaccttcgggggccggcccatcccagggagcccgttccgcgtgccagtgaaggatgtggtggaccctgggaaggtgaagtgctcagggccagggctgggggctggtgtcagggcccgggttcctcagaccttcacagtggactgcagtcaagctggccgggcgcccctgcaggtggctgtgctgggccccacaggtgtggccgagcctgtggaggtgcgggacaatggagatggcacccacactgtccactacaccccagccactgacgggccctacacggtagccgtcaagtatgctgaccaggaggtgccacgcagccccttcaagatcaaggtcctcccagctcatgatgccagcaaggtgcgggccagcggcccaggcctcaacgcctctggcatccctgccagcctgcctgtggagttcaccatcgacgcacgggacgcgggcgaggggttgctcactgtccagatcttggaccccgagggtaagcccaagaaggccaacatccgggacaatggggatggcacgtacactgtgtcctacctgccggacatgagtggccggtacaccatcaccatcaagtatggcggtgatgagatcccctactcgcccttccgcatccatgctctgcccactggggatgccagcaagtgcctcgtcacagtgtccattggaggccatggcctgggtgcctgcctgggccctcgaatccagattgggcaggagacggtgatcacggtggatgccaaggcagccggtgaggggaaggtgacatgcacggtgtccacgccggatggggcagagctcgatgtggatgtggttgagaaccatgacggtacctttgacatctactacacagcgcccgagccgggcaagtacgtcatcaccatccgcttcgggggtgagcacatccccaacagccccttccacgtgctggccacagaggagccagtggtgcctgtggagccaatggagtccatgctgaggcccttcaacctggtcatccccttcgcggtgcagaaaggggagctcacaggagaggtgcggatgccctcggggaagacggcacggcccaacatcaccgacaacaaggacggcaccatcacggtgaggtatgcacccactgagaaaggcctgcaccagatggggatcaagtatgacggcaaccacatccctgggagccccttacagttctatgtggatgccatcaacagccgccatgtcagtgcctatgggccaggcctgagccatggcatggtcaacaagccagccaccttcactattgtcaccaaagatgctggagaagggggtctgtcactggccgtggagggcccatccaaggcagagatcacctgtaaggacaacaaggatggcacctgcaccgtgtcctatctgccgactgcgcctggagactacagcatcatcgtgcgcttcgatgacaagcacatcccggggagccccttcacagccaagatcacaggtgatgactccatgaggacctcacagctgaatgtgggcacctccacggacgtgtcactgaagatcaccgagagtgatctgagccagctgaccgccagcatccgtgccccctcgggcaacgaggagccctgcctgctgaagcgcctgcccaaccggcacattgggatctccttcacccccaaggaggtcggggagcacgtggtgagcgtgcgcaagagtggcaagcatgtcaccaacagccccttcaagatcctggtggggccatctgagatcggggacgccagcaaggtgcgggtctggggcaaggggctttccgagggacacacattccaggtggcagagttcatcgtggacactcgcaatgcaggttatgggggcttggggctgagtattgaaggcccaagcaaggtggacatcaactgtgaggacatggaggacgggacatgcaaagtcacctactgccccaccgagcccggcacctacatcatcaacatcaagtttgctgacaagcacgtgcctggaagccccttcactgtgaaggtgaccggcgagggccgcatgaaggagagcatcacccggcggagacaggcaccttccatcgccaccatcggcagcacctgtgacctcaacctcaagatcccaggaaactggttccagatggtgtctgcccaggagcgcctgacacgcaccttcacacgcagcagccacacctacacccgcacggagcgcacggagatcagcaagacgcggggcggggagacaaagcgcgaggtgcgggtggaggagtccacccaggtcggcggggaccccttccctgctgtgtttggggacttcctgggccgggagcgcctgggatccttcggcagcatcacccggcagcaggagggtgaggccagctctcaggacatgactgcacaggtgaccagcccatcgggcaaggtggaagccgcagagatcgtcgagggcgaggacagcgcctacagcgtgcgctttgtgccccaggaaatggggccccatacggtcgctgtcaagtaccgtggccagcacgtgcccggcagcccctttcagttcactgtggggccgctgggtgaaggtggtgcccacaaggtgcgggccggaggcacagggctggagcgaggtgtggccggcgtgccagccgagttcagcatctggacccgggaggctggcgctgggggcctgtccattgctgtggagggtcctaacaaagcggagattgcatttgaggatcgcaaagatggctcctgcggcgtctcctatgtcgtccaggaaccaggtgactataaggtctccatcaagttcaatgatgagcacatcccagacagcccctttgtggtgcctgtggcctccctctcggatgacgctcgccgtctcactgtcacmagcctccaggagacggggctcaaggtgaaccagccagcgtcctttgccgtgcagctgaacggtgcccggggcgtgattgatgcccgggtgcacacaccctcgggggctgtggaggagtgctacgtctctgagctggacagtgacaagcacaccatccgcttcatcccccacgagaatggcgtccactccatcgatgtcaagttcaactgtgcccacatccctggaagtctcttcaagatccgcgttggggagcatagccaggctggggacccaggcttggtgtcagcctacggtcctgagctcganggaggcactaccggtgtgtcatcagagttcatcgatgatcacctgaatgccggcttcggggccttgtctgtcaccattgatggcccctccaatgtgcagctggactgtcgggagtgtcctggaggccatgtggtcacttatactcccatggcccctggcaantacctcattgccatcaagtacgtggccccagcacatcgtgggcagccccttcaagccaaggtcactggtccgaggctgtccggaggccaacaccttcacgaaacatccacggttctggtggagactgtgaccaagtcctcctcaagccggggctccagctacagctccatccccaagttctcctcagatgccagcaaggtggtgactcggggccctgggctgtcccaggccttcgtgggccagaagaactccttcaccgtggactgcagcaaagcaggcaccaacatgatgatggtgggcgtgcacggccccaagaccccctgtgaggaggtgtacgtgaagcacatggggaaccgggtgtacaatgtcacctacactgtcaaggagaaaggggactacatcctcattgtcaagtggggtgacgaaagtgtccctggaagccccttcaaagtcaaggtcccttgaatcccaaaagtgcctccccagcctcagcccccacctccagccacacacacattacacacacacacacacaaatgtgccacacccagacacgcacagaatcagacactacaaacacctgccttgggggtgaagtgaaggcccagcctccccaccccaccgcgccccaggggttggaggaccttgtctgtgtcaggacagtgtccctccttgggaatgtgacatgagggccgactggggccaggctcaggggcagaggctgggacacaaggggctggcgagggctgcgaggccagggaagccctgagtttctggcggggctgagcagtgggggagcattgtgttgtgggtgtctgtgtgtgaggtcaccctcaaactgcaccgccggccagataccctcctgaccccgaggacttggtctggtctctctggtggctacaaccccagagttttaaggacttggaaaggaaagcacaatcagagaagaaaacagcccccgaaccagcaggagtggcctggcacatggaccggcctgagcgatgtgcactccacccaagccaggctcccagggggcctgatttctctctcactgtctctttttttaaaatggttgcacggctctgccccatggggggccttttttacacactgcgaggcccagctttctaggggacttttgcacatgtcatgcagctcagctgggagctgcttaggtggaaaactccaaataaagtgcggctgtcgcagaaaaaaaaaaaa

SEQ ID NO: 23150 - DNA, 3197 bp, Homo Sapiens
ggaccacagctcctcccgtgcatccactcggcctgggaggttctggattttggctgtcgagggagtttgcctgcctctccagagaaagatggtcatgaggcccctgtggagtctgcttctctgggaagccctacttcccattacagttactggtgcccaagtgctgagcaaagtcgggggctcggtgctgctggtggcagcgcgtccccctggcttccaagtccgtgaggctatctggcgatctctctggccttcagaagagctcctggccacgtttttccgaggctccctggagactctgtaccattcccgcttcctgggccgagcccagctacacagcaacctcagcctggagctcgggccgctggagtctggagacagcggcaacttctccgtgttgatggtggacacaaggggccagccctggacccagaccctccagctcaaggtgtacgatgcagtgcccaggcccgtggtacaagtgttcattgctgtagaaagggatgctcagccctccaagacctgccaggttttcttgtcctgttgggcccccaacatcagcgaaataacctatagctggcgacgggagacaaccatggactttggtatggaaccacacagcctcttcacagacggacaggtgctgagcatttccctgggaccaggagacagagatgtggcctattcctgcattgtctccaaccctgtcagctgggacttggccacagtcacgccctgggatagctgtcatcatgaggcagcaccagggaaggcctcctacaaagatgtgctgctggtggtggtgcctgtctcgctgctcctgatgctggttactctcttctctgcctggcactggtgcccctgctcagggaaaaagaaaaaggatgtccatgctgacagagtgggtccagagacagagaacccccttgtgcaggatctgccataaaggacaatatgaactgatgcctggactatcagtaaccccactgcacaggcacacgatgctctgggacataactggtgcctggaaatcaccatggtcctcatatctcccatgggaatcctgtcctgcctcgaaggagcagcctgggcagccatcacaccacgaggacaggaagcaccagcacgtttcacacctcccccttccctctcccatcttctcatatcctggctcttctctgggcaagatgagccaagcagaacattccatccaggacactggaagttctccaggatccagatccatggggacattaatagtccaaggcattccctcccccaccactattcataaagtattaaccaactggcaccaaggaattgcctccagcctgagtcctaggctctaaaagatattacatatttgaactaatagaggaactctgagtcacccatgccagcatcagcttcagccccagaccctgcagtttgagatctgatgcttcctgagggccaaggcattgctgtaagaaaaggtctagaaataggtgaaagtgagaggtgggggacaggggtttctctttctggcctaaggactttcaggtaatcagagttcatgggccctcaaaggtaaattgcagttgtagacaccgaggatggttgacaacccatggttgagatgggcaccgttttgcaggaaacaccatattaatagacatcctcaccatctccatccgctctcacgcctcctgcaggatctgggagtgagggtggagagtctttcctcacgctccagcacagtggccaggaaaagaaatactgaatttgccccagccaacaggacgttcttgcacaacttcaagaaaagcagctcagctcaggatgagtcttcctgcctgaaactgagagagtgaagaaccataaaacgctatgcagaaggaacattatggagagaaagggtactgaggcactctagaatctgccacattcattttcaaatgcaaatgcagaagacttaccttagttcaaggggaggggacaaagaccccacagcccaacagcaggactgtagaggtcactctgactccatcaaactttttattgtggccatcttaggaaaatacattctgcccctgaatgattctgtctagaaaagctctggagtattgatcactactggaaaaacacttaaggagctaaacttaccttcggggattattagctgataaggttcacagtttctctcacccaggtgtaactggattttttctggggcctcaatccagtcttgataacagcgaggaaagaggtattgaagaaacaggggtgggtttgaagtactattttccccagggtggcttcaatctccccacctaggatgtcagccctgtccaaggaccttccctcttctcccccagttccctgggcaatcacttcaccttggacaaaggatcagcacagctggcctccagatccacatcaccactcttccactcgattgttcccagatcctccctgcctggcctgctcagaggttccctgttggtaacctggctttatcaaattctcatccctttcccacacccacttctctcctatcaccttcccccaagattacctgaacagggtccatggccactcaacctgtcagcttgcaccatccccacctgccacctacagtcaggccacatgcctggtcactgaatcatgcaaaactggcctcagtccctaaaaatgatgtggaaaggaaagcccaggatctgacaatgagccctggtggatttgtggggaaaaaatacacagcactccccacctttctttcgttcatctccagggccccacctcagatcaaagcagctctggatgagatgggacctgcagctctccctccacaaggtgactcttagcaacctcatttcgacagtggtttgtagcgtggtgcaccagggccttgttgaacagatccacactgctctaataaagttcccatccttaatgactcacttgtcaactagtggactaattaaccctccaccaaaaaaacacaaagtgcttctgtgagaccaattttgtgctaatgagcattgagactgatgctttgtaagtcacaccacaacaaatattgattgagggcgctgcatgtgctgggtacatttcttggcacttgggaatcagtagtcaagcgaaacccttgcctttgagagtttatggtctggataatataaataaacaagtaagcataaaaaaaaaaaaaaaaa

SEQ ID NO: 23151 - DNA, 4135 bp, Homo Sapiens
ctcacagcccagcacctgcggagggagcgctgaccatggctccctggcctgaattgggagatgcccagcccaaccccgataagtacctcgaaggggccgcaggtcagcagcccactgcccctgataaaagcaaagagaccaacaaaaataacactgaggcacctgtaaccaagattgaacttctgccgtcctactccacggctacactgatagatgagcccactgaggtggatgacccctggaacctacccactcttcaggactcggggatcaagtggtcagagagagacaccaaagggaagattctctgtttcttccaagggattgggagattgattttacttctcggatttctctactttttcgtgtgctccctggatattcttagtagcgccttccagctggttggaggaaaaatggcaggacagttcttcagcaacagctctattatgtccaaccctttgttggggctggtgatcggggtgctggtgaccgtcttggtgcagagctccagcacctcaacgtccatcgttgtcagcatggtgtcctcttcattgctcactgttcgggctgccatccccattatcatgggggccaacattggaacgtcaatcaccaacactattgttgcgctcatgcaggtgggagatcggagtgagttcagaagagcttttgcaggagccactgtccatgacttcttcaactggctgtccctgttggtgctcttgcccgtggaggtggccacccattacctcgagatcataacccagcttatagtggagagcttccacttcaagaatggagaagatgccccagatcttctgaaagtcatcactaagcccttcacaaagctcattgtccagctggataaaaaagttatcagccaaattgcaatgaacgatgaaaaagcgaaaaacaagagtcttgtcaagatttggtgcaaaacttttaccaacaagacccagattaacgtcactgttccctcgactgctaactgcacctccccttccctctgttggacggatggcatccaaaactggaccatgaagaatgtgacctacaaggagaacatcgccaaatgccagcatatctttgtgaatttccacctcccggatcttgctgtgggcaccatcttgctcatactctccctgctggtcctctgtggttgcctgatcatgattgtcaagatcctgggctctgtgctcaaggggcaggtcgccactgtcatcaagaagaccatcaacactgatttcccctttccctttgcatggttgactggctacctggccatcctcgtcggggcaggcatgaccttcatcgtacagagcagctctgtgttcacgtcggccttgacccccctgattggaatcggcgtgataaccattgagagggcttatccactcacgctgggctccaacatcggcaccaccaccaccgccatcctggccgccttagccagccctggcaatgcattgaggagttcactccagatcgccctgtgccactttttcttcaacatctccggcatcttgctgtggtacccgatcccgttcactcgcctgcccatccgcatggccaaggggctgggcaacatctctgccaagtatcgctggttcgccgtcttctacctgatcatcttcttcttcctgatcccgctgacggtgtttggcctctcgctggccggctggcgggtgctggttggtgtcggggttcccgtcgtcttcatcatcatcctggtactgtgcctccgactcctgcagtctcgctgcccacgcgtcctgccgaagaaactccagaactggaacttcctgccgctgtggatgcgctcgctgaagccctgggatgccgtcgtctccaagttcaccggctgcttccagatgcgctgctgctgctgctgccgcgtgtgctgccgcgcgtgctgcttgctgtgtggctgccccaagtgctgccgctgcagcaagtgctgcgaggacttggaggaggcgcaggaggggcaggatgtccctgtcaaggctcctgagacctttgataacataaccattagcagagaggctcagggtgaggtccctgcctcggactcaaagaccgaatgcacggccttgtaggggacgccccagattgtcagggatggggggatggtccttgagttttgcatgctctcctccctcccacttctgcaccctttcaccacctcgaggagatttgctccccattagcgaatgaaattgatgcagtcctacctaactcgattccctttggcttggtgggtaggcctgcagggcacttttattccaacccctggtcactcagtaatcttttactccaggaaggcacaggatggtacctaaagagaattagagaatgaacctggcgggacggatgtctaatcctgcacctagctgggttggtcagtagaacctattttcagactcaaaaaccatcttcagaaagaaaaggcccagggaaggaatgtatgagaggctctcccagatgaggaagtgtactctctatgactatcaagctcaggcctctccctttttttaaaccaaagtctggcaaccaagagcagcagctccatggcctccttgccccagatcagcctgggtcaggggacatagtgtcattgtttggaaactgcagaccacaaggtgtgggtctatcccacttcctagtgctccccacattccccatcagggcttcctcacgtggacaggtgtgctagtccaggcagttcacttgcagtttccttgtcctcatgcttcggggatgggagccacgcctgaactagagttcaggctggatacatgtgctcacctgctgctcttgtcttcctaagagacagagagtggggcagatggaggagaagaaagtgaggaatgagtagcatagcattctgccaaaagggccccagattcttaatttagcaaactaagaagcccaattcaaaagcattgtggctaaagtctaacgctcctctcttggtcagataacaaaagccctccctgttggatcttttgaaataaaacgtgcaagttatccaggctcgtagcctgcatgctgccaccttgaatcccagggagtatctgcacctggaatagctctccacccctctctgcctccttactttctgtgcaagatgatttcctgggttaacttccttctttccatccacccacccactggaatctctttccaaacatttttccattttcccacagatgggctttgattagctgtcctctctccatgcctgcaaagctccagatttttggggaaagctgtacccaactggactgcccagtgaactgggatcattgagtacagtcgagcacacgtgtgtgcatgggtcaaaggggtgtgttccttctcatcctagatgccttctctgtgccttccacagcctcctgcctgattacaccactgcccccgccccaccctcagccatcccaattcttcctggccagtgcgctccagccttatctaggaaaggaggagtgggtgtagccgtgcagcaagattggggcctcccccatcccagcttctccaccatcccagcaagtcaggatatcagacagtcctcccctgaccctcccccttgtagatatcaattcccaaacagagccaaatactctatatctatagtcacagccctgtacagcatttttcataagttatatagtaaatggtctgcatgatttgtgcttctagtgctctcatttggaaatgaggcaggcttcttctatgaaatgtaaagaaagaaaccactttgtatattttgtaataccacctctgtggccatgcctgccccgcccactctgtatatatgtaagttaaacccgggcaggggctgtggccgtctttgtactctggtgatttttaaaaattgaatctttgtacttgcattgattgtataataattttgagaccaggtctcgctgtgttgctcaggctggtctcaaactcctgagatcaagcaatccgcccacctcagcctcccaaagtgctgagatcacaggcgtgagccaccaccaggcctgattgtaatttttttttttttttttactggttatgggaagggagaaataaaatcatcaaaccccaaaaaaaaaaaaaaaaaaaaaaaaaaaaaaaaaaa

SEQ ID NO: 23152 - DNA, 842 bp, Homo Sapiens
gtggtatgtaccttagctgtgaggggggctgctgaaggcatggaggacagtaatgacggctgtgcctccttggatggtggagacctcagaaatggtctgctacacaggcactaggtcagtttcccgcccttagctgaatgcagatggatgctgggagatggatatggtgagatggtgtggggaggatgttagaaagctggaggtgtttatcacttctcaaggagctactgaatatagggggaaaaaaacaacaaaaagacaagcccagggagaaagcaccattaaggatatacctatgccagcttctatagctgcacctgctttattggcaggtcacttgccacaattgcatctgccctctaaactttttaattttcacactgtatcctagacatgaatgcataaaatacagtgtctggcgggataatgcagagaggtaccatcttgattttccccagttacattcacctggtctggtctctgtaagcttagaagagtagaatcactttattttttaaagacttccggccaggcacggtggttcacgcctgtaatgccagcactttgggaggccgaggcgggtggaccacctgaggtcaggagttcaagaccagcctggccgacatggcgaaaccctgtctctactaaaaaaaaatacaaaaagattagctgggtgtggtggtgtgtgcctataatcccagctactcaggaggctgaggcaggagaattcttttaacccaaaaggcggaggttgcagtgagccaagatcacaccactgcactccagcctgggcgacagaatgagactctgtctcaaaaaaaaaaaaaaaaaaaaaaaaaaaa

SEQ ID NO: 23153 - DNA, 2095 bp, Homo Sapiens
aaacactctcacctgccagcatgagaagctccagcatcagtggagaacccaccagcttgtatagccaagcagagtcaacacacacaacagcgttccctgccagcaccaccacctcaggcctcagtcaggaatcaacaactttccacagtaagccaggctcaactgagacaacactgtcccctggcagcatcacaacttcatcttttgctcaagaatttaccacccctcatagccaaccaggctcagctctgtcaacagtgtcacctgccagcaccacagtgccaggccttagtgaggaatctaccaccttctacagcagcccaggctcaactgaaaccacagcgttttctcacagcaacacaatgtccattcatagtcaacaatctacacccttccctgacagcccaggcttcactcacacagtgttacctgccaccctcacaaccacagacattggtcaggaatcaacagccttccacagcagctcagacgcaactggaacaacacccttacctgcccgctccacagcctcagaccttgttggagaacctacaactttctacatcagcccatcccctacttacacaacactctttcctgcgagttccagcacatcaggcctcactgaggaatctaccaccttccacaccagtccaagcttcacttctacaattgtgtctactgaaagcctggaaaccttagcaccagggttgtgccaggaaggacaaatttggaatggaaaacaatgcgtctgtccccaaggctacgttggttaccagtgcttgtcccctctggaatccttccctgtagaaaccccggaaaaactcaacgccactttaggtatgacagtgaaagtgacttacagaaatttcacagaaaagatgaatgacgcatcctcccaggaataccagaacttcagtaccctcttcaagaatcggatggatgtcgttttgaagggcgacaatcttcctcagtatagaggggtgaacattcggagattgctcaacggtagcatcgtggtcaagaacgatgtcatcctggaggcagactacactttagagtatgaggaactgtttgaaaacctggcagagattgtaaaggccaagattatgaatgaaactagaacaactcttcttgatcctgattcctgcagaaaggccatactgtgctatagtgaagaggacactttcgtggattcatcggtgactccgggctttgacttccaggagcaatgcacccagaaggctgccgaaggatatacccagttctactatgtggatgtcttggatgggaagctggcctgtgtgaacaagtgcaccaaaggaacgaagtcgcaaatgaactgtaacctgggcacatgtcagctgcaacgcagtggcccccgctgcctgtgcccaaatacgaacacacactggtactggggagagacctgtgaattcaacatcgccaagagcctcgtgtatgggatcgtgggggctgtgatggcggtgctgctgctcgcattgatcatcctaatcatcttattcagcctatcccagagaaaacggcacagggaacagtatgatgtgcctcaagagtggcgaaaggaaggcacccctggcatcttccagaagacggccatctgggaagaccagaatctgagggagagcagattcggccttgagaacgcctacaacaacttccggcccaccctggagactgttgactctggcacagagctccacatccagaggccggagatggtagcatccactgtgtgagccaacgggggcctcccaccctcatctagctctgttcaggagagctgcaaacacagagcccaccacaagcctccggggcgggtcaagaggagaccgaagtcaggccctgaagccggtcctgctctgagctgacagacttggccagtcccctgcctgtgctcctgctggggaaggctgggggctgtaagcctctccatccgggagcttccagactcccagaagcctcggcacccctgtctcctcctgggtggctccccactctggaatttccctaccaataaaagcaaatctgaaagctcaaaaaaaaaaaaaaaaaaaaaaaaaaaaaaaaaaaa

SEQ ID NO: 23154 - DNA, 1152 bp, Homo Sapiens
gtccggagaaggaagaagaggacgccgggcgcgcactcggtgctgattatcacaactgtttggtgacctacttcactgacctgtgaggattccttcccttcaagtactggattcttgatctttctgcatcatcaagaatggaaacagactgtaatcccatggagctaagcagtatgtcaggatttgaagaaggttcagagctgaacggttttgaaggaactgacatgaaagacatgaggctcgaagctgaagcagttgtaaatgatgttctctttgctgttaacaacatgtttgtctcgaaaagcctgcggtgtgcggatgatgtggcctatatcaatgtggaaacaaaggaaagaaacagatattgcctagaactcactgaagcagggctcaaggtggtaggctatgcttttgaccaggtagatgatcatttacagactccctaccatgaaacagtctactccttgttggatacactcagccccgcctaccgagaagcatttggaaacgcactgcttcaaagactggaaagctttgaaaagagatggacagtcatgactacactttttcctttcagaggggctggtgctggtacagaatgttgatataaagcttaaaattcttgcatatggtcatagaaaatgcatctttggttttgtgtttttatcacttgcttccaacttaggcttttggctcagaagattattgaataatgatttgtcttagtttctgtttcagtaagggaattctgaggccgttgctatggataccatccattaaggacatttcacatgtcttcatataattatctcttcatttcaaatcctaatcactatttcatactattacagggctttgatgctgcacagcactgtcttttacataggaaattctagatttgcacagtaatagaggaattagaagtacctaactatacactttgattcagcctgctaaatcaggggttcaatactagcttggacaaactttgtagtaattaattggctaccagccttattggaaacaaattatcaactagtttcccctgcacaaatttggaattcactggcttcacttaatcatttatataccaataatggattaataaagatgaattaattatatattacctaactagtattaaatgaaaac

SEQ ID NO: 23155 - DNA, 1100 bp, Homo Sapiens
tgtccagaagtgggtcaaatttcttcagtatctaatggcttcaactccgatagtactagccaccatggtgggaaaatacccagaaaattagcaaatcatgtggtggatagagtttggcaagaatgcaatatgaacagagcacagaacaagaggaagtattctgcttcatcaggtggtctatgcgaagaagcgacatgctaaagtggcatcctgggattttgttgaagccacacaaagaacaaattgcagttgtttgaggcacaaaaatctcaagtcaagaaatgctggacaacaaggacaggcaccatctttaggtcagcaacaacaaatacttcctaagcacaagaccaatgagaagcaagaaaagagtgaaaagccacagaaacgccccttgactccttttcaccatcgtgtgtctgttagtgatgatgttggcatggacgcagattcagccagccaaagacttgtgatctctgctccagacagtcaagtgagattttcaaatatccgaactaatgatgtagcaaagactcctcagatgcatggcaccgaaatggcaaattcacctcaaccacccccacttagtcctcacccttgtgatgtggttgatgaaggagtgactaaaacaccttcaactcctcagagtcaacatttttatcaaatgccaacaccagatcccttggttccttctaaaccaatggaagataggatagacagtttgtcccagtctttcccacctcaatatcaggaagctgtagaacctacagtatatgttggtacagcagtaaacttggaagaagatgaagccaatatagcctggaagtattacaagttcccaaagaaaaaagatgtagagtttttaccacctcaacttccaagtgataaattcaaggatgatccagttggaccttttggacaggaaagtgtaacatcagttacagagtatgtattttttttaatagtcaccattataatttaagggtggaagtgatgcaagttcttaatactaggactcagtattggattcaaggtaggatttacaagaataaattcattgagtattaaaaaaaaaaaaaaaaaaaaaaaaaaaaaaaaaaaaa

SEQ ID NO: 23156 - DNA, 1614 bp, Homo Sapiens
gcggccgcccggcccggccgcggatcagagactggagactgggtcttgctctgttacccaggctggagtgcagtggtgtgatcatagctcactacagccttgaactcctgggctcaagaggttgaggctccctcctcagcctcccaagtagctgggactacaggctttcagcaccatgcctggctaattcaaaaaaaccttcagagagatagggtctctctatgttgccctagctcgtctcaaactcctggcctcaagtgatcctcctgcttggacctcccaaagcgctgggattacaggctcctggaaccatgggcctcaggccctgaggatacggggctcccggtggccatgacgacgggtgactgctgccacctccccggctccctgtgtgactgctccggcagccctgccttctccaaggtcgtggaggctacgggcctcggaccgccccagtatgtggcacaggtgacttcaagggatggccggctcctctccaccgtcatccgtgccttggacacaccgagtgatggtcctttctgccggatctgccatgagggagcgaacggggagtgcttgctgtccccgtgtggctgcaccggcacgctgggtgccgtgcataagagctgtctggagaagtggctttcctcatctaacaccagctactgcgagctgtgccacacggagtttgcagtggagaaacggcctcgacccctcacagagtggctgaaggacccggggccgcggacggagaagcggacactgtgctgcgacatggtgtgtttcctgttcatcacaccgctggccgccatctcaggctggttgtgcctgcgcggggcccaggaccacctccggctccacagccagctggaggccgtgggtctcattgccctcaccatcgccctcttcaccatctatgtcctctggacgctggtctccttccgctaccactgccagctgtactccgagtggagaaagaccaaccagaaagttcgcctgaagatccgggaggcggacagccccgagggcccccagcattctccactggcagctggactcctgaagaaggtggcagaggagacaccagtatgaatgctgggctctccggaccctgcagcagagaggccagaggtagctggtgataccctgtcctgtggaaggacttccacttcaacacttccacttcaacagttcccgcacggcctgaacgcttcttaggccaagagacaccatgcggagcctagtctgtgatcctgtgtgaagatattttcagggtttttttttttttttttttgcatatggaggacaggtggacatggtcctgagctctggacggagcaggcaccctgatctcattctgaggtccacatggcaccttctgggccagcagctgtggccggtgtatcaagggcgcccttaaagctggaacattccagcaagcttcttgcgcttctctgcacccggcaggcccactttcctggcaccctcgactttatataaaagttgcactgcgtttcaaaaacccaccctgaatgaataaaaggagccctggctggacgtaaaaaaaaaaaaaaaaaaaaaaaaaaaaaaaaaaaaaaaaaaaaaaaaaaaaaa

SEQ ID NO: 23157 - DNA, 2110 bp, Homo Sapiens
ggggcgggccatggcggcgaacctgagccggaacgggccagcgctgcaagaggcctacgtgcgggtggtcaccgagaagtccccgaccgactgggctctctttacctatgaaggcaacagcaatgacatccgcgtggctggcacaggggagggtggcctggaggagatggtggaggagctcaacagcgggaaggtgatgtacgccttctgcagagtgaaggaccccaactctggactgcccaaatttgttctcatcaactggacaggcgagggcgtgaacgatgtgcggaagggagcctgttccagccacgtcagcaccatggccagcttcctgaagggggcccatgtgaccatcaacgcacgggccgaggaggatgtggagcctgagtgcatcatggagaaggtggccaaggcttcaggtgccaactacagctttcacaaggagagtggccgcttccaggacgtgggaccccaggccccagtgggctctgtgtaccagaagaccaatgccgtgtctgagattaaaagggttggtaaagacagcttctgggccaaagcagagaaggaggaggagaaccgtcggctggaggaaaagcggcgggccgaggaggcacagcggcagctggagcaggagcgccgggagcgtgagctgcgtgaggctgcacgccgggagcagcgctatcaggagcagggtggcgaggccagcccccagagtacgtgggagcagcagcaagaagtggtttcaaggaaccgaaatgagcaggagtctgccgtgcacccgagggagattttcaagcagaaggagagggccatgtccaccacctccatctccagtcctcagcctggcaagctgaggagccccttcctgcagaagcagctcacccaaccagagacccactttggcagagagccagctgctgccatctcaaggcccagggcagatctccctgctgaggagccggcgcccagcactcctccatgtctggtgcaggcagaagaggaggctgtgtatgaggaacctccagagcaggagaccttctacgagcagcccccactggtgcagcagcaaggtgctggctctgagcacattgaccaccacattcagggccaggggctcagtgggcaagggctctgtgcccgtgccctgtacgactaccaggcagccgacgacacagagatctcctttgaccccgagaacctcatcacgggcatcgaggtgatcgacgaaggctggtggcgtggctatgggccggatggccattttggcatgttccctgccaactacgtggagctcattgagtgaggctgagggcacatcttgcccttcccctctcagacatggcttccttattgctggaagaggaggcctgggagttgacattcagcactcttccaggaataggacccccagtgaggatgaggcctcagggctccctccggcttggcagactcagcctgtcaccccaaatgcagcaatggcctggtgattcccacacatccttcctgcatcccccgaccctcccagacagcttggctcttgcccctgacaggatactgagccaagccctgcctgtggccaagccctgagtggccactgccaagctgcggggaagggtcctgagcaggggcatctgggaggctctggctgccttctgcatttatttgccttttttctttttctcttgcttctaaggggtggtggccaccactgtttagaatgacccttgggaacagtgaacgtagagaattgtttttagcagagtttgtgaccaaagtcagagtggatcatggtggtttggcagcagggaatttgtcttgttggagcctgctctgtgctccccactccatttctctgtccctctgcctgggctatgggaagtggggatgcagatggccaagctcccaccctgggtattcaaaaacggcagacacaacatgttcctccacgcggctcgctcgatgcctgcaggccccagtgtgtgcctcaactgattctgacttcaggaaaagtaacacagagtggccttggcctgttgtcttcccctattttctgtcccagctcatccgtgtctctgaagaataaatatgcttttggaaaaaaaaaaaaaaa

SEQ ID NO: 23158 - DNA, 3146 bp, Homo Sapiens
gccgcaacccgtcccggaggtgtcctgtctcctgtcgccgccgccgccgccaccaccgctgccactgccgccctgccggggccatgttcgctctgggcttgcccttcttggtgctcttggtggcctcggtcgagagccatctgggggttctggggcccaagaacgtctcgcagaaagacgccgagtttgagcgcacctacgtggacgaggtcaacagcgagctggtcaacatctacaccttcaaccatactgtgacccgcaacaggacagagggcgtgcgtgtgtctgtgaacgtcctgaacaagcagaagggggcgccgttgctgtttgtggtccgccagaaggaggctgtggtgtccttccaggtgcccctaatcctgcgagggatgtttcagcgcaagtacctctaccaaaaagtggaacgaaccctgtgtcagccccccaccaagaatgagtcggagattcagttcttctacgtggatgtgtccaccctgtcaccagtcaacaccacataccagctccgggtcagccgcatggacgattttgtgctcaggactggggagcagttcagcttcaataccacagcagcacagccccagtacttcaagtatgagttccctgaaggcgtggactcggtaattgtcaaggtgacctccaacaaggccttcccctgctcagtcatctccattcaggatgtgctgtgtcctgtctatgacctggacaacaacgtagccttcatcggcatgtaccagacgatgaccaagaaggcggccatcaccgtacagcgcaaagacttccccagcaacagcttttatgtggtggtggtggtgaagaccgaagaccaagcctgcgggggctccctgcctttctaccccttcgcagaagatgaaccggtcgatcaagggcaccgccagaaaaccctgtcagtgctggtgtctcaagcagtcacgtctgaggcatacgtcagtgggatgctcttttgcctgggtatatttctctccttttacctgctgaccgtcctcctggcctgctgggagaactggaggcagaagaagaagaccctgctggtggccattgaccgagcctgcccagaaagcggtcaccctcgagtcctggctgattcttttcctggcagttccccttatgagggttacaactatggctcctttgagaatgtttctggatctaccgatggtctggttgacagcgctggcactggggacctctcttacggttaccaggggcacgaccagttcaagcggcgcctcccctctggccagatgcggcagctgtgcattgccatgggccgctcctttgaacctgtaggtactcggccccgagtggactccatgagctctgtggaggaggatgactacgacacattgaccgacatcgattccgacaagaatgtcattcgcaccaagcaatacctctatgtggctgacctggcacggaaggacaagcgtgttctgcggaaaaagtaccagatctacttctggaacattgccaccattgctgtcttctatgcccttcctgtggtgcagctggtgatcacctaccagacggtggtgaatgtcacagggaatcaggacatctgctactacaacttcctctgcgcccacccactgggcaatctcagcgccttcaacaacatcctcagcaacctggggtacatcctgctggggctgcttttcctgctcatcatcctgcaacgggagatcaaccacaaccgggccctgctgcgcaatgacctctgtgccctggaatgtgggatccccaaacactttgggcttttctacgccatgggcacagccctgatgatggaggggctgctcagtgcttgctatcatgtgtgccccaactataccaatttccagtttgacacatcgttcatgtacatgatcgccggactctgcatgctgaagctctaccagaagcggcacccggacatcaacgccagcgcctacagtgcctacgcctgcctggccattgtcatcttcttctctgtgctgggcgtggtctttggcaaagggaacacggcgttctggatcgtcttctccatcattcacatcatcgccaccctgctcctcagcacgcagctctattacatgggccggtggaaactggactcggggatcttccgccgcatcctccacgtgctctacacagactgcatccggcagtgcagcgggccgctctacgtggaccgcatggtgctgctggtcatgggcaacgtcatcaactggtcgctggctgcctatgggcttatcatgcgccccaatgatttcgcttcctacttgttggccattggcatctgcaacctgctcctttacttcgccttctacatcatcatgaagctccggagtggggagaggatcaagctcatccccctgctctgcatcgtttgcacctccgtggtctggggcttcgcgctcttcttcttcttccagggactcagcacctggcagaaaacccctgcagagtcgagggagcacaaccgggactgcatcctcctcgacttctttgacgaccacgacatctggcacttcctctcctccatcgccatgttcgggtccttcctggtaagcgggcctcccggcgcagcgttgaggataacgtgaaaggtagcagctgcctccttctctgtgagctgatctggcgtccacaccccaggtgttagctgacactggatgacgacctggatacttagaaaggggcttcaggaagggatgtgctgtttccctctacgtgcccagtcctagcctcgctctaggacccagggctggcttctaagtttccgtccagtcttcaggcaagttctgtgttagtcatgcacacacatacctatgaaaccttgaagtttacaaagaattgccccagctctgggcaccctggccaccctggtccttggatccccttcgtcccacctggtccaccccagatgctgaggatgggggagctcaggcggggcctctgctttggggatgggaatgtgtttttctcccaaacttgtttttatagctctgcttgaagggctgggagatgaggtgggtctggatcttttctcagagcgtctccatgctatggttgcatttccgttttctatgaatgaatttgcatacaataaccaaccagactcagtaaaa

SEQ ID NO: 23159 - DNA, 1848 bp, Homo Sapiens
caccttctcactgtgaacgtcgcgacctgtgacgtctggggggcgcctcaaatcttccactccagcatcggatcccggaaaggcagcgtcggagatggacccaaaactcttcctgttctgcctgcagagttgagccccgtccgggtcctggacccgcggtagtactgaccctggatccctgttcactgcgttctcgctccccgcgctccctgctggaccccgggatgccgggcatctccgcccgaggcctctctcatgaggggaggaagcagctagctgttaacctcacccgtgtcctggcactctaccgttccatcttggatgcctacatcatcgaatttttcacagacaacctatgggacacactcccttgctcatggcaggaagcattggatggactgaaaccaccacagctggccacaatgctgctggggatgcctggggaaggggaggtcgtcaggtacaggtcagtgtggccactcaccctgctggccctgaagtccacggcgtgtgccctggcctttacccggatgcctggctttcagaccccctcagaattcctggagaaccccagccagagctcccgactaacagctccattccggaaacatgtcaggcccaagaagcagcatgagatccggaggctgggagagttggtgaagaagctgagtgatttcacaggcctgcacccaggttgtagacgtgggctcaggccagggcatctctcccgcttcatggctcttggcctggggttgatggtgaagagcatcgaaggggatcagagactggtggagagagcccagcgcctggaccaggagcttctgcaggctctggagaaagaggagaagaggaacccgcaggtggtccaaaccagccctcgtcactccccacaccacgtggttaggtgggtagaccccacagccctgtgtgaggagcttctgcttccactggagaacccgtgtcagggcagggcccgcttgctgctcacaggcctccacgcctgtggggatctgagtgttgccttgctgagacacttctcctgctgtcctgaggtggtggccctggcctcagtgggctgctgctacatgaagctgagtgaccctggcggctacccactgagtcagtgggtggctgggctgcctggctatgaactgccctaccggcttcgggagggggcctgccatgccctggaggaatatgctgagcggctacagaaagctggccctggccttcgaactcactgctaccgtgcagcactggagacagtcatccgacgggcccggcccgagctccgtcggccaggcgtgcagggtatccccagggtccacgagctcaagattgaagaatatgtgcagcgggggctacagcgagtggggctagatccccagctgccactgaatctggctgcccttcaggcccacctggcccaggagaaccgtgtggtggccttcttcagcctggctctactgcttgccccactggtggagacgcttattctactggaccggctgctgtaccttcaggaacagggtttccatgctgagctcctgcccatcttcagtcctgaactctctcccagaaacctggttctggtggccaccaagatgcccctgggtcaggctctttctgttctggagactgaagacagctgatgcagcctgaggagacatctcagaccccatcatctgaaagtgcccagagagcacagtggcagagtacatctcatccagagaaacagcatcctgcatcctccagagtcctggttccttcagtttcatcccctttctctccttccatggattatgtaatacattgtaaagttttccttaattaaaaattggaaaaaaa

SEQ ID NO: 23160 - DNA, 1680 bp, Homo Sapiens
atgccgttcccatttgggaagtctcacaaatctccagcagacattgtgaagaatctgaaggagagcatggctgttctggaaaagcaagacatttctgataaaaaagcagaaaaggctacagaagaagtttccaaaaatctggttgccatgaaagaaattctgtatggcacaaatgaaaaagagcctcagacagaagcagtagctcaacttgctcaagaactctataatagtgggctccttagcaccctggtagctgatttacagctcattgactttgagggcaaaaaagacgtggctcaaattttcaacaatattctcagaagacaaattggtacgagaactcctactgttgaatacatctgcacccaacagaatattttgttcatgttattgaaagggtatgaatctccagaaatagctctaaattgtggaataatgttaagagaatgcatcagacatgaaccacttgcaaaaatcattttgtggtcggaacagttttatgatttcttcagatatgtcgaaatgtcaacatttgacatagcttcagatgcatttgccacattcaaggatttacttacaagacataaattgctcagtgcagaatttttggaacagcattatgatagatttttcagtgaatatgagaagttacttcattcagaaaattatgtgacaaaaagacagtcactgaagcttctcggtgaactactactagatagacacaacttcacaattatgacaaaatacatcagtaaacctgagaacctcaaattaatgatgaacctgctgcgagacaaaagtcgcaacatccagtttgaggcctttcacgtttttaaggtgtttgtagccaatcctaacaagacgcagcccatcctagacatcctcctcaagaaccaggccaaactcatagagttcctcagcaagtttcagaacgacaggacggaggatgagcagtttaacgacgagaagacctatttagttaaacagatcagggatttgaagagaccagctcagcaagaagcttaatctccaataaacatctatgttaaatccaaattcagcatttgctgttagctattcagcatcaggcactcttattgattcatgaggaacattactgctaatctgctgttaagtgaacggtttttcattttacccttttgtttttcagtccaggttggagatcgtagctgctgctgcttgcacactagggcacatgtgggctttctcttgatctttgtgtcatttcagaattcaaagactgtgctacgggagttctgaacatggctgggttcatgaaggcaaatgtatggatgagagtttggtttaggaaagagggcactgatatcagattagacctatgtgtttgcacccatctttgttggcgatctgagtgcagtgtggcaagtgcacacctggcatccctgcgtcagatcgcgcaccttcaggtcgcgcaccttcgctgaaggaagatgacgcagagctttatctgaaatcagaggggagctatccaaaatgggagtttgggggcagctaaagttgacatgcgaataaattgatactgaaaaacaaaagggtaaaatgaaaaaccgttcacttaacagcagattagcagtaatgttcctcatgaatcaataagagtgcctgatgctgtatagctaacagcaaatgctgaatttt

SEQ ID NO: 23161 - DNA, 1763 bp, Homo Sapiens
aagcaattaacaaagaaggaacatttacagttcagttttatgatggagtaattcagttgtttaaaaagaatgcacattaaagccatgcccgaggatgctaaggggcaggtgaaatcccagcatccactaagctggtgttgtcctatcgacccagctggatcgtgtaaccagtctatgggaagtgaggattggatagctttagtcaaagcagctgctgcagctgcagccaagaacaaaacagggagtaaacctcgaaccagcgctaacagcaataaagataaggataaagatgagagaaagtggtttaaagtaccttcaaagaaggaggaaacttcaacttgtatagccacaccagacgtagagaagaaggaagatctgcctacatctagtgaaacatttggacttcatgtagagaacgttccaaagatggtctttccacagccagagagcacattatcaaacaagaggaaaaataatcaaggcaactcgtttcaggcaaagagagctcgacttaacaagattactggtttgttggcatccaaagctgttggggttgatggtgctgaaaaaaaggaagactacaatgaaacagctccaatgctggagcaggcgatttcacctaaacctcaaagtcagaaaaaaaatgaagctgacattagcagttctgccaacactcagaaacctgcactgttatcctcaactttgtcttcagggaaggctcgcagcaagaaatgcaaacatgaatctggagattcttctgggtgtataaaaccccctaaatcaccactttccccagaattaatacaagtcgaggatttgacgcttgtatctcagctttcttcttcagtgataaataaaactagtcctccacagcctgtgaatccccctagacctttcaagcatagtgagcggagaagaagatctcagcgtttagccaccttacccatgcctgatgattctgtagaaaaggtttcttctccctctccagccactgatgggaaagtattctccatcagttctcaaaatcagcaagaatcttcagtaccagaggtgcctgatgttgcacatttgccacttgagaagctgggaccctgtctccctcttgacttaagtcgtggttcagaagttacagcaccggtagcctcagattcctcttaccgtaatgaatgtcccagggcagaaaaagaggatacacagatgcttccaaatccttcttccaaagcaatagctgatggaagaggagctccagcagcagcaggaatatcgaaaacagaaaaaaaagtgaaattggaagacaaaagctcaacagcatttggtatcaggagttgggatttctcagcactgctaatgaagatcccctcttatagtccaataagcttatcaggacttccagagtcatgacatgaacagtttaattgaacccatccactctgggcaggtgactggaatagctgattaaaacataaatgctgcttttaggttaaccacaaaggaacaactcaggatcagtcgtgattgctaaagtattcacttttatcttttaggtaagagaaaagaaaaagataaggaaagaagagagaagagagacaaagatcactacagaccaaaacagaagaagaagaggcacctctggtactgaagattcctgctgattttgagaactggatggagaatactttcccatcaggggctggagagggagaagaaacctttttctacagaatcatcaggcatgggtaaggtggctaacgctgagatctctt

SEQ ID NO: 23162 - DNA, 1643 bp, Homo Sapiens
gcttctctgatttgcttgggtaacctttattttctaagataaaggaggaaatgatacgatcccagtcttcattcttggtatcaagcaaaaccaggatcaggtcaaatcgacttaagagtgggctgccgagggcaatgttcacagacacggactcctgggggtcgtactggcctttggggttcgttgctgccaggatggtggtccttgtgttcagcttgcacacgaggtttgttctccgcctttgtcctaatccacaccagcaggtggagccgcagttaaagtttccgagtccattccgggagcgggagcccatcttgctggctgccgaggccctcgctggaggaggagggtcagaactcgggtgcagccaatcgagggcaacgctgctacttataagagcagaatgggctgtagtttagtgaaataggaaagctgcaaaacactgtggagtgctcccgtgtaaataaaaagaggaaaaaagtttctcaagtcgccgctgcacgacgtctggccggcgctggagcgggggtctgcgctctcccgagcggccgcgcgctggactttattgtgccgcaaccagccccagttcccattgtttgtgtttttttcaaaatatggcaaaggttcaggtgaacaatgtagtggtgctggataacccttctcctttctacaacccgttccagttcgagatcaccttcgagtgcatcgaggacctgtctgaagacttggaatggaaaattatctatgtgggctctgcagaaagtgaagaatacgatcaagttttagactctgttttagtgggtcctgttcccgcaggaaggcatatgtttgtatttcaggctgatgcacctaatccaggactcattccagatgcagatgcagtaggcgtaactgttgtgctaattacttgtacctatcgaggacaagaatttattagagttggctattatgtaaataatgaatatactgagacagaattaagggaaaatccaccagtaaaaccagacttttctaagcttcaaaggaatattttggcatctaatcccagggtcacaagattccacattaattgggaagataacacagaaaaactggaagatgcagagagcagtaatccaaatctacagtcacttctttcaacagatgcattaccttcagcatcaaagggatggtccacatcagaaaactcactaaatgtcatgttagaatcccacatggactgcatgtgaccacctaccatccctttagtacaaattaagctattaaaaatacacagaactatttccctgaaattccgtaagtacatagtcaaaacacaatgtgaagaatttgtttaaaaacatcctgtagaaagtttataagaaaaccagtatttgaacaaattgtggaatataaatacaactatttttaagtaatttttttctctaatgtgttattttatttgttctgaaactaatctgattaaagcatatatattattttcttctcctttatatgtaatgaaagcacttataaagaaacaggaatcattagaccaggttgtaaagatgtcttggcctcccagacagtctttggaccactattttactggccttggaaagaacaaagtttagttcaactaaaatgtttcttcctgtgaagac

SEQ ID NO: 23163 - DNA, 1152 bp, Homo Sapiens
gttcgccgccgccgcgccggccacctggagttttttcagactccagatttccctgtcaaccacgaggagtccagagaggaaacgcggagcggagacaacagtacctgacgcctctttcagcccgggatcgccccagcagggatgggcgacaagatctggctgcccttccccgtgctccttctggccgctctgcctccggtgctgctgcctggggcggccggcttcacaccttccctcgatagcgacttcacctttacccttcccgccggccagaaggagtgcttctaccagcccatgcccctgaaggcctcgctggagatcgagtaccaagttttagatggagcaggattagatattgatttccatcttgcctctccagaaggcaaaaccttagtttttgaacaaagaaaatcagatggagttcacactgtagagactgaagttggtgattacatgttctgctttgacaatacattcagcaccatttctgagaaggtgattttctttgaattaatcctggataatatgggagaacaggcacaagaacaagaagattggaagaaatatattactggcacagatatattggatatgaaactggaagacatcctggaatccatcaacagcatcaagtccagactaagcaaaagtgggcacatacaaactctgcttagagcatttgaagctcgtgatcgaaacatacaagaaagcaactttgatagagtcaatttctggtctatggttaatttagtggtcatggtggtggtgtcagccattcaagtttatatgctgaagagtctgtttgaagataagaggaaaagtagaacttaaaactccaaactagagtacgtaacattgaaaaatgaggcataaaaatgcaataaactgttacagtcaagaccattaatggtcttctccaaaatattttgagatataaaagtaggaaacaggtataattttaatgtgaaaattaagtcttcactttctgtgcaagtaatcctgctgatccagttgtacttaagtgtgtaacaggaatattttgcagaatataggtttaactgaatgaagccatattaataactgcattttcctaactttgaaaaattttgcaaatgtcttaggtgatttaaataaatgagtattgggcctaaa

SEQ ID NO: 23164 - DNA, 1298 bp, Homo Sapiens
tcgcgcccgcttttctctcgggtgatccggccgagtggccctgggttagcagctgctgcatttccccggctggctgcggtcactggtggcagtgctcaggcgcccgcgcccttgaccttcggccccgcgagctctaaccctacagcgcaggaagatcggccgccgcggcaggctctgatgctggtgtctggtagaagaaggttactcacagttctgctgcaggctcagaagtggccctttcaaccctccagagacatgagactagtgcagttccgggcaccccacctggtgggtcctcacttgggcctggagacagggaatggtggaggggttatcaacctcaatgcctttgaccccacactcccgaagacgatgacgcagttcctagagcagggagaggccaccctctcagtggcaagaagagccctggctgcccagttgccagtcctaccacggtcggaggtaaccttcctggctccagtcacacgaccagataaggtggtgtgtgtgggcatgaattatgtggaccactgcaaagaacagaacgtgcccgtgcccaaggagcccatcatcttcagcaagtttgccagctccatcgtggggccctatgatgaggtggtcctcccaccacagagccaggaggtagattgggaagtggagctggccgtggtcattggaaagaaaggcaagcacatcaaggccacagatgctatggcccacgtgggcggcttcactgtggctcatgacgtgagtgctcgtgactggcaaatgagacgtaatgggaaacaatggctgctgggaaaaaccttcgacaccttctgccctctgggccctgccttggtgaccaaggacagtgtagcagatccacacaacttaaagatctgctgccgagtgaatggggaagtggtccagagcggcaacaccaaccagatggtattcaagacagaggacctgatagcctgggtctcccagtttgttaccttttacccaggggatgtcatcctaactgggacccccccaggtgtcggtgtattcaggaaacctcctgtctttctcaagaagggggatgaagtccagtgtgagattgaagaactaggtgtcatcatcaacaaggtggtgtgatggctcctgcacaggccctgcacataggatgagggcatctgctcccactcagcctagcccagggaaaggcccagtgacaggtgtggacaggtgccagccctgcaagccgcctcttctcggtagaagggagaaggacagagctctcttcaataaattcgtcaggtcaaagcagcaaa

SEQ ID NO: 23165 - DNA, 2183 bp, Homo Sapiens
ccagggcctgactaaacctggagactcgggtggccgaggggcttcataccagctgaagagcgacaagccgctggcagccgcggatctcaccgccgctcagggtttttagaacttcagccataaaaatgggcagaattttccttgatcatatcggtggtacccgtctgttttcttgtgcaaactgtgatacgatcctgaccaaccgctcagaactcatctccactcgtttcacaggcgccactggcagagcatttctttttaacaaggtagttaacctgcagtacagcgaagttcaagatcgggtcatgctcactggccgccacatggttcgagatgtgagctgcaaaaactgcaatagcaaactgggatggatctatgagtttgccactgaagacagccagcgatataaggaaggccgcgtgatcctggaacgtgctctagttcgagagagtgagggctttgaggagcatgtaccatctgataactcttgaagatacagagagaaatccatcttttcccaggtctccttcactgaaaacaaaaatctacttacatacactgtcaccttagcatcagagtcggattaatgaactgcggaacaagaggttgtgagaatctaagatggaacctttctttctttctttctttttttttaaattttgtattttccatccaacagcagtgtgtagagagaatattatgcagatgccgttaattttttaccctatgtttacatcttgaggcagcagagtctgtctgcagctatgtggtgagctatgtaaggaaaaaaatctgggctgttagagtgaaaaagtgtgttttatgtcaattgtgaaaggaaaatgttaggagtatggtttttaaacttgggcttcattttaaacttttttttttaaacccagttatttcacttgatttgctagcttcagagaagagatccgaatctgtgcccagcgctaaaggctcagtgttagcatggcttgtgctggccggtgtgccatattcttgttggagatgaaccgtagcaccagagcccattcttccttgtcagtcttggcccaaagatgtcaccattcctagttatttgtcaccacataattggtgttgattggaaactttttctgagatgggacagaactgctgggttgtctttttccatgtaacttaagcatagtaatataaataaagtaatagttggatgcttttggtcctgtgttgcttttaaaaacaccttataaaagaggagagtatttgataagcaattttcatagtagtaaagttttttttcatctcttaaactaaattgaccatgcatataatattctttgtttaaatgaaagcatactgttgaaacccgcagtgttgcatttagaaaacagttgaacagaatgtcaatgtgcattcatgcaaaaaaacatttaatctgcatctgttttagaaaagggggaaatgaagcaacttgtctaaaaatactgctttacaaagcatttcagcctttccccctcagttttgcattgattttttgacaagtctgtagagcctaatagtttccatcaaaggcctagatctcttatttagcatttttttcagctcttctctcagaagttcagctgttgaaacgaaaactgtactttgtaccctcacatacaaagggatcaaatttgacctggtgttattttagccccaaatttatgacattacacaatattaaaatgtaaatgtttctttacccaaactacttctagatattctagtatttgcttctggtggaattaaatgacggtaaaattggctaattatttgaatgaatgaatggatggatgttttgcatgctcaatttctaggtcctttgtctagaaaggaaatttgcctcagttgaattagtgaaatatttctgtcgttgatattaaaagtgacttctgagtacagttaagttcctcctatttgccactgggctgttggttagaagcataggtaactgattaagtaggtatgatactgcatttgaaataagtggacacaaactatcctttctccaccatggactcaatctgagaacaacagcattcatttccattcatttccatactggcttttgattatatgcagattcctagtagcatgccttacctacagcactatgtgcatttgctgtcacaataaagtatattttgtcttgcaaa

SEQ ID NO: 23166 - DNA, 4602 bp, Homo Sapiens
atgaagattcagaaaaagctgactggctgcagcaggctgatgcttctgtgtctttctctggagctgctgttggaagctggggctgggaatattcactactcagtgccggaagagacagacaaaggttccttcgtaggcaacatcgccaaggacctagggctgcaaccccaggagctggcagatggcggagtccgcatcgtctccagaggtaggatgccgcttttcgctctgaatcctagaagtggcagcttgatcaccgcgcgcaggatagaccgggaggagctctgcgctcagagcatgccgtgtctcgtgagttttaatatccttgttgaggataaaatgaagctttttcctgttgaagtagaaataattgatattaatgacaacactccccaattccagttagaggaactggagtttaaaatgaatgaaataacgactccaggtaccagagtctcattgccttttgggcaagaccttgatgtgggtatgaactcactccagagctaccaactcagctctaaccctcatttctccctggatgtgcaacagggagccgatgggcctcaacatccagagatggtgctgcagagtcccttagacagagaagaagaagctgtccaccacctcatcctcacagcttctgatgggggtgaaccagtccgttcagggaccctcagaatttacattcaggtggtggatgcaaatgacaatcctccagcatttactcaggcacaataccatataaatgtccccgaaaacgtgccgctgggtactcagctgctcatggtaaatgccactgaccctgatgagggagccaatggggaagtaacgtactcctttcacaatgtagaccacagagtggcccaaatatttcgtttagattcttacacaggagaaatatcaaataaagaaccactagatttcgaagaatacaaaatgtattcaatggaagttcaagcccaggatggtgcggggctcatggctaaagttaaggtactgatcaaagttttggatgtaaatgataatgccccagaagtgaccatcacctctgtcaccactgcagttccagaaaactttcctcctgggaccataattgctcttatcagtgtgcatgaccaggactcaggagacaatggctacaccacatgtttcattcctggaaatttaccctttaaattggaaaagttagttgataattattaccgtttagtgactgaaagaacactggacagagaacttatctctgggtacaacatcacaataacagcaatagaccaaggaactccagctctatctactgaaactcacatttcactactagtgacagatatcaatgacaactccccagtcttccatcaggactcctactctgcctacattcccgaaaacaaccccagaggagcctccatcttctctgtgagggcccacgacttggacagcaatgagaatgcacaaatcacttactccctaatagaggacactatccagggggcacccctatctgcctacctctccatcaactccgacactggggtcctgtatgcgctgcgatccttcgactatgagcagttccgggacatgcaactgaaagtgatggcgcgggacagtggggatccgcccctcagcagcaacgtgtctctcagcctattcctgctggaccagaacgacaacgcgcccgagatcctgtaccccgccctccccacagatggttctaccggcgtggagctggcgcccctctccgcagagcccggctacctggtgaccaaggtggtggcggtggacagagactcgggccagaacgcctggctgtcctaccgcctgctcaaggccagcgagccgggactcttctcggtgggtctgcacacgggcgaggtgcgcacggcgcgagccctgctggacagagacgcgctcaagcagagtctcgtggtggccgtccaggaccacggccagcccccgctctccgccactgtcacgctcaccgtggccgtggccgacaggatctccgacatcctggccgacctgggcagcctcgagccctccgccaaacccaacgattcggacctcactctgtacctggtggtggcggcggccgcggtctcctgcgtcttcctggccttcgtcatcgtgctgctggcgcacaggctgcggcgctggcacaagtcacgtctgctacaggcttcgggaggcggcttagcgagcatgcccggttcgcactttgtgggcgtggacggggttcgggctttcctgcagacctattcccacgaggtctccctcactgcggactcgcggaagagccacctgattttcccccagcccaactatgcggacacactcatcagccaggagagctgtgagaaaaagggttttctatcagcaccccagtctttacttgaagacaaaaaggaaccattttctcagcaagccccgcccaacacggactggcgtttctctcaggcccagagacccggcaccagcggctcccaaaatggcgatgacaccggcacctggcccaacaaccagtttgacacagagatgctgcaagccatgatcttggcgtccgccagtgaagctgctgatgggagctccaccctgggagggggtgccggcaccatgggattgagcgcccgctacggaccccagttcaccctgcagcacgtgcccgactaccgccagaatgtctacatcccaggcagcaatgccacactgaccaacgcagctggcaagcgggatggcaaggccccagcaggtggcaatggcaacaagaagaagtcgggcaagaaggagaagaagtaacatggaggccaggccaagagccacagggcggcctctccccaaccagcccagcttctccttacctgcacccaggcctcagagtttcagggctaacccccagaatactggtaggggccaaggccatgctccccttgggaaacagaaacaagtgcccagtcagcacctaccccttcccccccagggggttgaatatgcaaaagcagttccgctgggaacccccatccaatcaactgctgtacccatgggggtagtggggttactgtagacaccaagaaccatttgccacaccccgtttagttacagctgaactcctccatcttccaaatcaatcaggcccatccatcccatgcctccctcctccccaccccactccaacagttcctctttcccgagtaaggtggttggggtgttgaagtaccaagtaacctacaagcctcctagttctgaaaagttggaagggcatcatgacctcttggcctctcctttgattctcaatcttcccccaaagcatggtttggtgccagccccttcacctccttccagagcccaagatcaatgctcaagttttggaggacatgatcaccatccccatggtactgatgcttgctggatttagggagggcattttgctaccaagcctcttcccaacgccctggggaccagtcttctgttttgtttttcattgtttgacgtttccactgcatgccttgacttcccccacctcctcctcaaacaagagactccactgcatgttccaagacagtatggggtggtaagataaggaagggaagtgtgtggatgtggatggtgggggcatggacaaagcttgacacatcaagttatcaaggccttggaggaggctctgtatgtcctcaggggactgacaacatcctccagattccagccataaaccaataactaggctggacccttcccactacataatagggctcagcccaggcagccagctttgggctgagctaacaggaccaatggattaaactggcatttcagtccaaggaagctcgaagcaggtttaggaccaggtccccttgagaggtcagaggggcctctgtgggtgctgggtactccagaggtgccactggtggaagggtcagcggagccccagcaggaagggtgggccagccaggccattcttagtccctgggttggggaggcagggagctagggcagggaccaaatgaacagaaagtctcagcccaggatggggcttcttcaacagggcccctgccctcctgaagcctcagtccttcaccttgccaggtgccgtttctcttccgtgaaggccactgcccaggtccccagtgcgccccctagtggccatagcctggttaaagttccccagtgcctccttgtgcatagaccttcttctcccacccccttctgcccctgggtccccggccatccagcggggctgccagagaaccccagacctgcccttacagtagtgtagcgccccctccctctttcggctggtgtagaatagccagtagtgtagtgcggtgtgcttttacgtgatggcgggtgggcagcgggcggcgggctccgcgcagccgtctgtccttgatctgcccgcggcggcccgtgttgtgttttgtgctgtgtccacgcgctaaggcgaccccctcccccgtactgacttctcctataagcgcttctcttcgcatagtcacgtagctcccaccccaccctcttcctgtgtctcacgcaagttttatactctaatatttatatggctttttttcttcgacaaaaaaataataaaacgtttcttctgaaaagctg

SEQ ID NO: 23167 - DNA, 4617 bp, Homo Sapiens
atggccgctcaaaggaatcgctcaaaggaatcaaaggattgcagcgggctggtcctgctctgccttttcttcgggattccatgggaggctggagcccggcagatctcctactcaattcctgaggaattagagaaaggctctttcgtgggcaacatctccaaggacttgggtctggcgccccgggagctggcggagcgcggagtccgcatagtctccagaggtaggacgcagcttttctctctgaacccgcgcagcggcagcttgatcaccgcgggcaggatagaccgggaggagctctgcgctcagagcgcgcggtgcgtggtgagttttaatatccttgtggaagacagggtgaaactttttgggatagaaatagaagtaactgatatcaatgacaatgctccaaaattccaagcagaaaatctagacgtaaaaattaatgaaaatgtcgctgcgggaatgcgttttcctctcccggaagctattgatccggatgtgggcgtgaactccctgcagagctatcagctcagccccaataagcacttctccctaagagttcagagccgtgccaatggcgtcaagtacccggagctggtactggagcactccctagatcgcgaggaagaggccattcaccacctggtcctcaccgcctccgacgggggtgaccctctccgatctggcactgtccttgtcagtgtgactgtcttcgatgcaaatgacaacgcgccggtcttcaccttgccagaataccgagtgagtgttcctgagaatttgcctgtgggcactcagctgctgacagtcacagccaccgacagggacgaaggtgccaatggagaagtgacatattcattccgaaaattacctgacacgcaattgttgaagttccaactaaacaaatatactggagaaataaaaatatcagaaaatctagattatgaagaaaccggtttctatgaaatagaaatacaagcagaagatggaggagcatatcttgcaactgcaaaagtgttgattacagtagaagatgtaaatgacaacagtccagagctgaccatcacgtctctatttagtccagtgactgaagattcacctctgggaacagtcgtagcccttttaaatgtgcatgatttagactctgagcagaatggacaggtaacctgttccattttggcgtatctaccatttaaattagaaaagtccattgacagttattacagattggtgatacacagagcccttgacagggaacaggtatcctcttacaatatcacagtgacagccacagatgggggaagtcctcctctatcaacggaagctcactttatgctacaagtggcagatatcaatgacaacccacctaccttctctcaagtctcctactttacctatatcccagagaacaacgccaggggtgcctccatcttctcagtgacagcgctggacccggacagcaaagagaatgcccagattatttactccctggctgaagacaccatccagggggtacctctgtcctcatacatatccatcaactcagacactggcgtcctgtatgcactcagatccttcgactatgagcagtttcatgagctacagatgcaggtgacagccagcgacagcggggatcctccactcagcagcaacgtgtcgttgagcctgtttgtgctggaccagaacgacaatgcgcccgagatcctgtaccccgccctccccacagacggttccacaggcgtggagctggcgccccgctccgcagagcccggctacctggtgaccaaggtggtggcggtggacagagactccggccagaacgcctggctgtcctaccgtctgctcaaggccagcgagccgggactcttcgcggtgggggagcacacgggcgaggtgcgcacggcgcgagccctgctggacagagacgcgctcaagcaaagcctcgtagtggccgtccaggaccacggccagccccctctctccgccactgtcacgctcaccgtggccgtggccgacagcatcccccaagtcctggcggacctcggcagcttcgagtctccagctaactctgaaacctcagacctcactctgtacctggtggtagcggtggccgcggtctcctgcgtcttcctggccttcgtcatcgtgctgctggcgcacaggctgcggcgctggcacaagtcacgcctgctgcaggcttcaggaggcggcttgacaggtgtgtccggctcgcactttgtgggcgtggacggggttcgggctttcctgcagacctattcccacgaggtctctctcaccgcggactcgcgaaagagtcacctgatcttcccccagcccaattatgcggacacgctcatcagccaggagagctgtgagaaaaacgatcctttgtctttgttagatgattcgaagtttcctatagaggataccccattggttccacaagccccgcccaacacggactggcgtttctctcaggcccagagacccggcaccagcggctcccaaaatggcgatgacaccggcacctggcccaacaaccagtttgacacagagatgctgcaagccatgatcttggcgtccgccagtgaagctgctgatgggagctccaccctgggagggggtgccggcaccatgggattgagcgcccgctacggaccccagttcaccctgcagcacgtgcccgactaccgccagaatgtctacatcccaggcagcaatgccacactgaccaacgcagctggcaagcgggatggcaaggccccagcaggtggcaatggcaacaagaagaagtcgggcaagaaggagaagaagtaacatggaggccaggccaagagccacagggcggcctctccccaaccagcccagcttctccttacctgcacccaggcctcagagtttcagggctaacccccagaatactggtaggggccaaggccatgctccccttgggaaacagaaacaagtgcccagtcagcacctaccccttcccccccagggggttgaatatgcaaaagcagttccgctgggaacccccatccaatcaactgctgtacccatgggggtagtggggttactgtagacaccaagaaccatttgccacaccccgtttagttacagctgaactcctccatcttccaaatcaatcaggcccatccatcccatgcctccctcctccccaccccactccaacagttcctctttcccgagtaaggtggttggggtgttgaagtaccaagtaacctacaagcctcctagttctgaaaagttggaagggcatcatgacctcttggcctctcctttgattctcaatcttcccccaaagcatggtttggtgccagccccttcacctccttccagagcccaagatcaatgctcaagttttggaggacatgatcaccatccccatggtactgatgcttgctggatttagggagggcattttgctaccaagcctcttcccaacgccctggggaccagtcttctgttttgtttttcattgtttgacgtttccactgcatgccttgacttcccccacctcctcctcaaacaagagactccactgcatgttccaagacagtatggggtggtaagataaggaagggaagtgtgtggatgtggatggtgggggcatggacaaagcttgacacatcaagttatcaaggccttggaggaggctctgtatgtcctcaggggactgacaacatcctccagattccagccataaaccaataactaggctggacccttcccactacataatagggctcagcccaggcagccagctttgggctgagctaacaggaccaatggattaaactggcatttcagtccaaggaagctcgaagcaggtttaggaccaggtccccttgagaggtcagaggggcctctgtgggtgctgggtactccagaggtgccactggtggaagggtcagcggagccccagcaggaagggtgggccagccaggccattcttagtccctgggttggggaggcagggagctagggcagggaccaaatgaacagaaagtctcagcccaggatggggcttcttcaacagggcccctgccctcctgaagcctcagtccttcaccttgccaggtgccgtttctcttccgtgaaggccactgcccaggtccccagtgcgccccctagtggccatagcctggttaaagttccccagtgcctccttgtgcatagaccttcttctcccacccccttctgcccctgggtccccggccatccagcggggctgccagagaaccccagacctgcccttacagtagtgtagcgccccctccctctttcggctggtgtagaatagccagtagtgtagtgcggtgtgcttttacgtgatggcgggtgggcagcgggcggcgggctccgcgcagccgtctgtccttgatctgcccgcggcggcccgtgttgtgttttgtgctgtgtccacgcgctaaggcgaccccctcccccgtactgacttctcctataagcgcttctcttcgcatagtcacgtagctcccaccccaccctcttcctgtgtctcacgcaagttttatactctaatatttatatggctttttttcttcgacaaaaaaataataaaacgtttcttctgaaaagctg

SEQ ID NO: 23168 - DNA, 4578 bp, Homo Sapiens
atggggagcggcgccggggagctgggccgggctgagaggctgccagtgctctttctcttcctgctgtctttgttctgcccggcgctctgtgagcagatccgctacaggattcccgaggaaatgcccaagggctccgtagtggggaacctcgccacggacctggggttcagcgtccaggagttaccgactcgaaaactgcgcgtcagttcggagaagccttacttcaccgtgagcgcagagagcggggagttgcttgtgagcagcaggctagacagggaggagatatgcgggaagaagccagcttgtgctctggaatttgaggctgttgctgaaaatccactgaacttttatcacgtgaatgtggagatcgaggacattaatgaccacacgccaaaattcacgcaaaattcctttgagctgcaaataagtgagtctgcacagcctggcacaagatttatactagaagtagcagaagatgcagatattggcttaaactctctgcagaagtataaactctctcttaacccaagtttctcattaataattaaggagaaacaggatggtagtaaatacccggaactggcactggagaaaaccttagaccgggaacaacagagttaccatcgtttagtcctgactgccttggacggtggacatccacccctaagcggcaccactgagctccggatccaggtaaccgacgccaatgataatcccccggtattcaaccgagacgtgtacagagtcagccttcgggaaaacgtgccaccaggcaccactgtgttgcaagtgtcagccactgaccaagacgagggcatcaactcagaaattacttattccttctacagaaccgggcaaatctttagtctgaattcaaagagcggagaaattaccactcaaaagaaactggattttgaagagaccaaggaatattcaatggttgtagaagggagggatggtggtggactggttgcacaatgtacagttgaaattaatattcaagatgaaaatgacaatagcccagaagttacattccattctctacttgaaatgattctggaaaacgcggtgcctggaacactaattgctttgatcaaaatacatgaccaagattctggggaaaatggggaggttaattgtcaattacaaggcgaagtcccttttaagattatctcttcatccaaaaattcgtataagttggtaacagatggaaccctagaccgagagcaaaccccggagtacaatgtcaccatcacagccacagacaggggcaagccgcccctctcctccagcataagcgtcatcctacatatcagagacgtcaacgataacgctccggttttccaccaggcgtcctacttagtcagtgtacccgaaaacaaccctcctggggcctccatcgcgcaagtctgcgcctcggacctggacttggggttgaacggccaagtctcctactctatcatggccagcgacctagagcctctggcactggcctcttacgtgtccatgagcgcgcaaagtggggtggtgttcgcgcagcgcgcctttgactacgagcagctgcgcaccttcgaactcacactacaggcccgcgaccagggctcgcctgcgctcagcgcaaacgtgagcctgcgcgtgttggtgggcgaccgaaacgacaacgcaccgcgggtgctgtaccccgcgctgggtcccgacggctctgcgctcttcgatatggtgccgcgcgctgcagagcccggctacctggtgaccaaggtagtggccgtggacgcagactcaggacacaacgcctggctgtcctaccacgtgctgcaggctagcgagcccgggctcttcagcctggggctgcgcacaggagaggtgcgcacagcgcgtgccttgggcgacagggacgcggcccgccagcgcctgctggttgctgtgcgtgatggtggacagccgccactctccgccaccgccacgctgcacttggtctttgctgacagcttgcaggaggtgctgccggatatcactgaccgccctgtaccctctgacccccaggctgagctgcagttttacctagtggtggccttggccttgatctcagtgctcttcctcctggccgtgattctggccgttgccttgcgcctgcgacgctcctccagccctgccgcctggagctgcttccaacctggtctctgtgtcaagtctggacctgtggttccccccaactacagtcaggggactttgccttattcctacaacctatgtgttgcacatacaggaaagacggagtttaatttcctaaaatgtagtgagcaattgagttcaggacaagacatactttgtggtgattcatctggggccttatttccactttgtaattccagcgagtcgacttcccatcctgagttgcaagccccgcccaacacggactggcgtttctctcaggcccagagacccggcaccagcggctcccaaaatggcgatgacaccggcacctggcccaacaaccagtttgacacagagatgctgcaagccatgatcttggcgtccgccagtgaagctgctgatgggagctccaccctgggagggggtgccggcaccatgggattgagcgcccgctacggaccccagttcaccctgcagcacgtgcccgactaccgccagaatgtctacatcccaggcagcaatgccacactgaccaacgcagctggcaagcgggatggcaaggccccagcaggtggcaatggcaacaagaagaagtcgggcaagaaggagaagaagtaacatggaggccaggccaagagccacagggcggcctctccccaaccagcccagcttctccttacctgcacccaggcctcagagtttcagggctaacccccagaatactggtaggggccaaggccatgctccccttgggaaacagaaacaagtgcccagtcagcacctaccccttcccccccagggggttgaatatgcaaaagcagttccgctgggaacccccatccaatcaactgctgtacccatgggggtagtggggttactgtagacaccaagaaccatttgccacaccccgtttagttacagctgaactcctccatcttccaaatcaatcaggcccatccatcccatgcctccctcctccccaccccactccaacagttcctctttcccgagtaaggtggttggggtgttgaagtaccaagtaacctacaagcctcctagttctgaaaagttggaagggcatcatgacctcttggcctctcctttgattctcaatcttcccccaaagcatggtttggtgccagccccttcacctccttccagagcccaagatcaatgctcaagttttggaggacatgatcaccatccccatggtactgatgcttgctggatttagggagggcattttgctaccaagcctcttcccaacgccctggggaccagtcttctgttttgtttttcattgtttgacgtttccactgcatgccttgacttcccccacctcctcctcaaacaagagactccactgcatgttccaagacagtatggggtggtaagataaggaagggaagtgtgtggatgtggatggtgggggcatggacaaagcttgacacatcaagttatcaaggccttggaggaggctctgtatgtcctcaggggactgacaacatcctccagattccagccataaaccaataactaggctggacccttcccactacataatagggctcagcccaggcagccagctttgggctgagctaacaggaccaatggattaaactggcatttcagtccaaggaagctcgaagcaggtttaggaccaggtccccttgagaggtcagaggggcctctgtgggtgctgggtactccagaggtgccactggtggaagggtcagcggagccccagcaggaagggtgggccagccaggccattcttagtccctgggttggggaggcagggagctagggcagggaccaaatgaacagaaagtctcagcccaggatggggcttcttcaacagggcccctgccctcctgaagcctcagtccttcaccttgccaggtgccgtttctcttccgtgaaggccactgcccaggtccccagtgcgccccctagtggccatagcctggttaaagttccccagtgcctccttgtgcatagaccttcttctcccacccccttctgcccctgggtccccggccatccagcggggctgccagagaaccccagacctgcccttacagtagtgtagcgccccctccctctttcggctggtgtagaatagccagtagtgtagtgcggtgtgcttttacgtgatggcgggtgggcagcgggcggcgggctccgcgcagccgtctgtccttgatctgcccgcggcggcccgtgttgtgttttgtgctgtgtccacgcgctaaggcgaccccctcccccgtactgacttctcctataagcgcttctcttcgcatagtcacgtagctcccaccccaccctcttcctgtgtctcacgcaagttttatactctaatatttatatggctttttttcttcgacaaaaaaataataaaacgtttcttctgaaaagctg

SEQ ID NO: 23169 - DNA, 4596 bp, Homo Sapiens
atgggagggagctgcgcgcagaggcgccgggccggcccgcggcaggtactatttcctttgctgctgcctttgttctaccccacgctgtgtgagccgatccgctactcgattccggaggagctggccaagggctcggtggtggggaacctcgctaaggatctagggcttagtgtcctggatgtgtcggctcgcgagctgcgagtgagcgcggagaagctgcacttcagcgtagacgcgcagagcggggacttacttgtgaaggaccgaatagaccgtgagcaaatatgcaaagagagaagaagatgtgagttgcaattggaagctgtggtggaaaatcctttaaatatttttcatgtcattgtggtgattgaggatgttaatgaccacgcccctcaattccggaaagatgaaataaacttagaaatcagtgaatccgtcagcctggggatgggaacaattcttgagtctgcagaagatcctgatattagtatgaattcgctgagcaaataccaactaagtcctaacgagtatttctcattggtggagaaagacaatcctgatggtggcaaatatccagaattagtattgcagaagactctggaccgagaaacgcagagcgctcaccacttggtactgaccgccttagatggtggggaccctccccgaagcggtactgctcagataagaatcctggtaatagatgccaatgacaaccccccagtgttcagccaggacgtgtacagggttagccttcgggaagacgtgcctccaggcacctccatcctgagagtgaaggccactgaccaggacgagggcatcaactcagagatcacttattccttctttggtgtggctgacaaagctcagcacgtgttctctctggattacactacaggaaacattctaactcagcagcctttggattttgaagaagtagaaagatatacgataaacatagaagcaaaagaccgaggatctctctcaacacggtgtaaagtaattgtagaagttgtagacgaaaacgacaacagcccagaaataatcatcacgtcactctctgatcagattatggaggattcccctccaggagtggttgttgccctcttcaaaacacgggaccaagactcaggggaaaatggggaagtcaggtgtagcttaagtagaggtgttccatttaagattcattcttcttctaataattactacaagctagtaacagatgaggccctggatcgggagcagaccccagagtacaacgtcaccatcgcagccacagacaggggcaagcctccgttatcctccagcaaaaccataaccctgcacattactgacgtcaatgacaacgcgccggttttcggacagtcagcctacctggtccacgtgccagaaaacaaccagccgggtgcctccatagcgcaagtcagtgcctctgacccagacttcgggctcaacggccgtgtctcctactctctcattgccagcgacctggagtcacgaacgctgtcgtcctacgtgtccgtgagcgcgcagagcggggtggtgttcgcgcagcgcgccttcgaccacgagcagctgcgcaccttcgagctcacgctgcaggcccgcgaccagggctcgcccgcgctcagcgccaatgtgagcctgcgcgtgttggtgggcgaccgtaacgacaacgcaccgcgggtgctgtaccctgcgctgggtcccgacggctccgcgctcttcgacacagtgccgcgggccgcgcagccaggctacctggtgaccaaggtggtggccgtggacgcggactcggggcacaatgcctggctgtcctaccacgtggtgcaggccagtgagcccgggctcttcagcctggggctgcgaacaggcgaggtgcgcatggtgcgtgctttgggtgacaaggactcggtccgccagcgcctgctagtcgctgtaagagatggaggacagccacccctttcagccactgccacgctgcacctggtgttcgcagatagcttgcaagaggtactgccggatttcagcgaccatcccacaccctctgactcccaggctgagatgcagttttacctggtggtggccttggccttgatttctgtgctctttctcctcgcggtgattctagctattgctctacgcctgcgacagtctttcagccctactgcaggagactgctttgagtcagttctctgctccaagtccggacctgtgggtccccccaactacagtgagggaacgttgccctatgcctataatttttgtgtgcctggggatcaaatgaatccagaatttaattttttcacatctgttgatcattgtccagccacacaagataacctcaacaaagatagcatgctactggctagcattttaactcccagcgttgaagcagataagaagattcttaaacagcaagccccgcccaacacggactggcgtttctctcaggcccagagacccggcaccagcggctcccaaaatggcgatgacaccggcacctggcccaacaaccagtttgacacagagatgctgcaagccatgatcttggcgtccgccagtgaagctgctgatgggagctccaccctgggagggggtgccggcaccatgggattgagcgcccgctacggaccccagttcaccctgcagcacgtgcccgactaccgccagaatgtctacatcccaggcagcaatgccacactgaccaacgcagctggcaagcgggatggcaaggccccagcaggtggcaatggcaacaagaagaagtcgggcaagaaggagaagaagtaacatggaggccaggccaagagccacagggcggcctctccccaaccagcccagcttctccttacctgcacccaggcctcagagtttcagggctaacccccagaatactggtaggggccaaggccatgctccccttgggaaacagaaacaagtgcccagtcagcacctaccccttcccccccagggggttgaatatgcaaaagcagttccgctgggaacccccatccaatcaactgctgtacccatgggggtagtggggttactgtagacaccaagaaccatttgccacaccccgtttagttacagctgaactcctccatcttccaaatcaatcaggcccatccatcccatgcctccctcctccccaccccactccaacagttcctctttcccgagtaaggtggttggggtgttgaagtaccaagtaacctacaagcctcctagttctgaaaagttggaagggcatcatgacctcttggcctctcctttgattctcaatcttcccccaaagcatggtttggtgccagccccttcacctccttccagagcccaagatcaatgctcaagttttggaggacatgatcaccatccccatggtactgatgcttgctggatttagggagggcattttgctaccaagcctcttcccaacgccctggggaccagtcttctgttttgtttttcattgtttgacgtttccactgcatgccttgacttcccccacctcctcctcaaacaagagactccactgcatgttccaagacagtatggggtggtaagataaggaagggaagtgtgtggatgtggatggtgggggcatggacaaagcttgacacatcaagttatcaaggccttggaggaggctctgtatgtcctcaggggactgacaacatcctccagattccagccataaaccaataactaggctggacccttcccactacataatagggctcagcccaggcagccagctttgggctgagctaacaggaccaatggattaaactggcatttcagtccaaggaagctcgaagcaggtttaggaccaggtccccttgagaggtcagaggggcctctgtgggtgctgggtactccagaggtgccactggtggaagggtcagcggagccccagcaggaagggtgggccagccaggccattcttagtccctgggttggggaggcagggagctagggcagggaccaaatgaacagaaagtctcagcccaggatggggcttcttcaacagggcccctgccctcctgaagcctcagtccttcaccttgccaggtgccgtttctcttccgtgaaggccactgcccaggtccccagtgcgccccctagtggccatagcctggttaaagttccccagtgcctccttgtgcatagaccttcttctcccacccccttctgcccctgggtccccggccatccagcggggctgccagagaaccccagacctgcccttacagtagtgtagcgccccctccctctttcggctggtgtagaatagccagtagtgtagtgcggtgtgcttttacgtgatggcgggtgggcagcgggcggcgggctccgcgcagccgtctgtccttgatctgcccgcggcggcccgtgttgtgttttgtgctgtgtccacgcgctaaggcgaccccctcccccgtactgacttctcctataagcgcttctcttcgcatagtcacgtagctcccaccccaccctcttcctgtgtctcacgcaagttttatactctaatatttatatggctttttttcttcgacaaaaaaataataaaacgtttcttctgaaaagctg

SEQ ID NO: 23170 - DNA, 170452 bp, Homo Sapiens
  misc_feature (3381)..(3381): n is a, c, g, or t
  misc_feature (3384)..(3384): n is a, c, g, or t
  misc_feature (3392)..(3392): n is a, c, g, or t
  misc_feature (3400)..(3400): n is a, c, g, or t
  misc_feature (3406)..(3407): n is a, c, g, or t
  misc_feature (3423)..(3423): n is a, c, g, or t
  misc_feature (3446)..(3446): n is a, c, g, or t
  misc_feature (3545)..(3545): n is a, c, g, or t
  misc_feature (3905)..(3905): n is a, c, g, or t
  misc_feature (3907)..(3907): n is a, c, g, or t
  misc_feature (3909)..(3909): n is a, c, g, or t
  misc_feature (3922)..(3922): n is a, c, g, or t
  misc_feature (3924)..(3924): n is a, c, g, or t
  misc_feature (3927)..(3927): n is a, c, g, or t
  misc_feature (15605)..(15605): n is a, c, g, or t
  misc_feature (144156)..(144156): n is a, c, g, or t
tcagagtgagataacctaagtcccaaaccttatgaagtgtttatcttgggcaagtctcttaaactctctgtgtcccaagtggctacctctaaaagggagatgataaaaaggacactacataaaagggctactatgaaatgtaatgagattataaatatactgtaagatgctttgcatagttcctggccacacagtaactaaacaacaaatgttagccattatttttattttctttctattatttttataattattaactattaaaataaaggtaggaactattatcattctctttctacaattgacggtacagagaatgcttctgcttgaagttgcaaaatgttacaaatggttaaaaaaacattagagaaagagagcaggagagaaggaagagtaagaagcgttacaggaagaatcaagagatactagcctagaaataaaaagactcatcctggagaacttggttaaggtgggttctgtgagcatgtgggagcctggtaggtccagaatagacacttcttatagcagatctagaactggcaacaaactgtagtaagccaaagagtgaggtaggacctaacagattggactaggaatccaacctacatgacctagatttctgattatctggctccacttcctttaccgtcacagagagtaaggtctccagttcctcccctgtactagaatgctcccagacaacctaggtgattagtgagagtttaagttctctactctgaaggacttgggttcagacacaactcaatcacttataagcttagtgaccttggactgacccttaatttcttcatttgcaaaatgaggaaactaactgcatcttatcccatagggttgccatgaagataaaatgagatggctcccaacaagtactggatgctgtctggggggtaaaggaagctttcaataatcacataaacagaagtagcattcaacctggctgagcaaatgctttagataaaatcgaagttctttctcttccctgccctgactccccagaagagaataatatatggtataagcaaatccaaaaatacccgctaaaggaagttaacaatcagcaactatcattcttaatgtcttgggcaaatcagcatacttttcaaatacaaaaaacacaaacaaacaaacaaacaaataacacctcaaataattaagtactttatgaaaataagtcaaagtttctttagaaactttgtcttaagaatcagacaaaggccagcccaccacctatgtcatggaggggtcataaggaaagagaatgaagaaagagaaaaagaaaaaggggtgaaattctaatatttaacatctccaggcacacgccccagcctctcacgcagccctacctaccacaaccaaccaccacatttgatgcttgaaatctacctaaatcaaatcgatatttgccttagcactttccaaatatctaggcttcccctagaaatacttacaagggagatgatattcagtttagactcaaaggccagttgtttcaaatgtcaagtgaaataatatctcctcctccttcatcgtgctcataaacttatacaacaaagacatcctgaccctcagaggtcagagaactcaagcaagagaacgagaatgcaagatatctccaaggttattttggaactaggcatggcttgaagacacatctaatggtgaagggcttttaattgaggtgctgcacaccacctggttggggttggggtctctgggtgggtggatcaggcagtgggggacagtgaaaactggtgaaattatcttggaatgtgcttttatccatagagcttggatatacccttccttagctgatcagagagggcccgggaaccaaaagacattaagatcttagaatgcattttctactctctcattttatagatagcacaactgagtcccagataaaataaaagtgtttttcccaatatcatacatctgctgatggtcctgacttagccactaggcaagtcccccagactccagcctgcggttgcttccatctatcaaggcctcttttcaagctacttggaaggctctcctagcaaagatgactacaatttatgctcccttcacaacattttgattgatttttggtggaaaagtaggcatccctgaagcgtttctttaaaataaatccagcctgccaaaccagcactgatgtacaaccctagtagaagaatccaccattggccacaataatagcaaaaagggtaatgagaaataaacgtatttaagtttacaagcctcgaagaggttatcacacacaatgacaggaatctttgtgtcaagactgaacaagtaaccctgatttaactttacattttgatagagtcagccgcgttgcagtcattgtttcgtctaacaattaaaagcggaatttgaaactattcctgtccatagttccccttaaaaaatctaaagcaaagagattctctcatgccaggattgaatgaatttataattatctatctgtagctccaggacaaaagacttaaacacaaaaaagccaaataaaccaaggacaaatttctgatagttctagttaccctgcctattaaatgatagacacattaaaagaaagagagtgatatttggaatattcagaagttggtggtccatttctcatgctttgttttagtatcactctttcttagacgaaagacagtcatgaagttgtttgtgaagactctcatcagacaagagtacagtgttaataaatgcatttagcaagcatttactatgtgccaaacactatgctatgtatgggctgtcatgtacaatctcagttcatcctcataataaacctgtgggtaagtattattgctaatttcagtttaaagaaattagcaataatacttgaggaaactgaggcctaaaacaggcaaagtaacttactccagttgcatggctaataacttgcaatttggactcaaattccaaagcctgtatgtttttactcgctaaagtttgtggtcttggccagcaaatttcaagaaggcctgtcataaagctgtgctgagagggccaccttacatgccaattacaaccttatttaaaatttaaagtacgttatttcttcctgaaatggaaaataaaccatgagatatctacaatattactatgctttagagtcccaaaatcactcatgtataattagttatacccatgatgtaaatattttaaatattattaaatgccttactataaatattagaggctggaatagttaaacagctaattaactagctagtggccatctctttacctctcagcatttctactctgttatctgaaacaacccatacaagtatctaagtagaagtttagaaacaacggggctttgtgcaaatatatgttcanggntgtttatngatagacngtttcnntgttctctctataaanggtggttaatatcatattatggngacttccatacatgacaatgctagtagagtcagatggcaaagaatgaggtaaacttgtaattgctatcctaacagacaaagctccaaatcatactctgnaagacaaaaaggtaactcctagaagaaatataatatgatcctgtttataatcaaatctagataatgtacataaaggatattaagtcatgaaacagtgcttggaaasatacacaccagtcatctgacagtaataacctatgaagatgaacgaggaagtagagaaatttcatattttatatattggaatttgaactacttttttttaaataatgaaaagtgtttgtgtattaagtgtattataaaaaatatccaaatagttcaaaatgacagtawgattacaggttatgtatagyttacatcccaacctgttacaattcatgacaaaacaaatggtttaaagkgtaaaatttctaatgtaananangtcatttactcantntgnctgtcaaaaagcccatacagaaacctatttgagaagctttcgatctaagaaatgggatctgggaccttaaaaaaaggctaaaactcaatggtctggatatttgtgagactatattccaaccagtacaccaggttactgcttcccagactctgttcttcaaaagacaatgtgtcaagtttccaaattatggggggcaagggtagtgaaaagtgagtgtgaacctaacagacaactaactgaatacttccctctgcatctggaggcttaggaattcagcagacagacataagcaaaccattctgtgaaattgttagggtgctattctttctgacgttgtgttggtttcctattgaacatctgaagactgttttaacatgtgtgcctaaaaatgtcacactgaggctgagagagcacagagccaggggccacccagactttcaaatcagctctcagaagcagccagggaaattccaaccttggtcttgtggtcctcaagaactacagaagcatggcagaattttagattcacaggttgtttgtacagttagtgcatttatacctaactcctcaaagtcagagatattttttataactcagcattgccctcattgctttcttatcacatattttgcatgtgtttccatctccaagattcagggaaaacaagatacttagttgggaatgtctagagtggagaccttataaaaattacttgacagacttgggagaggaaagcattttgcaaaacaccagctatgagaataaacaattttagagaatcccttggggacattttttttcctatggatcccaaaatcttttttaaatagaaacatctcaggcaggggtaagaaattattggttaagcccatttagaacgtgtacgctgtcatggaacattcctatcaatggggcacattgaaactctacactaagatatggtggggctgtggtgctttactggataaataagaaggggtttggtcgctatactcccaccctgcccataaatgagtaagcccgtgtgacaagagtacatgttttcgaaaagaaagaaactgtgaaactgagcgtcaccatcctgccacataaaaagcaacagaaatgagaattaaattcagcactttcttaatgggagactgaggaaatctgggaaatgaaacagtagctcttctccagtccttcccagcataataaggtcagctgacaacactgttcgacagagaagacttaatgtgtctgacagatggcaaatacaccatattgacttttcttcctaatttaacaaatttgaatcttttgtcaattttctttccccagtgaaaagatattctaaaacaccacttaagcttacattgctcttttccccctctccctcttacacattaagtttgacactatctaaagaaactgaagctaactcactaaattaactcacctttccagctcttcatgatcatcacaaatttgggcattggcatgaatgttaattcctcatctctgccaactgtaaggcagatactcacttcaggccagaggaaggtggctgaatggacaacaaggattccttgaactcttaaaaataacacacaaaagtgtgcatctatattcttcatacttcaaaactatgtatctatgttcttcaagagtccccagttttgcccagttcctgaaggtataatgcctctggctttagctataggttgttataattagccctcattctacagtttctaaccggactttggaattttacggggtttgtctatataagatggatgggatgatagcagagaagagcttcaaactagtggagctcctggatcacaaagctgtgtaagtcatcccaagtgtgactcaagttcagcctggagaagccatggccaggccaaggatagcttgtcccacaaggaggcaaggggctgtttcccaccactgccccatcccttccaccatgtgaggacacagggagaagatagcatctatgaaccagaaagtgggcattcaccagacaacaaagctgccagtgtcttgatcttgaacttcccagcctcaagaatgtgagaaaaaaatgttggtcatttataagccacccagtttgtggtattaccttagagcatcccaaatgaactaaaccactgttttcataatttacaatgtgtcctaaaattaattataatcctaactatgaacatgaaattctgccaatgtgaaaataacattagtttctcttgacaacctttgtagttatgttacccaaaagtatctatagacaaagcatctgaagattttagtgcttattcactattataaacaacaaccacaaaaaacccaccaccaacaaaaaaaacactgggtccatggagaaataagtttgaaaaatatttcattatgcaaagtaaaatggatttattacaaaaaccttcttagagcatctcatggaaatggagtttagaagaatactatgctttagattattcctgaatccagacacatttttttaaaattttaactcaaaggattaaaatttccacacttggaatgcccctgtatgaggaagaactgaacgctgtcctgtcttgtctaagtttcagagtaatccctatgtttctagctgattagctggtttcataaggcaaagggccttctgaaaatgggccattgcttctgtgacaaattcaatatccaaattctattgctgcccttgaactgtgctctctgatttcctgctgcaaaaatgtaggccatcagtggggacgtgaaaaatttgttcattacacacagattcccacagtggcagtgcctggccacattaccgaacctatagataacatcacagcacctgacatccagcccacatttcctcagcctcagagtaaagaacataccacggtgcccgcacattaacgcagagagatgcccttgataattaacagttcttatggagtctctcgaatgctaaatggtcaaatagagaagttaaacacacataaaacatttaatgtgaaatgaggcaaatatgccaaattaacctgaaatgcacacaaaagcctttcagctctggaatcgatattaatcattttctggaattcaagaaaaagtctgatgtggttaatttaaaattatattttatgatagagaacaaaaatatcccacaggattcaaggtatcagtttacactactgccactcctttttgctaccagggtcagcaaaaagaaaaaaaaaattattgatctggtattaaaaatcagttgacttcacttctttctgaacaggtattctttgaccactaagcactggctagtcttacctctctctctagtgacaacatgaagagataaatagactattcaaacagagctcttcgcgttacattagctgaataaatagtgatgtatggtctcttttctcaagcactgccttagcttgtgaagatgagagtgaggaagatggggcttatgaatcctatttgaatatttaaataaacacaaaataacatccctgaagatggttgtttaagtggaaaaagaaggtatgaaaatctgtcttttaattgtagcttttggggcaacaaaaaatcccccaataaacttttgagattccagtgtcaagtgaaatcacagaagaaaaaaaaaattaatttgtggttttataagcagtatccagaggaaatgggatgccagtcccacagggttttcaaaggctgcaaagctagcacaaaccaattcacctaaagtgaagtatattatcaataactaactgtgatcactttttggccttccagctaagatcaagtgtaataactaactttactttgggaatatttcacaatgaatttttgccctctttaatctgctttaagatttctgtgctcaatttctggtatatgccgtacttgcagaaagggatgaagttctgagctaggttaagtgcttgtggctaactacaaatgtgttaacacaatgtaattaggtcatcaaacagcatcatgtttattaggtaccaatagataaaaaaagggagcaggcctagaccagcacatcagccccagtccctactgtcttggaactgggattctgagacatctccgtggcttctacacattactggcataattactaaatccaaagttttctatttgtaaattagagattctagcaaggaaaagatgaagtcctatgcatcgtgcattagccaggattctttttttgattttttttttcattctgttgcccaggctggagcacaatgccactatctcagctcactgcaacccccacctccctggctcaagcgatcctcccacctcagtcttccaagtagctgggactagaggcatgtgccaccatgcccagctaatatttgtattttttgtagacatggggtttggctacgttgcccaggctggcctcaaactcctgagctcaagcagtcggcccacctcagtctcccaaagtgctgggattagaggtatgtgccaccactcccagcaggtcaggactcttttggaacaaaaagaaggggtatatttattggttcacataaacacatcctcaggaatgttaaggcagaaccagtacagtcctaccttcctattggcagttttactttctatggtttcaagttgcctacaatcaactatggcctgaaaataagtgactagagtacaatattctgagagcaagaaaaagaccacaattattaactttgtactacaatatattggtatagttgtactattttattagtagtaattgatctcttactgtgtctaatttataaattaaacttcatcgtaactatgtacatataggaaaaaacagtacaaacagaatttggtaccatctgcagttttaggcatccgctggggtcttagaatgtattccctttagataaggcggactaatgtatagtcctttccctctccagtgttggcttcattctctcagaataaagatgacaacctggctgtggaaggtggcctcaggaagctcccaacctagtaatcagagaagaatgagaggattgccccattagtaccagaaaatccctatattagcaaagacagggacctgatttggtcaagtctccattcctgtattacccctgtggccaaaggggattgagtaactataattaatccagtcatgagggaggaagagttgctgcatagaccaaaaacaagagcctctacgtactgaagtgatagggcaaagaacatatatttacgaattataaccaagtctaaattgtattagaattcctagaagatcaatgttacttaactttcctgtgaataatactcttgcctcttactaagtagcacactatccctaatattccaaggtgaaactcagtcactgagaattgggcatgctgcaccagactgttttcccagtagtagcaggagatatgctgaacctcatattctttctctttactgctttattatcattaatgccttagactgaatttctccagaactgatcatgagacaggaatctgagtacaaatggattatttgagagatgggcccaggaagcaccattaggggagaagtggaagtaagacaggggaaaaaagaaatctactacaagaaacatttataagaatgttagtgcttcaagcaattggggctcaaatccactgggggggcgctctggaagacagcgtggaacatgctaccctctgagttttcgcacttacgacataggaagctggggaatttatcctcaaattcccactggtattggctaaacattgttcctaaagtcaataattcctgacactttaggcctacactctacaccagcaagagaaagccccagagtgcagagtaaaaggcatgtgaaatagaataaccttagcacatatgagaagggtgagtcccagagaatggaaccaaggcacacagccttggctaataccagtaacacacacttatgaaaatgtgccttcatttattcaaatacttaccaagctcctattaagtttgagttttcttctagatgatgggcatacactgagggacaaaacaaagattattgtcttatttaatacccagcacaactgggcggggcaggggcagattccaggggctacatgtcataatcctcttcacaacagcaacttcaaatgtggtccctaatcttaagagtagcagcagggtcagcagtattgggcttcaccattactaagccaggtgtgttgaggtctatgatccagtaatgaacctgaatcagaaatggaatctcagataggtattggaaaagtgggagagttcccatcgtaggacagtgagttacattttgtttaggaaactcttcagggacatcttctctgtggtggcttgtgtccagaggcactgcagagttgcctgctctaactcttgacagttgagtggggcatgcagcttctggacatggaaaggactaaagttaatttgcccatctggggattgaactggcatcagtgacttcaaatgtgtcctgcagagcccaaatgatctccattacaaacacagaacgctccgccttccaaatgccacagaattccattttatctgcactggcagggtaaggcagagtatttgccaaaactccagacatagggggttatttgtaaaaccttagagtattatcaggtgttgctttcaataaaccattacacttgtacagaaagtaacaaactacgtggtctaaggaccagttatccctattccaaaaaataaagtgtaagtaagtaaagcaattttacattgaatcttgaacatctatgtacataatttagaatttgctaaaaggtaattttatctgtgctgattatctttaccatttggcatttcccatctcagggcaatgagtacaacttcacaagtccagctccgcttagctgtgagtactcaatttcactaaagacttaaacagaaaattaaaaatctgtgagaattgggatgagtcctgtctgtcttaaagcagggtgagcaaatatatgtggcacatgcccttaagagacattattaattgatcacctctcactttcacactgagcctaggctgaaccttagaatccgtcacagcgcaggtgtccactcagtcatgactggccttccagaactgggtactggaaatgaaacctacttgacacttaggatacatttatagagcctggtcccctcagtactatactcccctctcacaaacagagagagagaaaaaaaagaggaagaggagagcagagaaaggatgggggaaggaatgagaggaagaaaaaaaactctgaaccaagtatcacttcctttgcggtctgcacatgtcaaggaatactccattttaagcatattataacggcaaaaagaaaaaagcactatcaatagcggttcacactttatggctgcccaccctgaaactgtagcagctaactttcttgggaaaactcagacagactcattctttccaaaaacaaggaaagaagaaaaagaatttcccacatccttaagataactgagaagctctcagtaggagtaaactgtccaaataaaattcaacggcaccccctttggaaggatagttaagaaacaccacatgtacaaagaaggattaagattccaaatactgtcttttctccaactcgatttttccttcttgtgcccttacttctcaaacagttattccctttgctatatcacccagaagtctgtgattggatctcccttggactccaaagggctctgggtatgagaaagtagtccaaaatataaatatatttatataaatatatacatatataaatataaatatatttatataaatatataaatatataatataaatatatttatataaatatataaatatataatataaatatatttatattatatatttatataaatatatttatataaatatataaatataaatatatttatataaatatataatataaatatattttgtattatatattaaaacatatacgtatatatgtgtatatatgtataggatttactatagaaaaatatttcatatttttatatatttatatattttatattatatattaaaaatatatgtacgtatgtataggatttatatacatatatgtatatatgtataggatttactatagaaaaatattttatattttatatatattaaaaaataaaaaaaataaaaatataaaatatataaaatatataaaaatataaaatatatctatatatatctatattatatatagatatgaagatataaaaaatctatatattttatatagatataaaatatataattatataaataatatagacataaaaatatatatttatatattttttctataggaaatcctatatatacttatttatttatttatttaggactgcttttcctgaaactctgtaaaagttttcatcatactagctatttcttgtgatgagccagatcatcattcacctggtataaatgagcttggctgtgaacacggttagaaattagagccaaggatgatctattagttcatcgtgtgtgtctcatgggacaaaagcaaatgtgtttctctaaagagttttcttgaatggtttcccaagtccaacttgaaatcacattcacaatcttgtcattttcctctttcttgcagcacaccagtaattagatgttttaacacgtcatggcaatgatatctaacatgaaggcaaactgtattaagacacagcatcacccagttttatactgtaagctcatttccaaacattatttgtttttataaatttgagcgaggctgactctttcctctctgcctttaattaataaggaaagcttaatatgcacttttttttcatcaatctggcactaaaaatcctgaattccttttgtagtaatttgaaagaagagtttggggctattaggagaaattcacattaggcatttccctacatggcctacttatgtttttcaaagtgaagggatatttcaaggaaagaaagacttggggtactagagatgtctgccccatctaaagtcttatttttctatttcctatatcaagaagccttaggtacattttagtaacatagcttgaaatatattttgaaaaggggaacaagatgtaacctgacccactacagaaaaatgcctcatgtagatccttgaatgaatttatgactgtaaaagtccctctcttttgtttcctgggtaattatttcacacatttgggaggtttatagggaatgcgtatcagcttttcaagtaaaaagtgtgaggctctgactcttcctggaaatctggaagcaacagagaatgagaaattctcaggcagcctccaaaattgagcaagagatactgcaggtcaccttcagtgctgaatattccaaagttaacttcgttaaaaatgcacaaacaacctgagaaaatatctgattttaccttttaaaagtaggattaaaaatttaggaagcttcgtgacttactctcgcatctctctttgatatttctttgtttggtatttctctcacctcttatgccctggtggagtctattgttggtttatgtgtaacatgatcgaataaagcaaaattgtaaacattttctttttaaataaatagacttttacctgaacattataatcacagtatctcattcatccattcactcattcattcatccatctattcattcattcacccattcatttattcactcaggtattttctgagttctttctgtgtatctggcgctcctctaagcagtggggatacacatgtcccctgttctcatgagcttacagtctcctggtgaaggattttaatcaaatcatcacacttgtgcctaagggtttcaaactgagataaggatctcaaaataaaggagcaaacacccgaaggatcaaggacgacttccctgtgggggtggtccctgagccaagggcttcagcagaagcagaggtcaagtaagtaggaagtaggacaagccctccaagataggcgaatgcagttagggcctcgagcaggaggaaacaggggcaaagctctgaaagtaaaggacaggtagtatttgctgagctactctaagacagattctcccacctatgctgacagcatgcacaatttcagctcaatgaatacaaatgaatgctctaagtattttttagattctctagattatgcacattgaggagcagtttggggtagggatgatggaggtctggccattagactcaggctttaaagaggttctgggaaggggagccaatctgaagtacctggaaattggaaaaaatagatgaacagtgattttatctggcttccaatggcagacaaatttcctttcgggaaaggcagatattctcatttcaagccaggctcctctgcccctcactttagcatatgaggaaactgagctcttgagttcctggaaacctttgagaatatggagacagccttttcactaggtcagtttagcttcagagggaatgagatggctgacttcccccacacattaggactttcattccaaccctcggccagcacctagggaacaaagcaaggccccagctttagttctacttaaagtgagacactgcttgctctttcacactcaggttaacattcactccaacaatgagttcagaagtgaccatgggaagacaagaggctttccaaataactacctcaccatggcacagggtctctgagggctgggcatgttagagtctgagatataaaacacagtataaagaacgttctattttgcaaaacaatcacattctacaatctatacctaagtaacaggaagagagcagatctcattatgtcccttctacaagaagaacatctgcattgagttgggtgtcttcataggggagtcattctcagggaaacgtgaagcttcctccccatcaccctgacctcccttcccctgtaaatttccacattgattcattgtaaacaaattgtgttcatctgcccagattccattatatcaaaaagacatactcctctccacaaatatcggagatagacagacagataaagaggattactttccagtagcaggggttcctccccactcttcctccacagagaactttatttctagtacaaagtagaagaaagagtcaagagacggatgagaagacaaactcagcaaagccttatttttatgctgctgttgtttttaacctttagtgggaagtaataggagacctcatactttatgaagcctttttgtatctggtggtagtttttaaaaagaccatcagctaaaatataaatataaatttaaccatggatgattgtaatttcctgcattatatttttatgtattttcgaaaagtatctgtaatgagcgagtatcatctctgtaatcagaaaagaaactatgaaaatatccccagtgagatctgtgtttgctcacagggcactatttggcatgatgagagtgaggggaatgatctgaatgttttcagtgccaagcaccatgttggcctcaatcggtagcaattctaattctttttcctgtggatttgtatcagttgctggttcatttaaatcagctattaaaggaataaacatgaatcttaaaaatacatttagagaaagtatattgttctaaattaagcaagcagttggcatttcaaatcatatggaagcagatgaggggaacccgctctcaccanatctcaatccactttgcaaactgcttactccttaacttggctccctaattagggcattttatctttgtgagcatttaccattactgcatcatgataactcttggctagtattctgtgaagaaataattaataataatccacaccagccaaaagtagatagagcaacatgagcaaagaactaggttgggtgtggatgtggctcaataaccacttggggaaaaacaatgagagggtttttattgaccaaagtggtttaacaaatgacacttaagtgatctactggcattttagaacagaggcaagactgctcactcattaagtcattttaaaaatagtcattatagagcttttgccataaatcaagaacaaaagattccaggaaataattttttataattcataaacacatagtaatgtggaaagaaggactctagagttgaacagggttatcaattacattttccagttgtctatcctagagacaacattccttccgtgagttcaaaccttaaacatcaagatgaggtattgtgggtaaacttgaggattgacacacttcagcagactaccagctccatgagatcaagggccacatctgttttatttagcgagaagcagaattaggccatgtgtgacagtgggtgttactcagcaggtgctcagtgaataatgaatggattaatgacattgtatagtagtgtctgactttgcaaacagaaaatcacagcctttgtgaatgtaaatttacacagtaaacccaataccatatagacttttagtgatattttggtatttagaaaaaagactaagatcttctccaggtagaaaggtattttgtcaagtatttgctgtgtgtgtttgacttgttttggcctgcaatgtaaatgatcctgatagacatctagttctactgggttccacagcacttctttagccagtggggtcttgtattcaacttgtatttatcacgtccttctaatttcacttgtctcaccctggctgttattataatcccaaacagacagatacattagtaccccaggcttaagtctcatcctattcattgctatcgggttattctctaggaagcatctttcttttcatcttagtcccttcttccttccttccatcagtcctgaatgctttctgagtcaaattccgagagcagaccctggctcctgaatctttttatgctcagaccctgcaactgctcaacagtcgttgtctccctgatcctcttcacacagccatatgtcggccaagatgctcaactcactactgccacctttatacctaggctcatgccagtccctttgcagagaaagagaaacacagagggagagagaaacacagagtcttgagtccctggatcaagccatacctgaagtcagaaacttcccttgaactctttaattatgtgacccaataaatcatccatttactgtagccagtttgggttttctgacacttgcaactgaaagagtctttaatgtatgcagggaagaggagatgaggaagagaggaacataaaaatgaagtaaaacgaaacagaggaagaaaacaatgaaagatttgtccaaggctgtagaactaaacagtattggataagaatatagaacatgaagcccagagcccaagactctttcccctactacttcccttcagaaattagtactattactcattgccacacattgttactttaaacctaaccaaatgagaagtgacctgccatcaagctcccgcaggtttaagacatatatttgtcctgagtaacttatattgttttcctggcgtagtacatttaagaattacttttacaattaagctgcccaaggggtctatagatgcccgttttaatttaaataaatactaatgctaaaatcaatttgtaggatatttcaattggaccgataagtacagtcttcactaaatccaaagtatttccctattagcgcatctttagaagcgtataccaacaacacatcaggattttcagaaacctgctacaaatacattactcccagagactggatcaaacagctgatgatcaaaacataaggcaaaaactagtatttcatctttgaattcggagtacctgatttctactaaatattgattagagtttttcccataagagatcctgctttgtgcctccttaattttcttggtttcaatagtgctttgtgcagagaacagcagaagtaaggcagaggatacagctgtcatctgtgccacagacattgacatgcagcttagtcacagaacagagagaacacgtgaaagtcaccatcacaccctcgcaacagtgtcagtgtaaagactcaggttccagatatgaagacaggactgaaaatgcttctggctacaatgaaatgaatctaccacacacttgccaactttattcaaactgatgatatttttctttaaacaatggatttagttattctacccgtaagaagtccaggtcgttaatgaaatgataattttctacaaactaaaaacaaacatatctcatcctactaatggttcctgcctctccaatatttcacttaggccatctcccttttctcttctggtagaacaacttcaataggtaagaaagttttcttacatccgggaaatttctttaaccaccaaaatccatggtgtttgcttttcatcttcaactcactccttggtcgttacgacatgttgcctcctatttctggttatctatgttagtttcctgctcttcctacagaattgcaaccccggaaagagaggtactgagtctcacacaccttcttcacctggagcttgtaacaacatcctacaaagcaagtaatcaacatgtgttttacagagaaaactggttatccctggactgtattaaaacagtggtatgggtactctaaaataacaccaatgtgagtgtagaatgcatttctcatttaagagaggtgttcattcagcctgaggatgggagaatttacgaaacctcaaaccccaattggcaaacagcctctctaccttcccagtttacaaaaccctacctgagagaaggtgtcttctctcaaatgaagacttccagatcctgttctccacagacaattaaatgtggtttaaaagttgctgctgggagctgaggttattacccactttctgatgaggccggcgccaccaaaaccagcctgtgggagctgatttcactaggactcccccaacattttcttgatgttggaggtgtaacggggtctcagttcctgttcaactctgcctctgactggattctaggtcttgagcaagtcactgcttccctctgaacctcagttaacctcatctttaacatggggataaaattcctggcaccatagctacctcactcaatgctggggaaaattaataatattgatagtgttaataattaaataatagctaacatgcactgagttataccatattctaggcactgtgataagtcccatacctcccttaactcttactattctcataactactctatgacaccaagcaccatcattatgtctcttttacagatgaggaaagtgaagctcagagatgttaaataacttgtccaggatcacagagctaggaagaagcagagcaatatttgaacactggcattgtgggttacaaagcattactcccagaatactgccttacaaaaataagataagccatgtgacacaaaaatcttcacaaactgcaaaatattaagccactgtaaagtactgttaccatcaatgcaaatagatgctcattacatttattgtaaaaagcaggtaaccaccaacccgtttagggaaggtgcataaacctctgtcagcaatactcaatccatctgcagagaaacaattagaactgcattagcacataatcacagaagaagttctcttgacaccatttctgccaaagaactcattcttccctggaatttgaaaaggcaaaaagaaaaaaatcccatgccgcatctgacaataggaacaaactcttcttgcagctctggtaatgcaacacttctgaaagaacaagttaaggaacgtacttccactgccctcattagctgacaacctctgtggggactgcaaaccagccacacattcaaaacaaatcccagggaagaaatcacaccacaaagcctgtttctatttgcaagtaaaatgacggccccaagtgtctttccataaagctgtgtggtaccaaatccaaagcccaaactggttacaaagggtcgccattgataagacatggcatttcaggtccacccaccatgggccaaggaggtataaagctcagaacgtgacatgcaatttttaagccctcctttcaccttgtctatgcactaagttactttgacgccacacctgtttctattctgcctggaagccctgtctgcacaacagatggcagagtgtttgcctaacaaatgttcttgtgggtcagtataagaaggtggtggtggggattgttgtgggtacgaaaggagagaggctctgctagagcagcaaagaaccatcgatctccaacttagctagggaaacttcccacccaatgagggtctgggtatgtctgagctctgaatgttctcacctctgttcatcccttctgacaatcttgtccaggatagtacaaatctgctgctgcaaccggaaattacaaagaaaatctgatgtaggcatttagaaaaaaaaaacaacagaacaaaaccttatcaaatttaaaagttaacttcaaattcaattctaactctatctccaacttagctctcttgaatctaactgaagattcaactttcttaactctaaacttaacccttgaatcccatctcctagctttcacctctcaagtgtcttaactctaacttaaagtcaaacttagtctcttgaggaggtaattaaacttcaacaactaattggaatgagttcttgtgaactgagagcttggcttatcaacacatctggtcttcagaggttaagaaaaaactcactttctgttattgtaaacttaacaccagagtaatgttttatttcagctatgatggtaatattttttaaattatgctattatccacttaaaaaatccatggatgtaaggtataaagtaacataatgctccttgatggtgaaagcacatcttaggcaccatgctttggagaaaaactgtggatctggagggaatctcctcctcccaccctaaaccacacatacctaaaccacacacagcaccgggtatacctcagtcttcaacataaagaaccaactcggcacgttccatttcattcgactcacttgcttagatagcttaggaaaccaatctgctcaacattagtaagtctggggcccattaaaaggggactgacactaaactgaaatccatttcatctcttctccagggttttcctcggactctctgatcagcctttccttcacacaggggtgaggccaaaactactatagatgaagaagaagagagtgagatgatgttctttttgagggccaggatgacactggctttgtccagtgttttcatcacagaaattgaagtgggcatgtagtaggttctcaaaaaaacaaaacaaaactggtgaataaagacgatgtgtgctaagcactaagcagagacctccccattcgtgctcttatttaatactcacaaaatcctaacagcagggggtattattattccaattttgcaaccaaggaaacacatgcaaatagctaacagtggacagcatcagatttaaatacttaaagcatgcatttcccatgagtgagagagacattttgcaaacatgggtagaatgtggctttgtgacttgcctcaagattcaccccatcaatttaggcaaaaaatacaatcttccctgactatttagttggaagataacaagtcagggaaattcagtctagcagtccatgggtaagcctcaggggaataggaggcccctgaaattaaatgcgacattttgtgtgtatgtgaatttttccatggaaaaagtctgcagctttcgaatacttgaaagattctatggtcctcccagcccacaaaatttaatgacttagctgcttttaattaaagttatgcttctaattctcatccccaaagagtccaaagggctccagacaccctttgtatgcctactgaaagaaaaatgattagcatgaaagcctggtgggtattagacatgagaatagtcaaacaccttaggtatggaaagcacccacatagatcattacttaacgaagaaaagtaattgagaatgtattccattgctagcatttgtccacaatgagattgagaagccattctattgctgaccagatggtcctgaggatagtgaaatgacagaacccctgtatcactcatcagattcactgctcttcaaaatatgaaaaagaaccaacaaaatcctcattatgacagtgcctacaaacaagatccttctgaccatttcacattctgcaaacttcatctgcaataagaatgtccagacctgaggctctatacttggtgaaaccatgctcatgttcaaaaagcatttattgagagcctactatattctaagtaccgcaataaatacttgttcctataccatctggatgccctcatgtgattctaggcaacacgtttaaaagagaacagtcaccaaatagagaaccctgagatgggaggaaccagtttgggaaagggataaaaatcatgccatgtacacagccaaaggcattgatgattctttaaagggaaagtaatacattttctttcaacttctacaaagtttctaggtagaagaagaaatagagaatcaatccaaattgccagagaagtctgaaagaggaccacaaggtaaatatttcagagaagcaaagtgttggttcacaataataaaaagaaagaaaggaaatgaaaaagcaaactattatagctggggttattcaacaatggaataagacagctggtaaaatgttagtcgttgctggaggaatttgaaatgcatttatatgttaaaagcactaaagctaaaactataaaaccaaaagatgggttagtacaagatgattgtcctaaaatacaaagaaacacacattgtcagtatgtgaaccttaaaaactaatgttggttattctgtttaaagagaagaatgtgatgttcacaaatcaacttatcacaaattacatgcttactctagtaatgtaatgaccttgggagctgactcatagtcttccttgacctaatgagcatgctgagtataatcaattaggtttgcaattaaaattgcaatttatctaacacccccctctacccccacctttttataaggctcaggagacagtggggtgataaatataagcccttctgctgtggctatcttttattttttaagcatttctattacgtataatttattaaaccttaaatttcttccctatttgtaagtttcagcaaaatttagtcaggtttcaacacagggtatcaagggataattaggacagttagcagtaatttatcatttctcagctgggttttcatgctttcgctgactgcccgtagaaatctgttagccacttctacacagatcactatgaaatctgctttatctttgtgcaaattgcttttctattttcctaaagtgagctgaaagatgagccaatcgactcctgaaaatctagccaccggtgtgcttgtcatcagagtgcagctgaggccagggccgcagatgaagggctacagtggctaatggatgatgcaatgccatgagaggcttttttccagcctgctgcgggttagaaatttaaaccaggcagcccgacttcaggttagatcttcacaaaatatgcccaggaatctatgaacatgccaatacacattttatggagcaaatattgcctagtaagccaccagagaggaaaagcctagaaaaggcagagacactagtactataccacttccactgaaaagagggattttatgaagcctgaaccaaaaagggaggacctcgtgttctttagagagattcatttactagatggtgaaaaatgaatgcttcgggtaatttcattttgaattgatttatttctaaatggggggaaactgacacttggtgaagaaagtaacaagtggttctctggaaagagccagccagtctcaggtataatccaattattccaacacaggaaataaggacacagagggaagggtggaaggtcacctgagaaagtcattccttgcaatgaataccttcctgtccccttccctacagcctctcagagaagtataaactgacccatatttccagtttatttctgacacctaaacctaatcaaagtccactatttagaaatccaatagttattcgcaattagactgcacggcaaattaaatcataaatttctctatctcagccctggttgtcacattcctaaaacacaacttgcctccctccggcactttatttaaatctctgaggccgggctccaaagcaagttatggatttgataatttgctaatgtggccacagtaattgttttgagccatatttatgattttattggatcttacaacaatcaataataatccattgatgtccctgactcgggttttctcgcagtcgacaaatggggcagcagattcatttttaatgtactcacttagcactccctccctgggagagagagccctgcatattttaaaaaagggcaagaaatgaatggcactggtacacatactttactgtgaaaaactagctgcaggataagatttaatgctaaaaagaaaggagagaatagactaacagggcccattttgtgcagcaccaccatcgttaaagttaatggaattaccgtgtggtcacgcactagagggaacctattggaagttaagctcttctagggccattgattcacagactttcattcaaagattcccactagcatgtgataagtattgcagatatgcagaggcactttagaaactgtttactcaaactgccagttaagcatattaagaaacaacaataactgaatattttagagtggatgatctagtggaacgtgtcttctgttagacatagtaaaaacttcaactccgactggcttaaacaatagaggactttattggtcacctaatttttttcaggctggagtgcagtggtgcaatttcagctcgctgcaccctctgccgcctcccaggttcaagtgattcttgtgcctcagcctcccaagtagctgggattacaggggtgtgccaccacacctggctaatttttgtagttttagtagagacagggtttcaccatgttggacaggctggtcttcaactcctgacctcaggtaatccgcccacctcagcttcccaaagtgctgggattacaggtgtgagccactgttcctggccagatcacctaatttaaatgtctggaagtaatgcaggcttcaagtctggttaattcaacaatccaataatgtcacctagtgtccagcttctttctgtctctgccatgtcagcctcagcatctgttttgctctgaggcatgttgccctagaaaatataagatggctgctagaagctgtcagttacctgctttcttgttcataagcagtagtggagaaaacagcccatccacaactaatgcatctaagtcctccatgatgatgggactccgatcctttagagtgtaggattcctaaagtcaagggaatcctacactctaaatagcttaggaaaggattaatgaaagtcattactgtggcagagacaactgacttagactgggatgggcaaattatggccctcaggccaaatttggcccaccatctgcttttacaaataaagttttattggaatacggccatgcttatttgtgacaattcattttcatatattctatggcttcttttgtgctgtaaagtcagatacataattatgacaaagaccatctggccctcacagcctaaaatgtttactatctggccttttacaaaagaagtctgccaacccctggtgtgtaccaaacaaggtctgcacctggagctaaagatgagttcaaacccatcctaattttgtggctactaaatcaagagggagggtaggaagaatgctagagggacaaccacagtgcctaagatagacatgagagaaaatccttcaagtctagaaaaatgggcttagaaactaaaaaaaaaacaatttaggaaacctatcataagcacatgtgaaataccctctgccctgaaatacactctgagtatcatcaaaacatcaaatatatttaaaattgaattacaattccttaccacagcataagtcccagtgtaacggctccccgcccactcttcccacttctctcctgctgccactctccctacactaaatttctgccacctggtcttcaattatttcctagaatgtgccaagctcattcccactgccatttcctcttcccagaatggtctttcttctccagctcttcgctggctaggcgcctgtcgttccctgttctgggtttatgggttatctcttcagtgaccaccccatctaaagtagccataccaccccattccccttccaccatgtcattccatttcataacaccttgttttagtctttctagtattaacccaaatctgcaatattttatttgttccctttcacataaggggaagaagacaatacactgagagtttttcctaggctgtcttgccttccactttaacccagtgcctgggagcacatggcacatagtaggcactcaataaacacttattggagtaatatgttaatattaactatagaatttctacaactttttcagccttcctgcattatggtgttcatttcaaagtctgtacttgaaaacaaggactacgtctcattcttcttaggttctcagagcctgtgacgatatctggcacatagtaggtgatagaagaataaattaatgaatgaatgccagatagaaaaacatgagtaggcaggatactcatttcctggaagggaggaacagactactttggtagtgaggaaatcgagatcagagcgattcagaactggaagcagctacctcacagtgctttgagtttccaggtatagaggaagatgaaagacagacttaaatgctacaggggtgattaactgtcaagtagtggatgatgctaatgacttttaaggtcacttgctcctctgggattttcttgaattatcccgtgctctgagtttcttccttaaagagtgagattcatcgatggtcatctgatagtggagcagagcttggagtcacatttattccttccttggccaaacagtttcatcaaaattatactgctagaacctgattacgtctgggaatttataccatttacaaccaacagacgaatttaaacgcaaataaaagcccctggtgagctgtttgtcagggcaccaggatggaaagcatgataagaaaatattttgtgggggaacacgaactgatatatggaccccagagtgggagacttgaatgtgaacgttaggataaatgaattccaccacaaagtaaaagaatatttggtgtgttcactttgttaactcaatgttgtttattcttctcaaccaccctaggcagggtcaacatcttaaagaattccatcttcatttttcatgtaacgtcaggaaccaggaagacttgtttaaaagaataaactaccagggaaagaaatggaagttttcattactggaatccaataatattatctttatgttgaataagcctaggatttcaaaccactgtttgtgtgtgtttttttgtttgttgttgtttgtttgtttgtttgttgcccttccctcctgaggttttggattaatctgatggagaaggcttccgaagatatatgtctcaacttccctgattttggtgaacaagaggcttctttggagaacggatctattagacaataaggtaggatggatgcctcatgacatgggaagttaaaatttcaaaatgaccctttcccagcactaacataattgacttagaaggagggaaaggattcctcaccatgtttggcctgagggccattatagagtctcaccatcccaacatttttcactcaaatgtcctcaggaaggtcattattctaattcttccacatctgtggctctgcaggttgccttgtctattattcattaagctggtttccatctgaccctggctcagccatgaaatctttaccttttccagctgctttttgtgtcttgagacttactttattaatgactttggcataaagggtaaagagaagcgcctgaggggactgaataatttgagatgagtatcaagaaagaatcaagtccaggtcatctagaccaagaatcaaaatatatttataaaaataaacaaatgaaattgcagttgatattctgggtaaccatcagaatcaactgtggacctttcaagaagctacttcatgggccccaccctcagagattggaaaataggaggcatgagaactagctatatgctaaagataataaagcaaagagaatgaattataatagtcatttcttaatggaaagtgcttcaaatggggcccttggtttttcttttaaaatgcactttaaataatagaatcaacaaccatgtacacattacccaatttaaaaataaaacactgtaaagccgaaaccctcgggtacaattcacatcccacattgcactgcttcccctcactatctccacccagaggcagtaagaatgttatctgtgtccttccttctaagccatatatagatctacatgtttataaattatatggcagcctataagcaacctgttcttttattttattatttcctgctgttaataactactagtcaaaagtttgtagcatttggatctgtttcagctaaaaggcccaatttcaatcaaggcacacattattgtatgggctttcattccccattctgtatttaaggatgtggtgtagtctaaaacaaatggttccagagcactttaagaggccaaggcaggaggatcacttgatgtcaggagtttgagaccagcctggccaacatgatgaaacctcatctctattaaaaatacaaaaaatagctaggcatggtggctcgggcctgtagtcctagttactcaggagggtgaggtgggaggattatttgaacccgggaggcagaggttttaataagccgagatcacaccactgcacttcagcctgggcaacaaagcgagactctgtctcaaaaaaataaaaataaaacaaatggctcatctactgaggttgaattggccactaatatttaatcaaaagtactgaatctttctcacatgattaattgggctgcatttattttacttttttttttttttttaacagaattgacagtttggccagccaagtatttggatatcacaggtttaaaattttgaaattagaatgagctgattacatggagttagagatttttatatttgatttcctaggcttgaaacacccatagcaaaatggtgaggcagagtagtgctccttcaatgattagttattgagcactagtatcctatagcaaaatgacaacagtgagtaaccggccttactacatcaacaaaggtaagactctgactgaataataacgccttacatttaggtggtattttagggtctacaaaacacttgcctttcacaggaggtttgacttcacagtgattaagtagaaattacaggctctgagcctcaggtgtaaaagacagtttactgaatcctataaaacactgaatgtccctactatatgtgccacgtgtcggcattacaaatagcaaaataaattaaacagccaaatatccactttgctatatgtcagggcctctaattactgaggggatttgtttggtagtactaatgaaaaattaaacactaaaagcatataattctgccataaattgacatacagcaataaagcagcatttaggttaagcttcacctgtgtaataaacagggattgtcctctggatatttttagatggaaaccaacattattccaagcagagcaaaataatacagattaatatgtggtaagggtgacaaaatatttacaaaacctgtgcttgagtttcttctactgtgattacaggatacaacatatttctttaggaacagcctggtcatatgatataatgaagagttgaaattttggataggcttgggtttgaatcccaattccactatctgtcaactgtgcttttccagtatgtgattttttttctttaaacctcagtttccctaagtgtaaaatattaatgcctacttttgcaggttgttgtgaggactgaagtaagaattataaaactaatggtgaacatgtattgagactttactatgtgccaggcactattttacagggatttacatgcattaatccatttggtcctcacaacactcccaagagacaggatactcttaagacctccattttctaagtttatgaatgaatgtgggggagctcagaaaggttaactcgcccagggttcatgcacctggtaggcgacagctctgggtttgaaaccaagtagtctggccccagagtcctccctcttcatcagtatgctttaacttcccctgcattttcttctcaccctcatccctgcttcaggatctctctcatctctttcaccttagctgcctttgagtttgaatgaacagggaaaaagtaaataagaacgtgaaaatactagggagcttggttaatttttctttcagtgctttgatccaaatggtatcatgcaaatcaaagttaacaaactagaaacggaaaaactcaatgatttgatatctacttaggaaagggcctgagggtttagtaggagagaggaagtttcccaaaggagacaggcaggcccccagccccttctgcctggagagctggggactgggggttttgcctcaaatcaccaggagcgggagagggaggggaagtcagagatatttacatgccagaggaaaagggcttggaacctcaacacttctctaaggcgtccactcccacatgtacacccaaacccatccccctgagcactgcagttgtctttggtttaccaacccagtcaaactggattcattctgagggcagagatgcaaattttaaggcaattatacaagataaaagctacagcatcctgaagataccaattcttcatgcaggaaatacatgcattaggtattaacatagtcagggcactgttcaccatggctgtaatgaaaggataaaagtcctatggcaaatcacatctctcttggagtgtctttccaaatgaaaataataagtaacggtaaaagaaaatcattttcctcctcaagataaggctttctctctttctgtacacatcagatctttcctagaaattggtttgggttgagagcagcagccccctacaactgcttcttatcactcctttaggaaagcagcttcagaaaagtgaagtgtgcatcagaatcacttgtggtgtctgttaggacagagtcctaggccccacatcagaactaccgagtcagcaaagcatggggcaggcaggcttctgtcctatggctaccttcttcaggtaactgtgaagtactctatcgatttgtaaccgcgacttactcatgatcatctgtgcatacaccagaggataaaaatgttcggacagagagggccagtattattttccccaattaagaaggcagatttctgaattttcaaagtgtcatttttataagttcagataagatatttaaatagcacaagtcatataatcagagtaaagttttctcaagaatttaaccaaaaggcagtcattcgtagcgagagaattcagtgtataataattaagggaatttggcagcaccacaaaccatctcaatgctagttacaaccccttaaagcctagccacaatctattttatagatgagaaactgagattgagattaacgttaagaaacatgtacgaggtccaagggccatgatgtggcagggccgggatttgaactggggtggactggtcagattctatatccatgtccaaatcctagccaatctctgctacatataccatgtactgaacatcaatacgtcagtttttctccactatcattcaatataatagatagggtttccgcattcaaaaaaaaaaaacaaggaaattgatgttcagagaggctaaaaggctgatccaaaggtgcacagttaggaagttaatatggctaatattcctaacggaacctctgatgccaaagtatgttaactactagacttaattaagagataaaatgtcctcattttcatgaatctgaaagattaccaaattttcaggtggaaaatttgttctagaaccacagaaacttctcagtgaacagaagagcttcctttttatctcatttaatttttgaattatacttctataaataattatcttcttcttctagagcaatctaaaaagtaatttctaatatcttaaaagttattaacagctacttcccactgcgttaatactataaaattaaatttctaagtagaagattcaagtaccataaacatagaagagtgtaagcaagcataatctataaacagttcttacaagattccagattacctgcctggaataaatctgtccttaatatacctaaaaccgcctcccacccaaagatgaacataccaattgttctaaaagatagctcacatttaacttattaagcagcatcgcttctaaagaaatgaatattgccttaatggttagattagatggaattacattttggaacatgatttgagaacttgattcgtggaaattttagtcttcgttagtaacacctggaatatagaagacttttgatagagattccaggaatattgctgactgcatgctggaatacacatacatatcgtcttctacttcatgttaactaaagttagaaacttatgagattcgttccaacaagcaacaagcaaagttccattatcatcaccattctcttccccacacaaaagaggcatagaaaataaaccggagaaaaagctgtgtcatttccttacccattgcccggttcatggctcagacccctgtaacacaatacagattaacgagaggaaagcctaacgaatatatttaatataaattttatgtgccatgggagcctttagaaataaagacctaaagacaactgtgtatttttacggacagtcatgcagaagtatgattggatgataaaagagtatgacttgatggtaataaattggggaaaacttagcaaggcctgtgtgttcagattcttcttggcatgtgagtagagggcagaactcctctggaatgaaggtcttatgacctacttgcatgggtgttaggtcagagaattcttttatggcacacttgagggtagacaaatggaaaaaggtcagagagtgatgttcctgcttctgtagttttctcagtttccttcaccttaaaatactcagtatgcagagctagcatattttgggggtagcgtgtcctgagacctatcataaacaatgacaaaatccaggtcctcacaaagcttaccttctcaaagaactagagaaaagacagaggtacaggtgcatagccaaacaaacaaaagacaatgaagaatgcctcgagagaaatcaaatcatgcaccaggacagagagtaggggctttaggagagctacttcagatgaagggtcagggaggctgtttggatctgtatggttgaagatgaaagaaaaagattatttctcaagcctgcaggacatcaaactgctgcaataatcaccttgtggatggcagggttctactccttttaaacccaaaaaggagagttaataatcaattgtgaaataagaggtcacttttttactttgatatttccctttcctgactacaagtgccttactgagtaagcaaggccacgcttgttctttgcaaagcagaatttaaagcccctgaaacaaaaaaaccctacagtggtatcatgttcaagaggctaactcagtggtgcaccttcattaacgataacaacaggtgctccaggggaaaagaccattactgggcttattgctattaccactcagcatgagacaaaaatggtttagaacccagggatcaggcagaatctcaagaatgagacacagaggcaaagatgaagagaacagtcactgtgctttccatggcaggttgtcaaatgctgccttaaaatgtgcaactgtgtgaattccaaaatatgaaatgctcagagtcttgaattgtagtattcacaactggacagctgaatattaaagatgctgctttgtcccctagaggggctggctactgcaagactggcttccaggggtcataattatgtggccattgccactcaatattttatcatcatacaatactgaggctggcaaatatctatcacgggatgtgcttgttaataatgaagattcccaagccccagtcacagtattctaaataagtagatttggaataagaactgagaatcaactttttgttgttgttaactgataccaaagttaattttcatgcaggtgatacaaagatcgcattttgaaaagcagattcaacaactttagatatggatactttgtctaaaaggacagctttggaaccttcattgttctctgggattttatgtgtgtgtgtgtgtgtgtgtgtgtgtgtgtgtgtgtgtgtgtgtgtgtgtgtgtgtgtgtgtgtgtgtatggtggttttcttataaccaccatattctacaaacgagtcaagatatccccattatttcatatcaggaaacttctgtgatcaggttggaaacaactgaaagatgtgcaaaacagcataacctgctgatttaaaaaacagaatcgttttaaaaagttcaacttaagctaaataatcagggtgatgataacaataaccacattcaacaattcatatataagtactatatgttaagaattagtccatcatcatcaccatcaaaggtaacaaaaacattacacattttggccagataattgggacatcaaaaagtaattactattggagttacacaatctgtagccatagttatcagcccagctaggctcactgcttatttgttttgtgtgtgtgtgtttattatttttagtcaagagataattcaaatatgataaaattcaccattttaaaacgtacaattcagtggctttattatattcacaatgttgcacaaccatcaccactaagtccacaacgttttcattaccctaaaagaacctgtatccattaggaatcattccccattccttccttgtcccagtccctggcaaccactaatctactttctatctctattcagagcctgttgcatagcaaatattttctatcccgctttagaatggctaaatgaaattttgagatcatataacctatctattcatataagttttagctatgcttactatgcacctattatcattctgtgcatcccacttaatacagtttgtgcattcccccatgtcactagctatgcctctacagtatcgctttcaatggctgaaggaattccatcaaatagatattgcatagtgcatctaactaatccggtatagttggaatttacatttgaatactgagttttaaaaaatcttggaaccaagtttaaacatttgtgttttgcatttcaagaagtgatttcaaaaagaagccacaggtattaaatcctttctttgcatccgtatatttagagcctgacatggaggtgagacagtgggacagaggaaagctgaaagcctctgtgtctatcaccataccctgtgtgtagagcaattaggaggctagcccttttttatgataaggaatttggtagcccatatggtggcagtccctacataaactttcactgcttagaagtatttcccagagattgtattttaaaagtcccagaatagctgtgttaaagacaaaagtaaagtaagatcaaaagggaacttacgtttatttggcattgtttgtgtgggcagcaccttatccactcacagctagtcttcgaagcattaaactttatttcaacaaagtgtaacattaacatcccagcctgacttgcttctgacttctagcaccaaaaatagagccttttctatgacttaggtgcagaatctacccgtataggaattagcatttgtatgaaaagagctgaaacccagcttctgaatcagccaggattttattattttatttttactacagaagcagagactatcctaataaatcctcctttcttctcctagcacacttaaaaacccatctttgagctccactgactccattaggtttgaactttggtattaagtacacagggaggaaaagagtaggtgtgggggtgacgagaaggagaacagagagaagcacaggagaacagaaaggaagggaggcagcttgatgctactgctgcggttattgcttcactcaaaaacaatgaagcaaaagcagactatgtcaagaagcaaaggtgtgtcaaagacaccccaggcttaacatggggctgcacaaacccacaggaagctcacatgctatttcctagacactctctcacatgaaccactttgacttatgtttccggactccttgatttagtttctgttttagcgtttgcacaataataattttattttactactaaaagtaaatgtcttgtaaaccaatgggaaacatattgtttggcagagtttataatgtcaggatttacggctctaacactgagggtctctctgacctcgaagataacataatgaaacagcaatgtgctgcatatgactcgttgtgattttttattagttctcataatcgcctcttattaatttgtatgcacataataagcactcaccttcacagtctgtccggcttcggggccatcctagaagtaggaaaaaaccaacagaggtgagaatagatagatggtatctcctgcttattcagaaatatcacccattaataatttagatgcaatttcattgtgtgttaatttatagtattctcatggggaccattggcttcaaatgtgcgggattagacagttctccatttccgcctgagagtaagtgcgaagttatgtataaaaatgatataaattatccagcaagccaactccttgctacttttcatgctctttgctctaggctatggttttaattgcattaaaggaaggctgaaaatgtttggggaggtgaagtatcacaccttctggttatgtttagaggtggtttaattaatgtctgattactttaagcttctactcaggaaatctgctataaacataagccattaaggaagaatatggggtatttcatatgggaagagtcctctggctattctgaccttgtgggagacaaatggtagtgttcattgtagctggacccttttcccaaactggttccctttctctgtttctgaagcttagttggaaatgggcaaactcaccaagtcaccagccataatataaagcaaaagcagatactcagctggttgagatggccaaacaaagcaatggctccacaatcagaaattccaaaatagaatttcacctctgcaactttagccaggtttgtctacctctatgagcctgactaacggggtgagaactcccgccgtaaggattaagcataactgtgtatatcagggattttcaaacttagagtcacaatccattagtgggtcatgaagtcaacttaatgggttgcaatcagcattacaaacaatgtaaatcaggtgttttttttgttgtttttttttttttttttttgagaaagggtcttactcagttgtccaggccagagtatggtggcatgatggcggctcactgcacccttgacctcctggactcaagtgattctcctgcctcagcctcctgagtaactgggactacaggcatgcaccatcatgcctggctaatttttgtatttttcttagggacagggttttgccatgttgcccaagctgatctcaaactcctgagctcaagagagctgccggtcttagcctcccaaagtgctgggattacaggtgtgagccaccacacccagcaagaaatcagatcttaatagaataaaaactattagactgcacagaatgagtaaacattgttttgtgaaactctggtttcctttatcaatataggcctatgcatatatttcatatatgtgtgtcaggggagacaggcatgattttgaaataaatatgtatcttactgtaggttacagtaaaaaatagtttgaccacattgcatatacgaaagtactctaggtgctaacacaagtcagctcttacatttatggaattaactttctagtgaaaaatgttccataaccagcaatggccatttcctataaatgtgatttttattcttgtatctcactaaacattaacagaggttttcattcactgccttcatttagtctctccagaaacacggtttgcaacataagcttgataaacccactctgaactgaactacctgcctgaaggggactcaaatggtttgacatacaacacatacacacaaagcatttgggggaagtttagctactcttaacacagacatggcagcaaaaaaagaaagaaaaaaatctgtttgagaagaagatgagcacttttagtcagagccttcataacctgaaaacactggctttctttatctggtctctttgaagctctatggtaaagagctaaggaggggaggaagaatggcaaacattcagtttaactaacaggctgagtacagagtcctcacattttgaaagtgtgtccttctaaagggcaattacagagtcatccaatttcagagccatgaaggactttatacattgataccccagccctttccatagagggcctgaaggagctcatggtatgttactacggatttactcaattccctactgatgactcaccatggacatccttctcccaacctgacaactgttggctcaacctctgcctaaaaatcttcagtgactggggatctgatttcttcactggtcagtgggccacacccaaccagtgaatctagcttctaactaatctgtgatcaatctctgcatcttgaattaaagagagacaaaaggtaaggcccaacctaagctgcatatcactgccaccctggaattagagcagggcttagtctatgcagtgctcaaaaattagttaccatggaatgaaaatgatttttccagtcccagttccagtaagcaatttggaatgtctgaatgtccattaaatcacttatccattactcccacctgcttggtaaacaagcctcagacatcaccttagacactatcccacggtccatcttggggccaatggacagtagggttgccctgcattagaaatctctttttttggctgctacctaaaatacaaacaatcacatctgccctcctggtaagatatcaggaggagcaagcccaatgccgggatatgaaagggaagaaaaatcatttctgagaaatctgtacactcacctgcatggaaaaggtgagagaggtcccatggaaatgtttttccaccactgtcccgactctctgggtcgtctgaaacaaatcggccacttcatcaggacgcaggtcatggaagcgctccactggccgcagcgggcacacaaggacatctgtagcaaggtctgttaaggcccatgctgctggctttgggtagtgttcttaccaagcagttcatacccacaggattgaatcctctcggaccagggcctgaactctcaaagactaaggaatgaagaaacagatatttaccatccactgaactccagagagttgaaagagagctcccatacatggataattacactttgaaggagaagctgtggtatgcagaagaatttcttgcaaaagaaagggacattcgtgtacagacagactcaagtgtatggtgagataattatgcgaggaggcaagatctattctagatcattctctcttgacccctattctaaagctgtgtccgcttcagcagccaaaggcactaggttgaaaaagcaactggaatatctacttggtttctctaggtagaacatggggataaatttttaatttaaattatctctttagagaaataagaaaattatgcaatgaacatacaaaagtagatgtttattttatttttaaaagagtatagacattctgaaaatgtacagtgaactttatccataactaagagaggtgccatgtggttaagcaatttatgacaagagttcctcagactaattttttttttagaatccaaaagaagacatttgaaggtaaatcatgaacgaaaggttgtctgtttattcaaataaagcattcttaatgcattctacaagttagacaaggcaacgtatttacactattggtctcagcaacatataagatctgagaaaaaaggatagaaatttgattacttcttgataggaaattaatattcactgttacaccatcaataacatttcagtcactatacacacatgtatgcacacatgtgtatatacacacactatatatataaatatttgtttagtttttagatactaacaagagaaacaaactcttgtacgtttttctgtttcttttttcttgttgttttaagacagcatgctcctgcctggagctaagcagctgaggggcataataaaaccataattctgcaattgctagtctcactagaatatcaaccccattccgctattggtagaactcagagcccaaggggaaacacaactgagctcagctggtcaggcctgatttccataagagagaggggaagagaaagaagaaactgattaattttgctcataatcaggaaattcatgtcaatggtaaactaggaaaagaagcatttttaaaatcagagttcatttttcaagagaggagaagggaggcgttcacccacagggcatctgatacttaaaaagataattatccatctttggcaggcccgctttattatcatgggtcaatgaaccatttagaaatgaagaatttcctttcatttcctttgagcagattgccagcctccactcccacgaagctgctttttctgtgttaaaagggacccttccccatattcctcctccctgatttgaattacaccctcacttaggcctgacttcaccaaaccacagcaagggtgacaaccatgcaagcttccaacgaagtccataagtgctatgttaggctatgttcacacacagcaactcggtgggggaggaagacatttcacttcaacaatggcttactgtgaaaactggtggaataaatcagacaacctatgtatctaatgtaaatttagtaatatcaatgacatccaaaaatgttttttttcaacaccataaaaaaacttattgtttgtcaattttgcttgtttgcatgttgctcctagaaaaacaactcagggaaagcaaattaattagaagaacagcagatagcttttgtaattctaatgccactttttatatgccaattgttttaaaataatatcacagatgcaatataatttaatttggagcctcttaggccttgttaatgggtaaattccatattatacataggctatgaagacacatttacttctggatcctgtttgcttgggattatctcctctgtcaagatttcttagccaacatgtaggataacctttaaagaattaaagttactatattgaattgaataaatgttttatccagtacatatcatgtgtgaaaacttgtggaactggttaccacttctccctataatctagagtatagagtttttttagcaataatattttttaaaggaagcgaaggtcaatagttataatttaggttgtatagctgacaaggagatttctcacagtagatgaaaaccaaaggcgacttcttagagcagatgagatttaaactggactttaaaaattggggagtgatttaaccagtggattgggctggcaacctactcactcatccatcccaacactgcagtctcctctcagtccagggtctatgctggaacttaggatgctaagatgaccaggacagagtagctgaccttgaagagttcacattctaatgtccgcaactgtcatgcagtgtaaacagatcattacaacacagagagatgaatgctattggtagaaatcagtatagaaagctgtgggagcacaggggaggtcagatctaattctgcctcagggtgttagataaacttttccatctcattttacatttcaccttttaaagtagaacaatttctccacacctagaccaaaatctgtccttaaaaatggtccagaaacttaaggttagcttcaaagaaagttgttaagcgttcctcctttggcccaaatcaccatttcacttttgtacgtactcttacttactcaatctttccaacaaacccataaactattaatactattataattcccatgttgaagatgaattataagcaataatttcttatagaaaattagaaacttgccacaccagcacactcaaaatgagattaaaactagaattcaacccgtctgtccgattctaaagttcatgttattaatgacagtgctgtgatgtcatgcttgttagagctttcatgactccatttttgcctagcctcttattaaaactgtgccctgcattccctagtcactctgttcatagaagggaaccactgttttcattaaatagaaggctatgatgcaaacatgctgaacgcttaagaaacacctaaccttggaaaaagaaagcagacgagacctacaatcccacaatgaaaggaggcctcagcactgggcagtgagtatgccttcatcctaacagagaatcgtaagatcaaaaaggggggagagtaccagcttgcctgaactggaggaagtaaagagggatacaaagctggcattttgccccttctcatcctgactttgggttgcttcaaggtgacttgggctccatcatgggccagactcctgagaaagtttagatactgcagcctctatcactgggtcaggttgtcagacacactgaatccattgcttgttggacagtctaattactgagaattatggaccttctcacaacacatgattcatatcacaagagactaccagaaacttggcaatcctttctttttgttttcccttttcgtctcctcctcttcatgctcaccaccagcccagaactgactatctctctttttgaacatgaacactttaggtgtttttgctgcattaaagtggtgtgaccacatgccaagccctatgctgaactcttgctgacacactgccaactcagaatacacacaatgaaagaaagacatattcgcattagtcaggtgcctagagctggtgtggtttgctatttgcaaatgtgaccacaagaatccctcccatcctacacatgctgttttgctctctggctttcccccactttccatcaagagttgcagtctatttcccctccccttgagtgtctgtcttactttgtgtttgtgttgttataaaagaacacctgaagctgggtcgtttacaaagaaaagaggtttatctggctcacagttctgaaggctgtccaagaagcacgatgctggcttctgaatttggtggaggcctcaagatgcttccattcatggcagaagtggaagggaaaacagtttgcagagatcatatggtgagaaaggaggcaagagagacaggagggaggtgccagacccttttcaacaaccagctcttctgggaactaatagagcagtagagagctcactggttaccacaaagatgacatcaagtgattcatgaaggatctgcccccaaacacttcccattagaccctaccgccaacatcagggatcaaatttcaacatgaggtttggagggtcaaatatccaatctatagcagtgttgctgtgtgactttccaaggttaggccttaagtgaccttgaaacctctgattattgctctcttggaagcctgagaccaacatgctataaaaaatcccagctagcctgttaagtggcaacatgaagaaagaactaaggcacctcagctgatagtcagcaataactgtcagagatcatctcagaccttctagagtcaggagagccactgacttccagtttctatatcacttatctactgctgcataataaactaccccaaatcatagagccttaaaacaacattgatcggccgggcgcagtggctcacgcctgtaatcccagcactttgggaggccaaagcgcgcgaatcacctgaggtcagcagttcaagaccagcctggccaacgtggtgaaaccccatctctactaaaaatacaaaaaaaacagctgggcatggtggcgggcatctgtaatcccagctactcaggaggcagagacagaagaatcccttgaatccgggaggtggaggttgcagtgagccaaggtcacgccattgcactccagcctgggctacaagagcaaaactctgtctcaaaacaacaacaacaacaacaaaccaacattgataggttttactaccataagtctgtggatggtttttgctgagggtctcacctggactcactcatgcaactgctttcagatggaaggtaggctggagtctgggctcagctgcatccactaggcccttcactctacatgctcttccatcccaatagatgcagaatctctgaatttgcttaaggcttacattgtcccacattctatcggtcaaagaaaatcacaagccaacccagattcaaggtagagatattctgtcttctaaaaggaggagtggaaagatgacagtcaaaagggatatggacactaggaagttccagggatgtttaaaaattaacaggggcccaaggtatcttggctgtcctagtgagtaaatacaggatggcattttagagttgagatgctcctttttttttttttttttcctgagatggagtttcgctctcgttgcccaggctggagagcaatggcacaatctcagctcagtgcaacctctgcttcctgggttcaagtgattctcctgcctcagcctcccaagtagctgggaatacaggcatgcaccaccatgcccagctaattttgtatttttagtagagatggggtttctccacgttggtcaggctggtcgtaaactcccgaccttaggtgatccacctgccttcacctcccaaagtgctggggttacaggcatgagccgccgtgcccagccgagatggatcttaaacatcaactactccaataccttcactgtcagattttaaaaatagggagagaaaggttacttaacttgttcaaagtcacacagttaggagcacagttgggattggagctcaactggtgagcttccccaaccaaagctctttctgttacactgagatggcaaaacattgcacatctgccactattttccaatggtaaacttatggcagaataatcgaccacagaattctctcctttaaccaaagtgtccccaaatacttgccaatataacctctgagcagtcaacaccagtgagaatgggcacgcgacatgagatgcatgtgccatttctgtggcctcccacactgcctcatgaaacacagaaccaactgcaaaggactggtggagtcagaacaaagggggatgctgcaaaagggagaatcttcccaactacataaaatttccattatgttgccacatttttattcaaaataaatttgataagttcaaaatttgctcatcaaggataataattgattaaaaatatttttaggaggatttccatgacaaatacgaaatatttaaacatggagcactgacagataaatggaaatgtactgattcagatgattaattaaagatgacagcagaatattatgatcggagttgctcagactcgcccccatttagttttctatatctgatctattctagggattcagaatatagaagtcaccaaaataaagcaaatcatcaaaatatcactgattttgattaggctgattagcctgtgtatatattaatatgaagtaaggcagtatcagataatacaacacagaattaatcattcttctgaactaataaaaaagagtctgtattcatctcgactgcagatctgtgtgtagtttagtgataagcaaggaacattccagcttgcaatgcagacctcagcagaccctgtataattcattatttgctctaacaaacactcctaggccttgtaaatgtttaaaataattcttaatgtcacttcacaaaacaatagcaggatggactgtcagctacttttcaagaaaatattcaatttatttgatttaaatagcacaattacagagctttgagtcaaagtaggcggcatctcaaaaagtaatctattcacaacgtaagcactttgatggattttcatatcagaaaggcagaaatatcacccttaaatattaataaatacaattctgaagaagcatcttgctttgtttgggccacaccttttttcaatggggattaacatactcatttcagtaactcaataaagggttcatgggatattcatcaaccataaccataaatgacatagatgtaattttaagcaaatgtgatttccagaatatgataaattccagagcagtgtgattaagataatgataacactctgctcagagctggttctcaaggcaagcatctcacaaatatccactatctcatgttttgccctgggatatgctttgggtcagagatatgatgagaccttgttcatctggaggaagagaacccaggtatccttgtctaggcaacatgccctgagctgccctcaaaactccggtaccgatctggatgctcaaaagtaagaatcactttcatcgagagaagcaaacagttgcctttcaaagaaagtaaattgacaggggagtccgcagcccgatagcattctggtacagattctttggttgaatttcacatatttttctgtgaacttttcaatgcaaagtaatcttatactgattgagggaagagcatcatatctggaaaaaaatatgctcatataaactaagtatgtgggaaagaagtaaatgatatcattaaaggaaagaaacaatatataacatttgtttgctgcctagtatggtctagtgataatcaataaccctttgagttaggataatatcacctcccaatgtccagattcagaagttgaggccaaaaaagtttaactgcataaccaaggtcacgtagctattaagtgaaaatcccagccaggggcatgtgctacaacactgttacaatgtccatgctgtttcaatgcctctcaaggttataaaaacctccatgtataatacctactgcagtgtttactagagtgggatagcagagccctgcttccacgggatgctgttatacattatacagaaaaaaaactgtgcggtcaaagaagattgagaaacactgcatgaaatgaagtaaaatagctctctttaccgcagtattcatcagcatatttactgtactactatgcattctggcttctcaaaaataagaaatagtatgcagcactgctcaaatttgcttatctacaaaataataatgattattaattattagtaatattgtagaacactacacaggacacatgtttcagaggatgttctttggaaaccttgagcatcatttcccaaaacacagagaggcctgagtaatttttctgttttttcaaacaaaaagttgagtacatgtcctattaatcacatgggcaaagaaagagagcattctgtgaaatgaaatatgctgagaagttgagcattaaaatacatcaaatgggatatggcagtcattagtgctgtttgccaaacagttcaggttactgccatgtctgggcatatggtaggccttctggacccttgcagttgggtgaagctcaaggaatacaggtcaaagagttgtgagcgaaaatgatatacgtcacttctgggctaaagcccttaacttctagtatgtgaccgacagctttatttccttcaccaagacaggcagcaatgctttgcaatggtagctgctctggcagtgagaccccgaattataggtcagcaggggcctctgagcatcgtggtcacagtgactagggcaagtttgttcttaaataggttttacctcttttgctaaccccaaccaacttgtagtagctatttacagcagcatgttgaagaggattctgaagctctgataaggagcaggaggaaagaactgaggaatttattagttttggctgccaccagggaggaaaaaaatattagcgtgtataccaagtacctgccattcttcaattagacggcaataaaaatgttttttcaagaattctctctcccccattcttaatgatatagaagtcatttctgggacttgcaatgtctctcagtaaccgttatgaaaatctattattattgttattgtcctagagatatacagaagtgtctagaatttagataattctggttaggagagtactgaaaaggaaaattaactgtcactcgaaagagtctgtccacaatgtgtaaacatgagaatgggaacacaccaatatgaaaatgagcatgttgtaaaaatgctcttaggagttaagacttgaaggagtatggcaatagaagaaataaattgcactcagcagctgaagaaatatttaaagataactccaatgagagattattttaaacttcagatacactttgctatgagaatcatttcaaaaactctgtaaaaagctttttagtgaagtagagatgagaaagtaatactaaaaatctgcaattcattgcagatctagaaaaccacatgcaacataaataatttaatagcaccctcaccatatacacagtttcatttcaccagtatgtgaatgaggggagtgccctgagcacatacctccatagggtggctagagtgaaacctggggcccaaactcccacatagacaggattcttccagtgcaagctctatcaggttttgaaattatggattccaaatttaggtttgcttatgtcatttaagagactaaaaattccagtttccctcagatcttccatatagctggccaagccaatggagcaaccagacaacacagttcagatgccatctgaaggcaaaaagtagccaaactataaatatgaaaggaaagaaataggaaatgagagaaagggagagaggagattaaaggtaggggtggtatttagcagatgaagcctccttagaagagaggaaatactcctttatagataggctcaactaggattcctggtgctacacacagagcttaacatagcattggcctttaataaatacttggtgaaaaaataaatgtcatgtaggcttattcattgtttaatctgggaaacaattctttctaatgaataatttcttcaaaatgctccccaaactgtgggttcttaaaagaccagtgaaccagtccagactcaacttacttaaatgtaaaccattaagaaaaatatacttcatggtaaaaaaaaaaagaattatgaattcctaatacaaatgtaacatacccagctaaagggatagaaaaataaatacaaactggtctttccttcacacatcaaaagtagtgcatgtgttttaaatggaaaacttcagaactattaactcagtgaagcttggaaaagttcaaagataacagtgttctatgctttttaataacaatgaggaaccctcttctatgacagatactaatgttaatagaaacatcctttatttcaaataaatgaaagagagtcacacttaacactaatttggcattctcacagaatatgaatcaacgtctttctctcttaaaatcagtcctccatgagctagcaacctaaaataaatgtgaagatttcgtagtgagaggtattcatcatgtgttcagtgaatgaacttctgaatgaattagtgaaagatcacaaagttgaatattagagaaaaggataaagccaaaagactttcaagaactctgtatttttttgtatattcattcagtaaatatttgtgaattaagagccgactacctggcaagtactatataagacactgaggatacagcacaaccaggtacagtcatcctctcccttcccaagatgtgaaatctagagggtgagcagacaaaggcaactgacatagtaactactgtgaaaatataaggggtgagatgagaaagaaaaggtgcaagaatgcaagggcaagaccgtaacaagccaaaccagctaaggtggctgtgaactaggcccagttcacttggtctaactggatcttcaggaaagagtgcaggcccttgatagccttggtcagcagtctgtatttattcgccatgcatggagaagccactgaagcatttcggagagtggagatgtatgacagattctgggttctctttgcaaagctgaaggccactgggaatatctttattgcagactaggtaaaagattcaaagcaggcctggcctgtggtggtggcagtagagatgcagagaatttgagatgtatgtttgaggtaggagcaacaagacttaactaatgggggcaaaaaggaagagaaggatcaaagaggattccaaggttctggcttgggtagtaggtgaagagtgatgtaattttgagatacggtgggtgggacagtgtcatgtagctcaccatttggagacttttctttcttgaatttatagaattctccagaaataactagagcagagtttcctaacctgggtctacagataggctccagggcttctatgaatctcctgaaattgtttgcaaaatggtgcatatgtgcacgcacacacattgttttcctctggtataaaattcttaaatagtctcctgaccccaactaagataagaaatctagatttaaatcagaagaattctttgaagattagtccccaagagaatgattagaaacaggctcagacttttgctcactttggcttagaatctaatatacccagtactaaagagtaagaaaagaagttcactctgtctgagcaatgtgccataattcacaagcatgaagcctccataaaagacaaacaaaagattttttaatgccataacaccgaagtcattttaatctgattcagcagtgaacaatttaagacatgtctcctccaacaaaggcagctggacacataaagatgattgtgtgatccattcaaaattaaagaataagctaaatcatttacaacaataaaaatgcagaaaattctaccagaaaaaaaaaaaaaaagagagagtgaaaactttcagcagcaagtgatttccaaatgtttccaaaacaggaagcaaaagacattttaatgtcactgtggcagcttccagaatagagtaagttaatcaggcagcctctaaaaacaaagcagcaattcattaaaaacaacaactgctactcagcaatgaactgtactgccagagtgtcaagaaagcaaactttttcaagatagtgatttgtatgcaaatatagctcagcatttatcactaaacctccaaggcctgtaaagggggggaaagaaaagttctttccatctgcttacacctgtctcctaataaaatcaactgccaatcacaggggaggctggggcattttaaaaacagtcaaagaaatacattcacaaatccagggtttcaaacaaaaaactcctgtctactctttcttcttcaaatctcctagcctactgtcctcttcctaaattggagttaatatctgtacctacttcattgggatgttaaaagtgttttttcaaaataatagcatatttcacaccaacaaataaaagctgaacgaatggttggtttagaaaaaaaaaaaatagtcaatggaaatgaaatccttcaaagcttccctcaatccagcaatggtaatgcggttatgtgattgaaacagtgtctcactagcaccagtgttatcgtttggaacccagatcttcattcatctcatgtttaaaatgtctgtacttttctacattccactcacccacccatctccattttctcatttgatctctgttttttatttccccctcataatgtaagcatcactggtagcagagtctaggaattaatcatcttataatcatttagtcttcctctccagttctaacttacgactttttcaaaatatggttgctaacaataaaaaaaatctcaaaatgtgaaaacaaacaatggaaaaatattgtaaatatttaaacgcatttagaatttgcaagtttttttcactctaatgtcatttttcaagctatgtttagacagcacagaacactatatggtttacctaatgtttaaattagtagatctggccaggtgtggtggctcacgcctgtaatcccagcactttgggaggccaaggtgggtgggtcacttgagatcaggagtttgagagcagtctagccaacatggtgcaatcctgtctctactaaaaatacaaaaatcagctaggcatggtggcacacacctgtaatcccagctactcggaaagctgaggcaggagaatttcttgaacccaggaagcagagcttgcagtgagccaagataacgccactgcactctagcctgggtgacagagtgagtaagactgtttcacacacagacacacacacacacacacacacacacacacacacacacacaaaattagtaaacccaataatccacaaagatctataaaaatatgaacttacaagatttctatatatttgaatttcattttgtatataactgaaaaaaaatatttaagcatgcctaaggaaaaagaaaactgtggaaacaaaacaaatgttctggcaattctgcaacagtttcacatttgtatattgttattcctcctgaagaatcctaaaattcactctcattttctttatatgcttagatattaaaaacatgtctttgacaaccaacagtcttctgtcatggggaatcagacatcggccccataatctctcattaccaacatcaccattgtcactgtctttaccatcatcacttaaaagaaaatagaaactgcttaaataaccacagctaaaataagtgtcacaagtttcttactgattaaatgctcctccgcgagactgcaacctcgaatactacgccatagagttcagattccaacacctttaatgtttctataaggaaaaaaaaccacaagcgttctccctgaaaacgtactcttaactcagaatctcttctggttccatttagtttataaaaaaaaaaaaaagaataattcagattgaaggatagtattttggattttcagtgttattgatattcctcgatccatcataatttagctaacatagatcactgcctatagagcagtgctgtctagtggaactttctatatcctatactgttcaatatagtagccactagccatatgtggctactgagcacttgaaatatggctgatgtaatcaaccatatttaattgcattttgttttaattttaattttacatttaaaaactaaatttaaactttacattttaaataccaccctgtagctagtaatcacttgtagctagtagctattacattgtacagttcatcaggagaggccacaaatttatggtaacaaggagtggtggaactggcacaactggaaaacacatgccccaaggtgggtggccaccacctagagatttttttgttcctgaagaaactagaaatttgaattgctatgtgtaattctcttctatttaacttttggcaactataggcagtccttctcatggttccaatatgcacatatttcagttactccagtttaaacaacaccaattccccaacaacacggtttaaatttcagttaccatgtcacattaactctgggtcattgggtaaagtacaagctccactactagctcttcaattcacaaattaccatgtagatcatagatgtgcatgatgatcagagaccagtcacatcacttcttccaaagtctgtcagtgactgatcactgcacatctggtattcagtcagaggcagccagcaaagtatgtagttttgtatcccactgatcttccagtgatgaacccacatatttcaccaaaatggataatcgaaagagggaactggccaagaaatatgaaacacaagtgaccaaaaacaaaaacaaaaaaccaaatgtgacaaccccagaagtgcactttgaatcaaatgtaaataaaattatagaacaaataactgactttgggaatgccaattgcgctgatgttcaggagattctagatatgtaacccaaggaatttagtaaagacaaacttattaacataaattaccaaagaatttatgatgcagaagaaaaagatgtaccagaggaagtgacatcaaaaaagtcacattttaaaaaacgtcctatttcatgacattgaaaacacaaaggatgaaatattggaaggagatccacactttaggagggattatgacaatcagccaaagcacagaaaagatgccccatctgtactgttagttgcaggataagaaaaacaaggcaagaattgttcaagagactctcaataagtgattttcaaagaaataaagcacttcaattcttagtgtttctaatgttttaaattacagtgtactaaattagtattagttcgttttttacttctttcattatatttttctatttctttatactctgataacttatagagggtttttaatgattagagaaaaacgttaaaggtcatagaacagtcatacgttttcccattgattactaagtggacattgcatggtttccgcttgcgtggtcatttttatagtcccacactgctgtataagatgaggggtacttgtacttccaatgtgttaaaaaatattgggtggggcaaataaaacatataggtaacaggccacaaatttaaaacctgtgccaagaactagtgtcatatgtgatgtgcatcttaatattaggagagagcagatgaaggaaaatcaaggactgtgactttaaaaagacatatatatgcagtctctctccagaaagagcagacccgtcgtcatatgctcctgaattctcccaccacactgcctggcaaaattaaagtcaaagttctcttttgtttcccaagtagcctgagaactgcatgttactgtctacctaaataacagaggctctctaaaagaaaatgatatttattgagaaatgggccttgtcttgggaatacatgtgccacagtaaattatgagtattcagccaggtgaaggaagacaaaggtttttaaagggcaagtgaggagaattacctaattgttttgaggtaattatccttggttactaggatcaataacattgtagcaccagaaagaggttggacaggcagttgttgggcagatgtcctcatagaagcattgtgtgtgtgtgtgtgtgtgtgtgtgtgtctgtgtgtgtgtgtgtgtgtgtgtgtgtgtacagatgtgatggccttggtgcagcgtggctttttgcagagtcttttatgatagtttttgttatcaggcatttgtacatgagaacgctcccgtcatggcctttcctagctctatttgtcagggttttgtttgtgactccatttgattctgacaacttttatattatcaaacctcctgaactctgaatgcatcattaaacctggctgttagcattaaggtttccccaccaaatgttctcttgtacatcacaatatgactgaagggagattacataatgagtaacatcaataccatgcatgttctatattccatatggataatgcgcaacaagcaaaattcctgccaaaatccttattttgacacaaaaaacagaatgcagctatagctgtatgttttccttcacaatgttccactataggccctttctgtagtgcattatctgccgctggtccagaagctctttaaaaacagaggccacttatttttcatccttggatccaaagaccagcatatggagcccaggttaggacagatgtcacctcttagtagacttatcaatcccatcccatgaaggtatccctccttccttttcttcccatttgtttgtatccctcatagcttatatcaatcttgaaattttagtactcatttatgattacttgttttctattgagaatgcaaactgaaatgagggcagaaatcaggaatgtctgcttctcagctgtattctacctggatacagtatactgcccatagagcacttgctaaacactgaattggtgggtcaatggatggatggatggctgggatgcatggacggatggtagatgactgggtgggtggtttgaaaaaatgtctaagggaatgactattagaacgaatgactgttgaatgaattactgtttcattaataaataaaaataaataaataaaagctaaaactattattttagtaagtagagagtagaaaaaataactgttattttcttaatgttttataaccataaacataacattctctgggttgtcttccttttcccaagttatgtcctcagataaatctaaaaatgagaattcttccaatgggtgatctcccctggtccagtccactatttgctcaactacaagatggagaagtttcactttgcagcagcatgtgtgaaaacagcttggaaatttttgtagagaataagctcaagatgagtcaacagagaaatgttgtttctacaaaacacgttttatctcagattgtgaatgcaagtctggtgttgagttgagggaggtgatttctcactctgatcttattgacagggatagtcatggagttttctgtcaacctgggagccaccaggaacagcctatagcacattcacaaaagagatcagtatggctgaagaaaatcaaagaaaagagaaatgaggaaacaagggtcaacctttgactatagcattgcaaaggcagtcattctaggaaggaggaaagatgcaggtgaaccaactagtaaatggtagaacagaatctgaatccagcatatgacctgtggagtgactcagatctggattccaattccatttttgccactttttagccatttgactctgggcaaataaactcttatcagtaacctcacctgcaaaatggggcttatttattctcatggaactgcatttcagagtaaccaaacagcaccaatgatggacaattcttcaaagaattctagcattaaaagcaaaaggacccccaccattttaaatccctaaaaatataactgactcatgcaaaattatcaacaggtaatttggggcttaggtcaggagttcttaacctgggggtcccacagaggcttagcagagggtgcatggataaaaggaaggaaacacatgaacatgaatgaaaaaaatgacacacagttatttttactaatttttaactaaaattttgtatcttattaaatcacagatgtaggcaatgaaccactgtagtaacagcagtacctatgagttgtgtcacagtataaatcacaggtatttaaaaaatatgtaaagtaataacttgatagttattgcagttaccttgaaatatcatttattctagaagtacttatcattacaattactatcacacaattatgatggtcattatagctgctaccacttctcattatttaatatgtaataaagaaatgcataattcactgtatcacaaatttgctgttaatactgtcttaactggtattaaataacatgaatttccttggtacttctctatacttaactgtccttaattaaaatcattattgggtgggagggttgcttgaggctaggagtttcaatccagcctgggcaaagtagtgagaccccatatctaaaaaaaattagctgggcatagtggcgtgcacgtgtggtctcagctactcaggagactgagatgggaggactgcttgagcctaggagttcaaagttgcagtaagctatgatcatactactgcactccagcctaggtgaaggagcaagaccgtaccttgaaaaaaaataataaaaataaaaaataaaaacattattgggggaaaaggtatacaagcgtcaccaacagccaaaaaggtgactgaaccaaaaaggttaagaactcctgctttggatgaaagtgtgacgggaaactttataatggagaaccaggctgtcactacctaaatctgctgatcaatttcaggattctaagagcaggacatccagacattatgcctccctatacactgtgatttgaagcacataatactactactacaaatgcttatatctgaaaataatccatagacccgcagctgtctaatagaactttttgcgattgtttacactatgcaacacagcagacactagctgcatttgaaatgtggctagagcaaagaagcaacctgaatttctaattttacttaagtgtataatcagccacctatagctagcatctaccctggagcccaccttagagctaacttactttacaccaaacacaagatagagaaacaagttaagtaacactaaagggaagcaaacagacaaatccgtactatagaacagtctacaggacaactgactcagttaaaaaaaaattcaatggcataacaatattggattaaaacagcactaaaacaaataataacctaatataaggtgtggatcttttttggatcctgatccaaccaagcaatgataaaaagacattttaaaacagtcaaagaacttgactactgcattaagaaattcctattaattttgtgaaatatgataatggggccaggtgcagtggctcatgcctgtaatgagcactttgagaggctgaggcggggggatcacctgaggccaggagttcaagacaagcctgaccaacatggagaaaccccgtctctactaaaaatacaaatcagccgggcgtggtggcgcatgcctgtaatctcagctactcaggaggttgaggcaggagaatcgcttgaacctgggaggcagaggctgcggtgagccaagatcgcgccattgcactccagcctaggcaacaagaacgaaactccatcccaaaaaaaaaagagagaaagaaagaaaagaaagaaagaaaaagaaatatgataataatattgccaattagggaattttcgtagtctttaaagatacatgctgatgtgtgtagagctaagaaaatacttctagcaattgccttaaaatatttcagcaaaaactcaagtggataaatgaagcaagtgtggcaaaatccgaatgacatttgaatctggttgaaggtaaacaggccatcctttgtattgtttttggtgctttttctgagtatgtctgaaacatttcaaaattaattttaaatgggataatgcattgggtacagtgaccaacacacagtaaacattcagtaaatgttaattagcaagtattagcatcatcaacattatcatttatgttctcaaaagtcaaaactaagatcaatcagtaaaaaatacaaagaggtagctttcagcttcatctaagaacaggctctgggaagatgaaaatacaccgtctcgtgagggagtagccaacagcatattcaagataacaataacagcagtgacttacatgattgagtacttataatggggcagatgtggttctaagcactttccatataacccctcactcaatcttcacaacaatttcataaggtaggtactctaactgtccctgctggagcagagattgatcacttggtgaggatgctgcagaagagggtcaaggtaaatggctttgctagttgccctttaacatccctgataaccctgaactcctctgattcaatgaacatgtcattcaaatgaattgtgcaggttggccagctggctggctcacacacacatacagggcaattcttgcttttacttactaaaaggtctttaaacaccacctttccctttcaagtaggagactaaaacgtcacaggaatttaattatctgtaggcaagaagatgatatgatcaagaaaatgctacatttaaactactccatttacccactttcaaatttcccatcaattagaggggaacatcttccctaggcagccatttgaccaagaaatgtccgtggtatatcttcgtcaacatgtttcagaatataaatccagattacacaaactaaagttggtataaaggctgtcatcatatattatatcatttggaaagaaatattggtgaccttatccagtatgactgttataatggtaataaaattgaatctttgaagattacacttctggtcaaagtagtaaaatgtgaccttattctattcaacattgacatttattatattaatttacatgtaaaaaactgcattagaatgatattaaagccctggttagaaatgttagaaatgggaatgttcaagaacttcagaaataagatttcactttaccagccattcacagcattgagtttgtttgatgcaaattaaactaaatttccttcaccaatctctgattcggttctaattttattattatcactatctcattcatacaggagatatttttcccaatgcctctttaaacattttataaaccttaactcattttcatcatgctctggataaaaagataacacagagcactgaatatataaacctgagtcagaggatcaagccatctgcttatgacggggagagtctcctcagcccagtaaaaatgagcttagcgatgagtatacatcagatagtgcactaggtcctagaaggataccaaggtccagaggtgagaaaagagagtcagaccgccacgtgggtttcacagaatggccaccatgcagcaaaaagatcgctcttgttgcccaggctggagtgcaatggcacagtctctgctcactgcaacccctgcctcctgggttcaagcaattttcctgcctcagcctcccgagtagctgggattacaggtgcctgccaccatgcccagctaattttttgtatttttagtagagaagaggtttcaccttgttggccaggctagtctcgaactccttgccttggcctcccaaagtgttgggattacaggcgtgagccaccacacccagccaaaaacatttttttatactggtcaaaattttatagggaggtccctcccttaaatataagttttgcaaactttcagtttgggggtagaacatggaatcatgcaatgaattaaggacaagattcagccacacctcaacagattattctattttcaccattagcccaaagtccaggcttgctaggatgggtcccaactgtccttccaattttgtttctcactattctcgccagcacttcaaggttccaaccaaaattaactttttgctatgtatttcctcatatgtcttagttaatattgtcttctactctgaatatcttttgactttctatcaataggttaagctaggtgttgctatgataacaagcagtcccagcatttcagaagcttgtaacaaaaaaggtttacttcttgcctgctatttgtccatggtgggccagcagatcagctctgcccatctctggcactctgatatccaggctaagagagcaaaaaccagctcaaacactgttaggaaccatcccaaggggaagagaaaactgcagggtcttacaccagaagttaggtgcttagtccaaagtgacacaattcactgccataactagtcatgtggttccaccaaaccacaagaagcataatgctaccatacacctggaagaaagaagaactaaaaatatttggtcaataccatcaatgactccctatctccatgtgtcccaaatctgataatttttccagatctaagttagattccacctcctcctaaaagaaaaccacagtccttcctgctaaaaggaaaccgttcatatggttaatatacagagcatgttattttacctcataagactctcgtgactctctgagaaccgtgtctctattggaattccgtgtttcccataatgccttgctagataaatattgcttgaatgattgaacaaggctgtctgtataatgagagtttcatctccaaagacttcgaataccctggaggctagtaatacgtggtaagcaataaaactttattttttcttatttatatcataaagatacttaaaacaatattaaaatgatcataaagatgaaataaaaatgagcccatagtcccgccaccctaaaccaacaaatgttttcatttcttttcctcctggtcctattcaaagggcatccatttcctttacatagctgtattcagggtgcatacaaagagagaattctaaatagaacagaggtaactgcccagtcaacaggttttgtttgtttgtttgtttgtttttgctcttccccaagatagagacacattgggccatatcctaatactgagacttattttctgcaataaaatctccgttaatttaaagcttctaagctgtttaatacagtcaccatcattaggaaatatcagtgtagtcttcaccactacttcctctccttggctcaacactggaagaaattgcctctagtgaaaggagattgacttccaacatgagaagaaggaagaaaaggagaagtgtgtgctaaatcttggacagttctggggaacatcgtagaccaacgtcaccttgtcacggtccgacgttaagacatcattaacaagagctaacaaccaacattgaagttttaacctcattcgtgaatttatctgattattattttgctccatttagctcatccaattcttttcattttatcatgcactctttttatttgtgtagtctgagttgaaccttttctaaaacaaggtagaaaatacatacataatgcttcaaaaaaatgttttccatactgccaaataggcactaggaagtctcaccagagttgataaacaatctagatggccatttaacccactcagcttacttaaaaccaagtctttctttttttttttttttgagacggagtcttgctctgtcgcccgagtgcagtggcgaaatcttggctcactgcaacctccgcctcccaggttcaagcaattctcatgcttcagcctcctgagtagctgggactacaggcacgcaccaccgcactggctaatttttgtatttttagtagagacagggtttcaccatgatggccagcctggtctcgaactcctaacctcaggtgatccgcccgacttggcctctcaaagtgctgggattacaggcatgagccactgcacccggcctaaaaccaagtaagtcttaaaatttgtactcagaactacttttttttttttgagatggagtcttgctctgtcacccaggctggagtgcagtgacatgatctcggctcactgcaacctctgcctcccgggttcaagcaattctcccgcctcagcctcccaagtagctgggactacaggtgcatactgccatgcccggctaattttttgtattttagtagagacagggtttcattgtattgcccaggctggtcttgaactcctgagctcaggcaatctgcccgcctcggcctcccaaagtgttgggattacaggtgtgaggcactgtaccttgcctcagagctacttctatactgagaataaataaacacccaaacacctttcaatgttattaaatttcagagtaatgactttttgtctattttctattttaatagctgatagattagtaggttttcaagctatattttaaaattttatgttcagtttcctaaccactgccacatgtacacataatttatactcttacatttttgaaagggtttattattttatgtgctatagttattgatctgaatcaaatctttcttacttgattcaacagactatagtgggaataaaatgtgactatttacgaatgttaaccactgctgtaattcatatgaaatctgccaagcctattatattaggaataatgttatatattttatctaagagtctgataacacctacctcaagtctaaatattctctgaaaaatttgtcagaataaaacaagtgcccttaaataatattttcaggtataactgcagacagttgcttgtacatttgtctttaactttaatactgtctcaatatgcatgaaacgcttgatagttcaatagttgttttcatgagttgtgccttcattaaggtacaaaacattaaacacctggaatgctgctcgaactattcctaagggagaaattttggtgacaaatgaaagggatacatttttaagctgaaaaagttgctcgctactgataaaagaatttatatcagaatattccaatagagcagaagaaagcaacatgaaaagaaaattaacattcattaagaaacagctaccatggtgcgaaacaaagatcacaaagccaaaactgaacaacaatcaaatttctacacaaaaaataagacacatacaatgcctacagttccgattgtctaatgctgtgtaacaaactaccctaaaactaagtgacttaaataacggtcattatgtactgcctcttatggtttctggagggggtggtcaggaattttggatcatctcagtcagaaggtctggctctgaactttcatgacactccagtcataccgtggctgagactagggccatctcagtggcttctatatgtatgcctgaaacctaagctaggatttgaatagttaggggcatccctctctggctccttaaggtgtttccatgtgctctctcccacacggtggcttcaaggtagccagacttatcatatattgccttgaggttcccaagacatatatctcaagctagaaagaaaaccaagaaaagccaaagttcctttaaggacctagtcttaaaactcatttggccttacttctcccatcatctgagcagctccacttttatctgtttcatacatggggctttggcataagagcatgttgaccaaaggctgtcaaagtaaccaaacataaaaagtttaaaagctagtggctgggatgaagtctaatgccccaaacttcaacaaagctaggtgatggaaaaatactgctgaggggaaggctgcttaggtgatgggcaagagagtccttggagaatgcagataatcaaaacagcacctaattaaggtacagataattgagagctggattatcactaagattgtatgtataaagatgcactaaatatcttattttcaatttctcttatttttctatactgttataatagaaataatgtaataacagcaaaagcaaaaaatagtcctataaagtgttcacatggtgaattcaatactttcacactgggaagatgatggtggaagatagtatctcaggcagtgcagtccaatggaagatcttagaaccaaatgtattgagttgaaaacattaatgctgtcatttctgagccatcttaactttggcaaagtaattaacctgtcagagtctaaatgtcctcatctgtgaaatggaagaaattatgagttcacaaatttacactgaagagtcactgatccaccattctttaattcagtcataaaatatttatggagagccaaatatatgccaggtatgatatggtatggaaatacaataatgagccaaatgcctacaataatcaatcaccaaacaaatgtttatcttaagatgacacccataaacatgtccaacaaagatagtgtcaaaaaattgatgtcacctaatgaataatttccttctttctttttatttatttatttattttttttgagacagagtcttgctctgtctccaggctggagtacaatgatgtgatgctcggctcactgcaacctccgcctcccaggctcaagcaattctcctgcttcagcctcccgagtagctgggattacaggcatgtaccaccatgcccagctaatttttctatttttagtagagacggggtttcaccatgttggtcaggatggtctcgatctcttgacctggtgatccacccacctcggcctcccaaagtgctgggattacaggcatgagccaccgcgcctggcctttccttctttcttgaccttcctttcttcataccataactcagtgataattagtagggggtgaaacagagccataatacattcatttgtgaatctcccctgtcctcctcacacttaccttttctctattcccttctcccaagcctggttctggctctctcatgcttcagaatctgtgaaattggttcggagggcttcaagagaactgcggaggctaagcctgtatcataaagatttaggactaggggagaggaagcgaacacaaagaaaagttggaccatgtaagaactagaaggagagactggggagctggtcctggagtgactccagggcaccaacatgtaggggagaaatactgctgaggggaatgacatgatttctgtttctttgagagattcaagactggatttccttttaattaacatggggtggctgatctatacttcttgaaggcaactctaggtgggggtaaaccacctggggcctcaagatttattaggacctcacaatagcaaacctgttgctcccctaaaagctagaaaggggggtttacaaaggagataaaccacaggtgtcagatatgtatccaaaacatctctctgaaggacttttctcaataaaaaaaagctactgatgcatttaaaattaagtaataaaacaagaagtacctgtgcatgaaatatttttacatctcccacctccaaccctgaagccatcctattagcaacctaccctatgatcctgacatgacccgacagaaggagacttgcagatccaactgctcctcagagtctcacttgcacagggggcattttcaacatgtccagggagcatttgctgccttgataatgacctttgaggagaggaaaccaactcagaagtaccttcatcctccttttagtttgtcttttatgtttttttcttgagccaatgacttctttcagacagcaataatttacacttcaggaaaatgtcaaagtatagcaatgccctgaataataattaccgccaaggttggaatgaagcctttcgaagaaatgctaagttaattagccacacacttgtttaccattaggccagtggagaaaacaaggagcacaggatcagaacatgcctgcaacatatggtctttattaatggcggcatctcaattagtctatgggaccccacttctgtcaacccagagatgatctgaataaagaaggagaagaaatgttcacaaagctgtcatggggagaagatgctacctgagaccactcaggacacccacaaaagaaacttggatttctgttgttttctgtcataccttcatacatgaaattgcctcttttaatctttccacaatgcatttgttttgggacaaaggtcaagagaagggcagattaggaaataaggaggtttacccattattaccaaaaatctatttaaaaaatcatgtttccatgaatatctcaatttatcccttctaattcttattctcatttctgaaatatatactttgtttagctttttggaaaaatccacattttaaagaagtatacaataaaaaaataatactccttatttacatgcttctgcaatcatggccgcctttccacagaacactctcagacgaaggcccttttgtgccggcctacttagatgttaccaaaggtgtacaaaaacgcatctcttgcagatggctggaagatagctctgagctctttgtgttcaatcaatcccccaggaaaaggcattagaaatttattagaagcagctccctgttctcctcagtttctgagcttggaaaaagcacactacactgaaaaagcattttgaatggaaaatgtaacctgaagtatcttacttttttctttcctccatagtcctaccatcgatatatcctttgtaggactctattagtttgctaggacgagcataacaaaataccaagtaccacaaactggctggcttagaaaagagacatgtacgatcccacagttctgaggacaggggcctaaaccaatgggtcaccagggttggttccttctgaggactgtgaaggaggatgtgttccaggactctctccttggcttgtggatggctgtcttcttgatggatttcctcacactgtcttccctctttgcttgtctgttgctatgtctaaatttccctttctttaagaatacaagtcatattgcactagggcccaccccagtgacctcatcttaacctgattacctctgtaaaggccgtctccagatacactcacattcagaggcactagggattaggacttcaacttatctttctttgcaagggatacaattcaacccataacagagatgagtaaaaaaaaaagatattaatgttcaaaaaattaagtaaccaaacataaaaactttaaaagctagtggctgggataatgtctaatgccccaaagcggaaaggtaccattgtcacatatttcaaagaggaaaggtaccattgccacctatttccctggctgtttgttaccttgatgaagtgtctactgtggcaaggcattatgcatggcactgggcaacagagggaaaaaaacatggagcctctatgctcatgaatttaccctctccttttatgccagccttttcaacctgggggaaagtggactggctagagtactaatcaagctgtgaaggactttgggcttctacttcattctcccttgcattgacagctggacagttaaaagcagcaacaccaacagctgcacagcacccaactcatcaacccacaacaacggtgacatcacctaagttagcatggaagtggccagtctgcttttgccaattctttgggacattaaacccatgataatacttttaatataattctgtgtgaaccaataatgatgacaaactattcttcttgcctggttggagataataagtaacaatacctcctattttctacgaactgtactttttttctagcaccgtgccaggcacttaccatgataattttatgccattttcacaaggtgagactgatattactagctccattttacagatggagagattacatgtcttgctaaagctaccagctaatacagagtaaaggttaaatctgaaatcaaggtgtctagaaaatcaaccccatgctcttgagccttacacaatagtgtctctttcaaccttttgaacctgagcacttatgacaactgcccagtatatgtgtacacatattctgtgcatgttatagatagatagacagatagatagatagataaaatatctattttctccccccaaaatctatgactaatgcaataaacctcccactgattagacagttatggctttttctcacatctccatcagtgacataacatattaagcaaaaaagtccgacccagctgattagtatttgatgtgctgaagagcctaatgtttctttatatgaaacatcagacagtggcagcctacttaattactaggttgactttatgtcttcaaaataataaaacagaataatccaaacgacaggccaacgtggtgagtgatatttgaacatctactcgaccctaaaactgttaaagcaaaagtacttatccaaaatccaatactttccatttttcttttaaatgttgtaagtcaaaaccagctaaattgattttttgcctttgacttctgctgaaaagttcattcctaagcagattacatgtgtggctttgcagctcagaggaaattttacagccaagtaaaaccctaaaatcaggaaaacatgggtttgctgaatacagtagaaagacgtgacagatcttaattataaaagaacaaatatatcttgatagatgaactgtcttttgtgaattaagactcaaaagttttaactccttgattaaccgttacccattagtaatatagaaagttgtgaggcaacgtcttcaaacttctaagtagaacagagcactcccaaagcatgcagaaccccctgtaacatcactcaacgcattttcagcatgagtgcccagggtaagccttcctcacaatgttgcaaagcaaatcgtgtccctcattcccttttctactcccagcactccttggttaagtgttttaacagggtaagtgatgacggtacaggaagagaagaaggaagaggaggagaaagaacaacaatgatatcatggtaaaggcctgtagaaattgatctaccagacaaaactcaagagctcatatgatacaggattttgcttgcacatggtcacaattaaataaatgatgaaaatgagactcaaatctagattgtatacctcattccactgttacaagctttcttctaaatgaggaatcatcaaaaccaaacagaagtgtctatcttaggtcaccttaccctcttttctgattgttgaaattaaggcagtgcaagaaacctggggagacactggaaagtgtccccatgccaagccctgtgagcacaatgagctcatgaaagaaaagcccagagccaacaactaataatcgtgcttaaaactcatcatttaagaatttcaaaataaacactgatcaattgaagttattttgacccaaagtcttacgtaccttcttttgcttgtccatattggccatcataaaaaacagcaaaaaaaagaaagaaagaaacaaagatggggagttgttgcttaatgggtatacagtttcagtttcgtaagatgagtgagttctgaagatctgttgcacagtaatgtgagtatgtttaacactacagaactgtacacttaaaatggttaaaatgatgtattattccattaacttaaaatggttaaaatgatgtattattctcaggtatgataaagacatacctgagactgggcaatttacaaaagaaagaggtttaatggacttacagttccacatggctggggaggcctcacaatcatggcagaagacaaggaggagcaagtcacttcttacatggatggcagcaggcaaagagagagtttgtgcagggaaactcccccttacaaaaccatcagatcttatgagactcacccaccatcatgagaacagcttgggaaagacctgcccccatgattcaattacctcccactgtatccctcccacaacacgtgagatttgggtggggacacagccaaacaatatcaaatgataaattttatgtttttttaatggaaaataaaatttaaaagaaggaaaaagaattctctccccttccctctctccctacctccctaccttgctttctcccctccagggaagacatgtgcctccaggatggaaacaaatggattgatctggaaaatacttaggaggcagaactgaaaaaatttgaatgtgaggatgagaaacagggagatcatgggtgatttccaagtctctggatcaactgaaatggagaatggataaggaggaacacctggaggagagcacgcttggaaaggcatggtgagtttcatctaactagagatcaccagcaggagtctgccctgtccatctggagcccaggaaggagggttagggtggagattctgtacatttctacagccaactctaatttttggttacaatcaaagcctatgcccttctaaaacctttttcttccatcactaatgatcagctgtgtttccagaagtatgaatggatttatcctatatttctgcctaatatttcatatatgaatacttctaggcaggcattgggtcatatgtgtaaaacgaaagcaagtacttaacacaatagaccattcaataaagctgcttttcacatgcttcatttactactttccattgcctttttcgcaagcaattaccatctcacacatgcccagtttcaccattctgcagaaccaaatgttgaatttaggcaaacatagggtgttcaataaacaggtggattttgaacagaacaccaatgaattcaggaagcacggtcaaccagctgcgtctgtcaatggaataatcagtagctggctgcatctgtgctggctgggctgccatcggtgtttacaagctggaattgaagagggctcggccagctgacagcagaagtttgcgcagcacctgtctaaagtatatatgactgcctccaggcaatcccattagttctccactttcatggacactaggacttgttcacaaatttagggggaaaaataaaaaagacaaacagagctagcctctgactgagaaaggacacctgaaagagaaacaatcccatatggagaaacagaacaagggggtgagaatgagaaagacaagaaatcactcaagaaagccagtaatgtttacagatagtagaaaaattttgtctgtaaacagtgggcttggtagcatttttttaaatcagagatgttctggagaaatatgtaaagaactcagcccaagctttctgatgccaggcagggcataagtagtttacatggaaccttctgacttgtttatctgacatagtaaacagctttctctgatcccactgtcccttttacgcattacaagataacaaaaagttatgcgattttaggaaatcaagtatataaacagggctattctcagcacatccactgaatattaagtgcccacttttatctgctagaacttgatgtgtgaaggtaaccaacttaaatgcactgaagagattgcattcacacagtgaatagtgacattttgctaggaatttgttaaattttataatgcaagcatactgccgtaatgttccacaaaacgtaacagtcggtgcacagcaatactgccctctggtttgtgagggctatttccatcctcaattcattctagcaggaagaagaaattaaagatatgatagaatgctatccacattgttataatgctggttctttctgaggttagtggtcacacacagtgctatagaggcggttgttctttcttgtgcctgtaactgctgaggttaatctctcagtgcttccaaatgcatatggacatttacacatatggacactgaccaatcctaaaagaaaactcaggataaatcatgttcaacttcaaaagtccagcagctaattcaaagccatgctcttgtagaaggagccattgaaaacaacagagaaaccagacaacagtctttaacgtcttatctttgtttatgattcttaagaccacacctggcgtgaaccgatatgctaggtcaccctggttcctcaggtgcattaggcatatgtgagcagtgaaactatgacaaccagaatgcaacatccaattataatgattagaataacaacaaacacttaggcaataattatttccattcattcacttcatctccccaataactctacgaggtaagtacaattattattccccacttcatggaccactcagtgccatactaagagtcccagagccagtaacgagcagactagatttaagatcaaccccatctgacttaggggttctgctcttactgttgttctgtacctaaagctatctgatgtattttaaaatgtaggtgtatcagtttggtggggttgccataaccgtgagttgggtggcttaaacagcagaaatttttcttacagttctagaaactgaaagtccaagatcaaggcatgggcaggtttggtttctcctgaggcctctctctccccttggcttgcagatggtcttcaccgtgtgtgcaccttcctggtatgcctttgtgtgtcctaatctcctccacgtataagaacatcagccagaccagattgggacccaccgtaatggtttcattttaagttctctctttcttttttttcttcttttgagacagagtctcactctgctgtccaggctggagtgcagtggcatgatctcagatcactgcaccttctgcctcctgggttcaagctattctcctgcctcagcctcccgagtagctgggactacggacatgtgccaccacgcttccctaattttttgtatttttagtagagatggggtttcactatgttagccaggatgggctcgatctcctgacctcgtgatccacctgcctcggcctcccagagtgctgggattacaggcgtgagtctctacaaccggccttaagttctcttttcaaaggccttagctacaaatgcggtcacattctgaggtactgtgggttagggcttcggtgtgaatttttggggaaaccacaacgcaccccataacagcaggtgtgttaacgttctacaaaacgcaacggtgggtgaattgtaggacttccctctgctttatgagggcttaattgtatagggccttattttggatctttccacattcaacaagttctgagaatgtgatacttggaaaccacgttcatcagaagagtgaaaggctttcaggtaaacgtcctttgatctttttcaccgtgatgccctccgatgacattaactgtggtagtaaccagcatcattcagttgctgttttagaaggaacttaaaaatggaagatttgaaaacatgattgtgaaaccataattttgcactgagtccagtattaacagtttttcaacagagttaactcttgctgctttttgttttaaccctgagtgtctagaactgagttgggcaagctccttaacccacagcacaccagcagcctagaactctccaagatgtcacttggattttccttctgacctgcctttcctgatcccttgctacctcaccctatagacataggcttacttttccctaatattttcctgtactttaacgcatagctgtgtttttatgaaaaataaaatactggggttttatgctcaacttatttaaatgatatttcactacaaattatgttcttcttctatttgtttacatcattatgcttttgaaaaccaccagaatatgtatgtgtacctctggatctaagctgttaaacatagtagccactagccacatgcagctaccgggcatttgaaatacggctaatgcaagtggaaaactaaatttgtaattttaatttatctttaatttaaatttgaaaacttgtatcttaattatgagaatacttttaaatatttttggaatatcttgatgaatcttcttttttcagttgtacattttataaaacttaaatatgaatcaatcagttccaatgaaaatttagcctctgatttaagatgtactataaaatacacatcagatactgaaaatagtacaaaataggaatgtaaaacatatcagtaagttttatgttgatgatatactgaaatactactttacatatattaaataaaatacagcattaacatgatcacctaattctttaaatttaaaaaagtaaaaataaattttcttggtacttttttgtgtggctactaaaaatctttaaattacacatgtggttcacattatacttctaccagacaggggtgatctaggttttaattcctctaactactacaagtattctataataagcataaataataattttacttcattctcttatcagcaggcaaatagattgtttctaattctttaccatatcaactagccctccaaattcctgtttttatgcatcctcactaatacttattatgatctttcttgttgcttttggtcaacttggtggttatagagcagtgtttcttatttaaatattcatgtctcagaatactgagagtgtacatattagccattcaaagttcccctttcgtaaactgcccatttatatctttgcttattaaaaattttgaattcacatcttttatttaccaattagtagaagtaaaaagatatattcccagtataaatctcttgtccactgttagacgtaatttttcagctattatacgtatctccaatattttcttagcttgtactttgttcatttttcccatagtttatttcattgaacacaaatctttaattataattaaattccttaaattttacctttattatttcaagaaattctaccctagtaagaaattgtgaagaaatttcatcttttctactcttggtttatagtttcgccttccgtatttggatcttcagtccatcatgaagccctatagcacttagagcagcagatggttgccaacatcctaggcttaggtacttgccacttgagaatctgaacaaaactgaagactttcttactgaaagaatgtatgtgcataaaatactatatatataatttcaggctgttcccagacctctactgcaagccctttcatgtatccttatgcagtccacagaatccaggcgcaggatccccgagtctcacagattctactctctattcaaaaacttcattgtatttttcatggctttgctcaccatctttttctgggttatctcatattctcaactagtttatgagctccttacggacagagacctagatccaggcatctccaagatttttcatggcacctgagagctgggagtgctcaataaatacgccccttagcaagtgatattccagaaatcagactcagagaagagaatgtggtgtaaggcccaggggattactctaaagaggcctccattaattcatgcattcaatcaacagtcattgagcttgtccactgtttcaggtcttgggctacatggaagataatcaagggaaaggccacagtttgtgtcctcagagggttcctattctagaggggacagcaaaggagaagtaattataacacggggcatcaatgctctgctaaagtaaggaagtagggagcttctggtctgcataacaggagggtacctaatggggcctttgaggtaggggaagggtgggcctctcagcaggagtcatgtttaggcggagactcacaaaaatgcatagtgttaaaaaaattaaatttagcctgaggctgtctccgtaatttgagtccctacctaaggaactgcagcctaacctaacttagtctattaaacacaccgaaagcctaatttaggatgctttttttttttttttttttgtaacagcagctgagcttcagccaatcacaggctgccaactgatcagaccatgaccaaataaggtgaacacctagacataacttaaggaggaggcaggatttgactgaggaggcagggctcggacaccagatcaaatcaaagactacctagaacagggacagagtggaagtacatttccgtaagatatgcccaccactggtgccatgctactttatctctccagcacttaatagattctacctgaacccctcaccctcaactgctattaactgaacctggaaatctgagtatctatatctgtagtgcattaatgattctatattttgcacccactgtgtattaatgacacaaaagtggaggtttcccttcaatgctttgatccaactctaagctgccgagtccccaaggctgtaacagtgtatacaggattctacttgtgagcaaggaaacaaaccatatatggtgacttctctcagataacaacatacaggaaaaaaataaaacaaacaaacaaaacaactgcctaatctgggaaggtaggagtactgacccactctgtgaaacaaagattggttgggtatctccattggaacagggcaagaatatctctacagacccaatttggcagcaatggatagatatcagatgttgtggagcctctatttgcaccccaactggactaatttttgtttgtggccattaatggggaaaagtcataccccatattcactcttgactaccccatgagccacttgtttttaggagtggctttcccttgtatataaaaaacttggaacagaggtgaatgtaggatggccactcttgcttctctaggggtcacagtctataatcccataagaaccaagaacaccagaaataaacaagcaacagcattaattctagcaggaatcagagcagcaatagaacgaatggcatcctggggcagctttgcctatcacgagtacaccctgaaaaactagactcaaactctagaatccctagccaccaacacaggtcatgtactaaagggaatcctagagtccttagaatctttggcaaatgtagttcttggtaactcattctgagggctgcccgattagttgactgctctttggtcaaactctgttaaattaaacttgtctacagtttttcttttaccagtaggcagctcatctgaaaacagtaggagggaaaagagggaatcctataaatcgatctgtcataaacattgtgaactggctagagtgctcctgccttttcctgggaatcagaaagtagcagccagacaggaaaccaaaccatctgatcttttacaaacaggaatcagatcactgtactgccacatttaaagccaccaggggcatcccatctaggatgggatgggaaaaagtatgtctaaaatatatatacatagtgtatataaatatatattatatataatataaatagtatataaaatatataagtatatattacacatataattttttcttagtataagtatgtcccgtgtaatatttgcaatgtaacttacactaacaaagtatgtgttatttatcaggaagtcaaatttatggcagttaaacctgccagcccaaagcacttaaaatataaaattacacttaaaatagagtcttcagtattatattttctctggctttcatcttagtgtgagctctgcattgttccccatgcttcaggcatgctgaccagtgagaatgagaataagaatgccaagctccatcccatcttagcaccttggcttctgtatcttctttccatttagaatgtgttttccctctttcttagcgtggttggtttcttctcttctttcaaataccagtttagatgtcacctccatagagaggccttccctaaccacaccacctaaagtaggctaccccaattattttctctctagatacatatatatatgtcagtccataaacattttattctttcacttctaaactgttgccctcaccattatgtcagagacttctgccttttgcatctttgtgtccctagcccttagcaaaatgtctgtcacatacgagatactcaacaaatttttatcatataatggaaatcttaagttagtattttctctggtgcttccaagacatgcattttgcctagacatgttattgtttgtcatgtgaactggctatggcaaaacacattgccttcagagagaaagagccacacaagttggaaaggaaaggtcacaaggatgaaagaactctatcaacattaatgccttataaaaaaatctcttaagagataccaaaagatggaaagaaattgagtctatcatttgaagacatcccccacccccgcttttttgctttcctgcaagtcatatctgagtcatacctaaggcactttggctgtgcctccttgtggtcctctccatttcttactacttcatctcatcactttaccaccttcaaagagtcctttcctcatataacctcacatgatgttcacaggattaaaaaactccaaacgttcaatagagaaacaacattttcttaaaaatatacagacagacatatgcgaattctttcaacatgcttataaatctatccacaaccctactcagagtatgcttcaaatgtaaatcagaagccatatatattgtattcttccaagtgattactctggaaaagaaaaatcacacatatttattgagaggagaacaaatttaataattttgctcaatcatcaaaaacatttctaaatatgagctatgataggaaaaaaatcagtttaactttacatatgaattattttcctgttttaatcatagaattttttaaagttttggattagattcaaatttcttcagagaactaaatgataagtttgcaaacaattactggaaagaaataaggacaggtgagagcaaaagaaagaaaaacggttacagagtgtaaaactattttcaagcacaaagttaaaaacttctaatacagaacctggaaaacactttatgtgtgtgagataaatgaaagcgttgaggtcagattagaaaaacaaaacaaaacaaaacatagcttctactgacaaatgtaaatgcaccctgtgatcctgttgccaatgaagtggcattgctctgatgtaccactcccatcccaacccaagcacacacttgtcaatgagcaccagggttttcaaattatccagaactctatcataatgatggagctaggaagttctttcagcctcttaacagcagcgcattattttccctatagataatactgagaacatggcaacacttctgcctgatctgcttattaataatacccaacacagcatttattagatagagaactactagatgttaggtgctgggttaagcacaggaaaagaatcaacaaattctacatcattttctttgttgtgttggtggtggtggttactgttgtttataccttcagatctctttctacactaaatttttgggtagaaatgtttaaatatcatccttagcctccgcaataataatagcatttcatcactatcactggtgagaaatttgtgttttatttttgtttacattttacattaagaaattaatgaagtgggaatggctacctttgctgtatactccaaactcccactgatctgtgtgtgggttgcgtgtttgtctagagaggacagttgcccaacacaggaaaaaaaataccctgtcattatatgatttttcacagaactaaaaagaaataaactacccccattccaaagcgtggcctcctatctttttgctacacctcatatacttttctcacatggcaagaagggtacccttgactgctcagtgcctctccctcctcttgatgctgagatgctccaaaacaccactggggttcttcaggagggatttcattgtcaactccagcttgcagtacagggaagtgacatctagagtgggcctctttttgtcactttcccccatactaccacacacataaaaatgcctgtcaaacactgtcctacatacatggatgagaaaaagaaataagcactctactatgaaagactctaactagaaaaagcaaggagatgccaactgacaaatgtatggtgatggactttctttttttttttttttccaattctcagatttatttctgaggctctcagccaatttctgtgtcataaagatggtgcagttcagagcttaattgctttagcacttgcaccaagaaaaactgtattgcaaacaatgaagaaagaagagaggaaaccaacattttctaggcactggccacgtggcaaccagtgtacaaggcatttagagaaagctttttgattccattcaatcctggaaaccaacatgttgaagggccagatttttcaccattttatagggatgcaaactttagctcagagaggttaaatgacttgccaacagtcacacaactagcacttagaggaacgggaaggctaactcggagctgatgctgcagcttacactcactccccactcccacgcaacacaaactctttctaggcagcttcgaaggtaccaaacaagtggctcctaaggactcagtaaacattcctgtcagctggccaagatgaatattttggataatgtccagacacgtgaaataccagctttaagttgtggaagtgcttcaggcacaaccaagtctcatttacgtcctttaaaaaatagtcatgacctgcccccttcacacactgtcattcttctggaaggtatctgagagcacagctctgcaaatgccaagagcattatgcagtttccatacatagggcttcctgagtcaggtttggcagggcaggggttcagtgtacaatatttctgccttatttctttaagtttctcttggctacagctcttaagagacacacagagggaatggattctgtagaagatttctcccagaaattttggtgtagattagaaagcttggtttgcttctggttctattacttgagatttatttggaactaaaaggttttctgcctgagagtaaccatttaatatattggggaggggggaagaataaaatgctccttttgttttgctatttgcaccaccctgtcccgattctattgtttgcagtaagttttgtaacagaaactcttctgcactccttattgtgttacaagtttagatgtacccaaaccatcagcagttagattccaagtatacgcttttgattgattcaaatgcattacccgggagggtgtgtgctttgctctgttgttcttccagccaactcccttgccagctgctgaaatgatgccaccaccggtctccatgtcatgcagattttacaccctgataccaggaaagcagaagcatttctcaaaagagtttttgctggcttggcaggaaaacagaaattgctttttatcaaaatgaaaaaggttttcttcatgggaaacagcaaaagcagtttgaaagaggggccaatacttttatcctagataaggtgttttcagcagagcagacagaaaaacatgttttccttcctttcatgacatcaatcagatccccaaagccagctacctttattcacagaacagatggagcggtaatggtcccagaggccactcttcctggtctggggatcttgccatccctgcctgaaagttctcaaatccaagctctgggaacttgggatgcttttttctgcctctcccacactccaagaggaacacatccactattatgcatgtcttcattctttgtcctgggtggaacttctgggggtgggagaatgggtgataaagggggaagtgggattcactttgtgaacacctactagaagccaagccaggtacatcctatgcattatttcatataaaccttaccacaaaactttgagtggtattattatgtccatatgacagacgccaaagaagtagactaggggagttaaatgaaatcccaaaagtcatatactaatatgtggaatactagtaaaatctggaatgtgaaccctgcctggtctgttgcttcagagctttgatgtgccaccaacaaacacttccatgcctctctgcttagaggcccagtttaaaatgctatcctctggataaatatgtggtaggtccatacaatggaatattactcagccatgaaaatgaaattctgacacgttacaacatgaatgaaccttgaaaacataagctaagtgaaataagccagtcacaaaggatgatattgtgattctgaaaccaacccaataatcccatagatagttttttggatagacgtagaaattgacctttttggtcttaatgcttgaagtttatatttgttttaactgagttccttcctcaggaaatgaccttcaggcctctcgaaaaaaaaaaaaaagtattggcaaactgaaactcaccagatcaccacattttgacaatgagatgctggacccctcattctcaggattgcttccttgcctctccctagttcctgttttcttatacattattacatttcttcctggctatataaacccctggttttacatagtctggttttggtcagggaaatggatttgagactgaactcccttcttcttggcaatactcatcatctcagtgactggttttctgcacggcaaacagcaggacctagaccgaacccctagtgttttggtaacaattccacttctgtgaggtacctagaataggcaagcttacagagacagaaaagtagaacacagattaccaggggctgggggagggagaaagtagtccggggaatagggagttattgtataatgagtacagagttgggttttttttttttttttttttttttttttgagacagagtctcgctctgtcaccaggctggagtgcagtggctcgactcgatctcggctcactgcaatctccgcctcctgggttcaagcaattctcctgcctcagcctcctgagtagctgggattacacgcccagctaatttttgtatttttagtagagatggggtttcaccatgttgggcaggatggtctggatctcttgacctcatgatctgcccgcctcagcctcccacactgttgggattacaggcgtaagccaccgtgctgaccgtgtacagagtttctatttcagatgacagaaacttctggagttggatagtgtgatgactgcacaacattgtgaatgtactcagtaccactgaatgacacagttagaaatggttaacatgctaaattttatgttatgtgtagtttgccatcacacaaaaatgttccctgcttttccctttgaaagatgccacatctgccctgattccaaagctctttcttagaattgactcccactagctgtaaagtgacacaaaagatgatctactccaggcatgccaactcaaatccactgatagtgacagctagcaacactgtgttaagaaagattatgaggatgttttcagggccaaaaaagataaataacatgatcgatttgtaaaaatcccctcacaatgagacatcgaaatgttggataaaatacaacaaaatattaattgttctgggaaatgtgaattgggaaacacagaccaagtggcaaaagcttgggcagagagtcatggtattcagaggccatgatggtcaaatacaggttgatcttctaaaaacataggaaccgagtgagtaagaaaatcaaggcaactaaaacgaagaaaatgttacagtaggtaggtagtcaggcgtgatggggcaggagagggccctcccaacacccccaccaggaaagccacgctaccatcaggtgatggtcaggtggttgttaactctctttaaaataataatttgtcacagccagcaccagggaaagaccgtcttcctatattgataggaaacacctgtaactggtaatcagcagttttcaggagttgggcgagtgagcacaagcatgcgcattaagagacaaaatggcagaatatggttttctggggcattccactggaaaagggaagaaagcctcaggtgggcatacatacaacttcttaaacacactcacatgctcacctcccacatgttagcaggccacacacatgtgggtggcccaccttaagagaagaaccatgggaaaagggacacaaggcccagaagtacaacaacatataaaacccacgtcaaaaggtcaaacgttacatgtgaccttcacagtgcctgcttgggtctcttccagatatactttcctttctttcctgtgctaaagctttttaataaacttccactcctgctctaaaacttgtctcagtctcttttcctgccttatgcccctcagctgaattctttctcaggaggcaagaactgaggttgctgcaggcccatatcgattagccgccagtaacccaaatattcattgcccccaacaaaaagagcagaggttttctgtgcctacgaggttcatgaatgagggctgcctagagctccccccattcttgttgggtctccccttctagtacaagactccttgtagctttgcaataagtttaccttttccttataaaactttactagctattcttcaaatcgacaatggtttgacttcaacaggtcttcatggggtgatcacatcatgtgtcatccatagagggtaatttgaacttataagcattaaccgtgctccatgagttgttgttttttgttttgttttgttttccttttgctttgataaacaacatacccagatacatgggggaaaaatggtagtcatccaatttcttcatattgccagactcacagcaacaggaaagtgacgttattaaccctggggagcctctataacttcttaaaccataaacaaaaataaagaacataatggaaggtataattggtgttaaaaaaaaaaaacccaaatgttttctgaattccatcctcatgttacacactcaaaaagtttctctgtaaagaaagaaaatctttgactcaagaatcaactttctagctatctcaaaaccaaattataatgaatttagaccgtagaatcaatactgggggactaactaaggatcactaaatcctgtgttattgattgcttggagaaaactatctttttaaatatgcatcacataacaaagttctttatttctaagaactttctccaaatcctcccatcacatggtttatgtaatgattaatcctttgtattaactactttatgtgtcagaaatattaaaatgcatattaactgttcctgggaaatggttctgcagtttctcctaaaagtatactacctactttgaataagttacatgaaaactgtggcacatttgggaagaaagcagcttagtaggagaaaaatgagatttgcaattataagaactcaatacatgggtgtcttaggcatttccagattttaaaaaagtataatgacttttctcccccagtgtgataccaaaatcaatggaatggttttggtttgttttctactggagtgtaccagttagatttaatcacagagggaaaaatcttgttttgatttctcttattaattacttcttggaaaaatgcactgtagcattcttattcagaatttcaggaacaaaaacttttcacttttcaaactgcaaatgaaggtggggtaaatgtgtgaaggagctaagatctagatatattagagtttctatctctgaatccaggaaggactttgtttatagtggtggaaatcaagcaaggagctattggttggtccacacaatgcctaggtgttggctgtcatgctccattcagacccacaatcccaatgaaacctgtcactttcaagagtgcaaataataggatggggaaagagtgttagagtaggacgttttctaacaagagcccagtggattcctacctttcatctaataaatttcaatggtttaagagagcagatccataggtgccacacagcgaaaggacctgtgtaaaaatcacagtgagactctggagtaagagatggaatgtgatggcccgaggccctgccctccaaccttgagtccacaacatacgacctctttaaaaaactccctccagaagccctacagtttcctctctggtttgcgtcttactgctgaagagtctgtttgtagagatggatatctgactaagctagctttccttttttatgctctttccctcaagaaccaagggtttttcacattccaaaataaaatgcaaactgagagcattttgtatttttgcatttcgattccctgttttgtcagtgagtaattatagcaaataaaatattgcagctgaatgtaaattgttaggcaaccagatcacagcaggatatttttcttccacaagttttacatcatagagtgttaaatattaaaatattgcaagtcaagtaaacagagagggttctttgctcaaaacattaattttaaacaaacatttcactgttattcagatcggatgctaggaaacaaatgacattttctttcaaataaggtgaatagatcatatgaaaggaaagcagacaagggaatcatacagaaggaagggcatttatgacacgagagatgaatttcagccagaagaacaggagagaattcacatgtaggagagaaagcaaaagaaagagaaattggcaaaacaacatggaaaagagcaagaaatgagaaagactgacttactgctagaaggggaaaaaatgaagatatgtctcatgtcagagtacagagacctgactcaaaataaggcagctggggaagaaatgaaattctttctaacatcatgaatttctgtttccttaggttattaccagaaaggtagaaaggagatgaattttcagacctccaaaagatcaccaatcaataaaataccaatcaataagcattgattgagtacctaatgtgtgctcaacaaccaagtacaaaattagacatggccttcttctgaggtaccttactatggagttgagatgaggagatgctgaaacaatgaatgagagtggaaatgtattctatgctgtggagtgaagaaaacacacagctcaggattcaatgataatgacaatgagggtggttgagagtaactgtcgtaacactcttattttctaagcacctcctacattccaagtactgtgctggatgcttaatattttcatttccaacatttaaaacaatccattaagaattatctcctctagtgaagaaaataaagcttcaaaacttaacttgcttgtattacacaatgagtaaatggtagggcctgaatttaaccccaggtctcccaacccaaagatcacgatctttcttctactgaagtgctggatttatcctaagaaggcattcttctgttaatccttacaccagaatgccagctaattaaaacagaaacaaaaacaaacagaaacgctgtttgagaaatgttctttgtaagggagatgacctaacatgaatttttggatgaaattataatggatatggaggagttttgtttttttggtttgagaaagaatcttcaggaaaacatatagaatttgcaggagagtcatgttcattaaaccatctcagagttaaagactggagggaatagatgttaatagccataaaggccttgcagaaaaaggcaaaccttcttttccagtaggagagaagaagtgaaaagggatggaggaggagaagagtcaactgaggagcaagaaatgttccacaatgagaccgcttcacaatatctcccagttcacaactaaattaaaataatgcctggggagaagactgttacagatacatgcaaacaaattgcacatcctgttaagtagggcaaaacagacacttggacagagaaaccagaggaagacaaaattcacagagaaggtggagagaactttaacttctcatgaactgtggaattggtagtttgagtacattatagttagatctccattgagcaacaaggtcccgactgacatctggtctacaagatcaactttctggcaatacggtaaattttttgacagttactaaatgagactgaatataagcaaaataaaaatcatcttgtgtttcaagaaactgatatactccagatacatcaccatagcatatggagatttctttaactagaaaaaatagtccatccaaattcacattggttgaggaagccagaacactgacttatccatgtttaccacagctcatctgccttccctcccttaataaaagcagaggcccagagtgactgccaaacaaaatctacctaacaaacatgccattcaatttttttagaaggccattgaaagataagcaaattaaattaaaagaaaggaatgaagagattttccttctgtctggttgttgagagagaacatttcttgcatatccagcatttggcaatctcttagcaaaatggcaaattgacaaaccctttaacccagcaaatgcattgctaagaatttgccctacagatatacttccaaatagtatgccagaatttgtgcaagaatgtcctttgtagtattgcccataaaaacaaacaaaaaaatggagaagaaaacccatataccatccattgggttaaacgcgttttgatttatcaatacaaaacaatatgtacagctattaagaataatgaggtaggtctgctcttcaagatatactatgctttgaaacaagctaagtgtgaagaatgtatataatatgccatttaagtaaagattttaaaggctccgtgtcattttgtttagatgtcaacatgtgcataatttctttttctgaaaagctacagaagaaacttcacaatggtaatatttggaggacaagaggccagcatgtcagagaagagaaggaaaggaaagttttcattttcctcttatacctttccttcctgcctgaagttataggtatggctaatttgatttaaataaataatattaatgaaacataaaagtaaaataattacctagtaataataaaactatgttgtttataactcttatttgatgtttggattctcagaatttacttcactgaactccgaaatgggtggtatttttgaaatttttagctgcaatgaaagaacacagtataactgatgcaccccacccccaaccaaaccacccttataccttgtccaccactgccatctctatcttgcatttgaaaatatgcagagaagactctgtttccatgctacagacagtacttctagaattttgaccgcatagtaaacagtcattgtatcatccacaccctgaatgatgagggacagggacagacagaacctacctaccatgtgagcagctctagagctgtcatagctatagctgactctagctcacaaagcagacatgaggaaaagcaaagtttgcatgtgcacatacacacaacacaagcacactgagaatgaaggagaacaatgtgagactatactgggtcaaagagtatttaggattcttgccaaataatccagttttgtttgtattttcatttacatccctttcaccttaaccactttcacagttatcaactctctaatacactgacacatgctgtgttaggcacttcgcaagtattatctcatttacttcttcatttaaaaagccattggttaatatcataatcttcccactgccacatgaagaaattgacacttaaagatataacacttaccctactcaaagtcacacatctacatctagcaagtgggaggtggcattcaaacataaacacagctggcctcaaaggcactatgactcactgtattcattcctgattcaagtctcatgccttgccctgagactgttctttaggacataaattgggcaaagagcaatcaactcacaaaaagagaagaccttccagaccaaaactaggaagtttggaaaaatgagaatcatgaaaatatgcgtattacacatacagccaggttgaagaagacagaaagcattagaatgtggaggaaccttatgagctagaatgtttagtgcttaaagaaatgtctttgggatcagccatgctcctgggatgaatcctgacctggccatgatctaactgtcaccttaaccatgtcactgagaggcttaacctgcacttacttctttcatctgtaaaatggatggcataatagtgcctgcctcacagaggcatggtgagggttgaataagatcatgcacattaagtacctaggacccagtaactctctgtaattatgctgtgtttgagatcataaagctcttaatcattataaaagtacctgagaaattctggaatgctataacaggaaaacttctgaaaatatagactacccctaggcaagccctttgttttacacagcaagaaagtgagacctaatcagttagaggcaagatgcttctcaagtcagtctattgagtttttattttgcactgaattacacatctacagagcttcctgtagcaggaaactctgctcagtttgcccattgctcattcctaacacctttttctcctgcctgttcccatcccatggccaactactcattctctcagaccatcttgaagccagtgaaaatctgctggggaatactcaggggaagcatatgattttccagcagcaacactgctgctgccacctctctccctttcttcctaccgtgaatttgatcatggttccaggaaatagagtggccatcttgcaaataggcagattaaaacaatcactaagacactgcctacctccaggaggtcttcttgttaccaaagaaaatacacccctatttttttaagcaactgttaaaggcagggtttctgttacatgcagctgaactcattcccagaaaatgatagaagtcctttttccatggacattgacacagtctaggatgggatggtggggatagtacagggtactcaccagctgtttgagggaaatccccaggttgtgagagctcttttatttaaaaaaaaattaaaatgtaagtcaaactcaggcttagttttgaagttcatttctcaccttgttctcatttttatcttgatactccgaatgaatttcccaacgatatctaagagcttcccattcccaggctggtccagtgatttttagtgaaattaggttttattgaaagtgagttgatttttacttattaatgttctgctaattagagcactttgtcaatatctccatgcatgcattatattctcatgtccacagcatgtgtttagaaatatgtggataacaagatggagagttagactgttctggccctaatgacctcccgccctctcaaaacgccaacataacttctggtcacgtaatcatgggccaccttgtactgttcactgactatttgttataggttgattttaatccctgacaaattttttttttttttttttttttttttttttttgagatggagtcttgctctgtcacccaggctggagtgcagaggcacgatctcggctcactgcaagctccgcctcgcggattcacgccattctcctgcctcagcctcccgagtagctggaacaacaggcacccaccaccatgcccggctaattttttatatttttagtagagacggggtttcaccgtggtctcgatctcctgaccttgtgatccgcccacctcggcctcccaaagtgctgggattacaggcgtgagccactgcgcctgacagacaaaatttttaaacctgtgaatactgacacagcgcttcatgttttgctagtcactctcagtgcctatcacagaggtaggcaaatcaaaaattctcatgaagtactagaaaatagatgcacctgtcccccaaatgcacagcataagaagatacccagggactaaaagctcccaactccaaaataaacctattcatgaacatgagtctctattcctttgctcagggaattcagtgctaaagtagatagcaaatatatttatattaggggaaatatctaaaaaatggcacttatagatacatttgctaaatagatatggaagtctatctgaagacctagcactatgccagccatacaacaatctcttcacaaatatgtattgaatgaatgaatgaatgaatgaatgaataagcacacatacacagcagaaaaacagactatgaatgaatatatatcctttcccctaaagaaagatactctaaaacaaatgggcagtcaaaactacaatctctcatttaactgggaaaagtaaagaaccctctatttcatctttgatttcctccttacatgatgtacaatgcaaagggcttgctagtcacatttgtcaagagagcccacaggtactatctggctcatcacagcttaacttatcaattgctattgttgtttggtggatattgatctgggaagaccttgtatcttgcgaaagtcacttctacagcaactcatcactttttctttttagtcgacatgaaggctcaagtgttgtggtatactgggaatttccacgcgacagccccattccatcattaaatacccagtgagagcttgttaactagatgaatgtcccaattaaaccagcacgttcttgtcgctgcctaacagtgatggtgggttcaaactaacactttgaagggcaataactaaaatggtttgaggagcctcaagtgtagtttcaatggtttcacacttatccattcatttgttcattcaacaaatcactcaggggcccagcatggtggctcacacctgtaatcccagcactttgggaggccaaggtgggtggatcatatgaggccaggagtttgagaccagcctggtcaacgtggtgaaaccccgtctctactaaaaaaacaaaaattagccaagtgtgatggcacacacctgtaaccccagctactctggaggctgaggcaggagaattctttgaaccaggaggcagaggttgcagtgagctgagatcgcaccactgcactccagcctgggcaacagagtgagactctgcctcaaaaaaaacaaaacaaaacaaaacaaaaagcatttttttggcaggtcccaatgtctatttccaagctgaaaatgtttgctttcccaaaggggcataaaactgtgatttttcttaacagcacagtttaagtggtcttgactctgcatcttaagttcccagggttaagctggagatcttgagaacaagaaaagagtaaaaatagcaacagtgcaaaactccagacatcatgttggctccatacggctgtgtgggttgtgcactgtgcaagttcagtgtgttccattactaggaccatgatacaaatggcagggaagtggtagaaaccccacccaaggggtatcctaggcccatagtgctccctagtacaagggccacaaactactaaatgtccaaaatcacaagtaaaaactgttcattttggtagaggaaatacttgatttcatacgcatttaaatttcacaattaaagtctcaaataaaaagctgccaagtaaaaatgcccaatgaaacataattttttcctctacctgatttttaagtaaaacaggcaaagaagaaacaaggcaatgattgaatagaaatgctattcttgttttaaaaaaaattagacggtcctaagaatctatgctatatgattacattaatatgcataaaatacataaaatatatgtacaaggatgtttattgtaagactgtttctctattactaaaatatagaagtggttatataaattatggtacttccatacatgaaatgctagtaagtcaataaaaagaatgagtaaacttgtaattgctatcctaaggacaaagctccaaaacatactctgaaagacaaaaaggtaatcatagaaaaatataatatgatcctgtttataatcaaatctagataatgtacataaaggatattaagtcatgaaacagtgcttggaaagatacacaccagtcatctgacagtaataacctatgaagatgaacgaggaagtagagaaatttcatattttatatattggaatttgaactacttttttttaaataatgaaaagtgtttgtgtattaagtgtattataaaaaatatccaaatagttcaaaatgacagtaaattacaggttatgtatagtttaatcccaacctgttacaattcatgacaaaacaaatggtttaaagttaaaatttctaatgtaacctatgtcaattacacattctgacaacatatattcattgagcacatacattacataaaacactgctccaggggctgcagatccagcaaagagacaggtaaggcccctgcttgtatagcgcttttgtccaagacagtaaaagagactcatatattttaaagagattttcagttaaccatcattttcataggtaaataattcaattaactatgacattttgggcactgtggctgagaggtttgctgtggattctagtaaaggtttcttcttggaaaggacattctgtgccataaagagcattccctgcctatcagatattcatccttctcagccatcaatcaactgaagttccctcaaacagaatccataaaacagtcatactttccatccttagaggggtttacacctttccaagcactttcacacatctacggtgtcctaagagatgggtgactaagatgcaggagcaaaataatataaatttaccatataaaaactttcttctgtctagcacacttttctcctcgctctttactcgctcaagttttgctggtccttcagtttgcaacttagaagtcacctcttccaggtggcattccaggctggtatagggatcccccctacatgcttttattgctccctattgcgtccattccctcacaaggtgtggaccatgctgctttgcaatgaccaacttggtggccatatccaagtcacagggctcaggatcacctggagtgccctgggtccaaactcaccctcaagaactgacttaccaggtaggtgagtatctgacagtcatatttacagaagctctccaggtgttctgaagcagttaatcccaagatatgatgatggaggtgtggaccatgtctgtctctacatcaccatcattgaagccacggcttctgacagtgcctgatatattgctggtgcccaataaggagctgctcctttatctactggttctttcaaaaaatatttactgagcacctcagcatgccagacttctggtgaatgacaaaatgaaccaatcatgcatcatgacgatgatacagctttcattaataagactttttgagttatctgatacctgaagcaactacaggaacccaatccacacctgtccctctgtcccctgctgggtagattagggaagacaaacaaagatttgggagcttttgtcacattctttaggtgcttccgggatgccaccagtgggttccaactgctcagctatgtttagaggtcacaggcaaacagagtgggcccattgcagactgcgaggcagggtgcctctgttcaatataaggatatagtccatgagacagaaggttattacaatgaggttgcctgggttttcctccccagttttattctgtatgccttttaggtaaattccttaacatttttcttcaaaatagttggatggcatttgtcttacctttaagggattcggctaaaatccacttgagtgctggcccctaggcagggaacaggcagcaatacctacaggtccatctacctgatgacatgaagactagtttatggttaacaaactgtttttcactctctttagaagagaaatctctgtcaaaggtcacataaactttaccgtagtcagcaaagccccttcttataggatcctccctctatatttccaccctcatctagcactgtcttccttgcttgccatgccctagtcctgctgtgtcaatagagtagagccaccagccacatgcggctcctgagcacctgaattgtggctagcccaaactgagatgtaccagaagtgtaaaatacaacccagatttcaaacacttagtacaagggaaacagaaggtgaaagaatcctattcataattttttacacagcttatatgttgaaatcatactattttagatatatcgagttttaacaacatattattaatttcttttactttttatggtgactaccagaaaaactaaaattacacaagtggcttgcatcataattctaccgggcactgcaaccgtatctgtattggcctcttgatttctatactataacaagcatttcccccacttctgaggctgtgtgtttttttgtcttcacatgaatgactctctttccatgtctggcatgcctgactgctgttcacccttctaaatgcagcttgtatagcatctctggaataagacttgttgaatgtctatctgtttatgacctgcagcaaagttagccaaaatgctcaaaagggggacagaattgtctgcccagacttgagcctggggctccccgaagctgactttccagtgataataaaatgtccccacccaaatctcatcttgaattgtagctcccataattcccatacgttatgagatggacccggtgagaggtaattgacccatgggggcagttctttcccatgctgttctcatgatagtgaataagtctaatgagatctgatggttttataaagcggagttcccctctacacaagccctcttgcctgccaccatgtaagacgttcctttgcttctcttttgccttccaccatgattatgaggcttcctcagccacgtggaactgtgagtccgttaaacctcttccctttatgatttaccaagtctcaggtttgtctttactagcagagtgagaacagactaatacaggtaataaagacttgaaggacatgaggtaggaaggaaagacaaaggtagaggaggagaaaccaagagtgttaccaagccttagcctgatgacaacaggcagttgcttgaagagagacaaacactcttgctttaagaggaataaatcaaagtggctttggatacattaaccctagcttgtcatttgagaagacagccctttatatttagaatggctaggaaagactccttctagatgatttggtgctaatgttaagaacatcacgcaaggtgtccagttcgatggctgtcatcaccttctctaaaccttgtggcccataccatatcaacaacaaaataaagaaaccaaccaagtcaacaacaacaaaacatcgtcaacaacaacaaaacatcaccaacaacaataaaaattagaatatttaagagcctgtgcatgcttacttatgtgctgggcactgttttacacattccatatattaacttagtctttccaattaagtcttcaaggtagccaccgttattgttcccattctatagatggagactgaaacctaaaaaagtcaaggacttgcccagcatcactgagctggtaagtggacgatcaaagatttaaacataggcagtgtggatcccaagcctgtgctcttaacccttgcagcatataccactctacatcttctgtactattctctattgacagtatctatgaagctagcgcttcatggtatcaggatatgatactttcttaattattcattattttgtctatgtatgccttcttttcccagctacagcattcactgtttgaagggagagattcaaccatctccttctctggaccccacacccaacttatcctgttataggctcatggtcaacagatgactgcactgtgttactaaatgccagggaatacacagaagttgtgactgcttacatattcatggaagaaaaccccaactcctatcatccaagtttgaaactaggtcttctttcctattgggggaaatttctgcaggtgtgagtaattagaaaattaaacattaattaacaattcaagtgactgattgtgttagcaagttgcttgctaaccatacaggtaaatattgtgcccccatatgatgtttaaaaataaggtcccttgagcatattaagtagtagagatggttgactcaagattcaagagtttcctgacccctttaatatgtcacattttaagtctgtatataacaaaactattggaaaaggggattgccttactcactcaccttgccttatcatcttacaaaatatcttatattaaaagagagaaaaggatgacagctctgtatctatcacctattactcattatcctgggacaacaaacagccccagaatctttctttaatgaatataggctctcatagtacatgcttatgttcgtctcacgtttgctctctctcatttcaaaaccctatttctcttctgccctttatgtcttcaaaagagacgctgatattaattaccttgcttctctaacccctcatcgttttcagccccaaacaatcagcttcctgcttttaatcttctaccaaatctattttctcatgatctaccgaagtcaccctactaagtaagtgtttctggaaaggtattttcagtgcccatttcccttgaccaacctgtggcccttgactcactggaaaaaatcactccactcctgccctttgtaatattattctcagctggaattctagcctctgtcctgcaacctccagcttgattttacaatataaacactgctacttcctaacaagttcaccagatatacaaaataaccctgtatttcccactgaagtaaattagattgttgttcagtaaatattcactctctctttacttcttattcctgagaggagtatactgtcacattcctttgatatcagacttgatttggcttaagacatgtgaatggagcaggggcttaaaatgtcatgtgcattcctgtctttcactatgagaagcagatgtcttagttttttgctgggtcttggagggtgacagacacatggacttaactcacaccctatagtcaaaacaagccaagctggcccacagacacaagaatcagagtaaatgactcttatttcaatccaccaagtactggggacagtttggtacacatgagttttatgaaacagttaactgatgcacccatacaaatgttaaacctttgttcactggaacaaaggttggaagttttctccaacctttgttggatggaaattttctcttgttcctctacttctatggtattacctctcccatgccacttctctaacttcatgtcctgtattctctcccttattatgttttaaactcctttgaagagcaaagcatcaaaagttcttatccctagacagacacaaattaaaatttgcttattcattcattcattcattcattcagcaaatgtctggattttagaaatgagtttctgtctcaaaggtatttaatacaacacctggctcagcttcatggactagagacacattatcactgaggtcacgttgttactgtttttgctactcctgctaactgttccaaaggggaaaaaaaaaacaacatgcactttaaaagcatgatgttcttgttggcagaaattacaatagtttcttctcttggtgtttactcccccaacactttcctcagctctttatttctgatattcaattaccctttttctgcctggcttttctcactttcccagaagacttaccctgggaaactttactgttttcactggtgtacatttgcactagttggtttaattaccaagtgaatctacagcctctcagaacatttgacacgtctccctttcactggatccaagacatgaagcaatgaaaacgaatgggtgaatgttacagcaaactcaaccaaaatttattttgcctggattcaaggattaggctaacatgctagccagtttcagcccccctaaaatgtcaccctctggaatgacaaaaaccttaataagatttggaaccaaagttcctatgaccagaaactgctcaacatatatgcgtcacacacaggaaataaaggcacattttaaactagagctgctgggtcatctttaaaatagcagactgcctgtcaggagaaccaatggaataatcaatcactcaatttaaagtggggagctcctttaaaatgctagggtgatggggtatgggcacaaagtgaatagctgtgacagtacagttcctcagccaagatccacgaatgtaagcaccagtgggaagagcactagaccaagaggctcaaaaatatactgtgaccttcaactagtcacttaacaagtgctcattgtatcatttaaaaaataatacaatagaactccatgaatccaattaaatttaattccatattattcgagtgtttgtttaaaatgatatttctcaaagcaatggtcaaatgactttgggaatcagtagattaaagaaggttaagcaggtttctgttccatgcaacttctcagtaactttaatagtctactgtgcaccgtgaagctctcagacctggtggatgtggtatggaacattccccagactaataggaatcaaagatcctgtttgtttaccatggacagccttgtagaactcctattctctataatacatggccatcaattatagaagacacagagatactaaagagaatagttttcttgggtcctggttctgaggcctggcattctcatgaagctgagtttatgccctcccctgtgatttatgccatacctctgaatccttataatgatgtccctttttgatcttaagatggctttaactggtaactatcatttgtaagcaaaagtaccttattaaacaagaaaaacagctacgtgtgagttctgagtaaatattgctaatttatgtctatctgcaattgttacttgggctgaaacaaaagttccaggtaagtatgatagtcattttgccagaggagcctcaataatccctgagctgaaatactttcatacatcaagacgtaatcatctaatattaggaaagccattaagaaatacaattactactggaaatgaagaccttttacaggagaacagacatgatggttttccttaaaagctcttcccttttccacatccactttcttctactttaaaatgaaagtgacttcattttcaagtgaccttttataaagtccaaacatcaagtgtcgtaaatattctaagtattcagaatgaggtccagtactgtaatattaagttggatatgccagaaactcagaaaagcgtatttctctttaaatagccaacttataaaattattcatattgtcttcctggattcccattatgttcctcgtgcaagaaagtgaaagtgttttatacaagccatactgtggggtaatatggccaaactaagagctttcagaaggattcttctcttattctctacttctgcttctgctgctgctgctttttttaaacaaatgagatcagaggcatattgtgattagcaatgcatgtttatgtagtgagacaccagattagaaatgattattatcatgtcacctaacagagtgataataatgatactctgagatggtacagctcagctgttgaggattcctactacaataattattttaaaattaattttgaagagaaaaaggaaagaaagaaagatgattgaaaccattaaagcaatcctgataaataagaaaaaaaacccaaacactatgttttattcctaaggcaagcacaaaaaataaaataatcaccaaagtgagacacgactgaaaggtaaaaggaacattcattttccccatccaaggaaaacaataactgaaaacaatttaaggcaaaaagttaagcttctattctgggcaaaggagagttggactgtatttatgtgctaataatctatttataagaaataactgattaaataagatagataaaacttagtagacagaaatatattttttcatagcaaacaaagcaatcaaaagagaagtgttgctgaaaatattgacaattaaaaatcattcaaggactctgaagtatatttcaggcagaaagagagcagcctaaggaggacttattacaggattgaaagcatcactgtgaattcataatttttaatatataaactgagagatatggaaatatatatatagtatgtgtataagtacacatgcatataaatacacacgcatgtattgcctacctctactcacagagaggctgaagcaatgataccccactataaattagcatacctgatgtccagatcttggtttctaaataccattctccaaaaaataaaaataaaaaaggaaccagacctccttggagaagtggttggctccattaatgggacaggacaggaacaagatgagattggaatatcctgtggtgccacaaagttacaaatggctaaaaaaaaacaaagaaaaaccaaaattgtggggacaggtcaaaagaacacatgaaccagaatgaagggattcccctggctaaacagggacataaaataaaataaaaactgataatatcccagagactacagaattaaaaaaaatctacgattctacttcacacacacacacacacacacacacacacacacacacacacatatagagagagagaggggggggaggatacaaagtaacatgtaggatgaacaagtctagagatctaatatacaatatgatgactacagtcaataaaattgaattagagttttttgttaaataagtagattttagctgctctcttcacaaaaaaagtaactctgagataacagacgttgatttgctttatgtagtaaccatcttattgtatatatgtatcccatatcatactttaaacctcaaatacacaaaataaaatttatttttaaaaaaatgggaggtgggggagaaaagcccttccttacagaatttcaagtcataaataaggagtaattaaattagaaagttaccatttaacaatcatcacaaaagtaactgtttcaggtaagaatcagtagtagtgaatgcaaaaaaagaatgggtaaaagtataagaaaaaacatactacattttctacaagtatattcctataagatacttattgattacaaaaggaaaaatagcaattttccagtggagaaacctggtagacaccacaccaaccaagtgatcaaagttaataccaagaatgggagaaaggagcatcagtgtctcctgatataatgcactaagaaggatataatactacctctgtaggattctggccaatatgcaaaatctgattctaaccatgaagaaatgccacatcagacaaactcaaattaagaaacattctgaaaagcaataggctgtgcttttcaaaaatgtcaaggtcatgaaagacaaagtctggggaattgtttgagattaaagaacactaaaagacaggacaactaaacacaatgtgtgatcctggaatggatcctggacccaaataaaagacaatggcagcatttccataaggtctgcagaccagaaatagctttatatcaaggttaatttcctggttcagtaattatactatgtttttctaagaaaatgtcttgtttaaatacactaaaggagcaaagaggcatcatgtaacttgctttcaaatatttcactaaaaattatatatacatttatacacatataacatatatggtacacacactcatatataggtgagagagagaaaatataatggaagtaagtaaagtattaatatctggggatctgagggaggagggtagagggattctttacattatgcttgcaactttttttttttgcaactctaaaattatttcagaattaaaagttaaaaaagaaaagagagggagcttgacttaatattgcagctgtaccataaagtgttcttgaacaagtgacttgtcttcattgaggctcggctccccctttgcaaaatagagacaacatgacttcacagggtgatcggggtggacaaacaagatggtgctgcaaagctccaacccaagagctggcccctgaagcacacagtaagtatagcttgtttttggtaaatccaaaatacaacaacccattagagggcgttactgtctgaaagcagtttgggggcacccgaggtgatgtgcaggccgcagagacaatgctgttctaggtcaggagcagaaacacaggctcctcacacatgcttttaaatggggctttttactttctaaaatgtgtttctacacaattgaaaacaacattactttttccagagtgggaggatgaaagcaatcgtgggtgggggcttcttgagaagaggggttattttttttacttttaaaaaggtctcagaacagttaaaaatagtttttccttaagcagcctccctctgctccctgctcccaccagctgctccttctctcagcctgcccttctctttgtcccttcaccattttcccctctctcctttttgcttccagtcactcatatgccacccactcctgagaaccctaccttctcttatttttttgtttggctttgttttgaaaaaaatattaatcccaaatgaacaaagaagatacgtgggaaggaaataaatggtgagctcttccttacttcaccacctgtcaagttttaagtttttcctccaactcacactaacctcctgcgcaaccataaacttcagtgcttgccaaagcccagaaaattctaagtaaaaagcagaaaatgaatgcagggaaggggatgcattcttattgttcatcagatctgaaaaaaataatgcccagaatgtcaaatgatattacactattaaaaaggtacagtaaagatgtgctaatgatagattttttttctactccaatatgttgtaaatattataaactatcatttactgtcattactttaatgatgtagaatgttgaaaactcaatctgggttaatttacaaataagtaattttgaaaggagaaaaaaatatcttttctatttccgtgtaatgtcccattacttgacagtcaaaatgtggatacagccaaaagaaaaataatgaaggtcaaggaggatcaaaatttacctgatagagtacctatctgttagaaatcactttcctgaaataccttctctgattttagaaaactgaaaaaacagaaaatacactacctttgacaatgcttgcgattcagggttgtgcttgtgtatgggggtgggagaacctctgctaggataggagaaagctgccagacacaagttcagatttaatagaaatagctttcaaatcaggagtctagccatcaaccagttttagatggacagtcccagtttcaagtaaataaaatatttgcatattagagcctcgtagccctacttagctgcaagtaaattttctgagatttactctgccttgcttcatttcatccaggcactgattattttttcattctttattcaccaaacatttactaagcacttctttatacaataaattctgagcaaggtactaagacatgaagaataaaacaggtctggctggagactgcacgaaattgccagtctgtctgagcctgtttgaattcataaagtccccgagaaagaagaaataggtgaggattagcaaccctgtaagagcatttacaaagaagggagtgcaaaagaagaaaatagcaccacagctcaggagggcaatggtattacttaccaagggtgcagtttgtttgatgacaaatctcaaaactgaatgcagtgattgtgttagatgcaaacacttggatgaaatagatgactgttcttgcgaccttgccaggaaagaggaggagtgaaagagaaggctagagttctagtctcctttctgagttttgcattcattggcaaccatgtacctctagacatgggagtgcaggcatctatctctatcaaggtacatgacatgtaatgaaaggaagggatagagaccaggaaagagaaagcaaagagagagaaatagacagggagatggaatgaggtagacaaatcttagaggaatgcaatgcttctccaagtttggtgcaggaatgttcccattagaatcacctgagggggttatttaaaatgcagattcctgggctctgacccaggtctggtgagcctgaatgtctgtggctgggactctaagatttgcattttatatacgtttcggggggtggttctgcatattaaaatttaagatcagaccactccctaaatccaagggtgctattttactgtttacttgaccaacagtataaatggatgtcttcaaagccttgtcaccacaaccccatgcagcctgatccacttacttctctgtatcacactccctcctctcccaccaaggaaaacagagtgatcctgaagttgcttaaaactcaactcaatctactgctcctcattagtaataaggtactgttcaaggaactattggctaatcattcatatcctgattgagatgccagcatatcctacccaattattaactatggatggactccaaccaggaaatccaaaactatatgctgcttactgaatgacaataataaatgtaggctcttatttaattatgctgcggtttattaactatccgataataagaaaaacccctagtttattatagatgtgtggggtgtgtgaatatgtgtgtgtgttttgagagatatatacaggaccctaatcagagagagtgccaggaataacagccatgcatgccaggcatcttttcctgtttctttttcagttacttgaatccacctgtgataaacttgccaaaagaaagaggaagtacaataaccacaaacgttaagtgattttttttttttgttctacaaactcgatgagttcactgcattgtctacttatctgtttttgtaatttcaacttttatttttgatttcggggtgcacatgtgggtttgttccacaggtatattgcatgatgctcatgtttggggtatgattaataccatcacccaggtagtgagcatagtacccaatagctctttttcaatccttgaccccctccttccctcccactagtccccagtgtttatggctgccattttcatgtccatgtgtaccatgtttgtctgtttaactctcacttataagagagaacatgtagtatttggttttctgttcctgtgttaaagatttgcttaggataatgacctgcagctgcattcatggtgctgcaacagacatgatttcattctttttttatggccatgtagtattccattgtgtatgtgtaccgtatttcctttatctaatccaccattgatgggcacctaagttgatttcatgtctttgctattgtaaatagtgctacaataaacatacaggtagatgtatcagtttggtggaacagtttcttttcttttgaatatatatccagtaatggaattactgggttgaacagtagctctgttttaagttcactgaaaagcctcccaactgctttccacagaggctaaactaatttacattcccaccaacagtgtataagcatcaccctttctccacggtttcaccagcatctgtgtttttttggctttttattagtaactattctgaatggtgtgaaatggtctctcaccgtggtttggatttgtatttctctgatgattagtgaggttgagcattttttcatgtttgtttgctgcttgtatgtgttgttttgagaagtgtctgttcatgtattttgtccactttgtaatagggctgttttttgcttgttgaattgttgaagttccatatagattctgggtattagacctttgtcagatgcatagtttgcaaatattttctcccatcctgtaggttgtctgtttctctgttggtagtttcttttgctgtgctcaagctcttcgattaggccctacttgttaaattgtgtttatgttacactgcttttgaagactttgtcataaattatttcccaaggctgatgtccagaaagacatttcctaacttttcttctaggatttttatagtttaaggtcttacatttaaatatttagtcaattttgaggtaatttttgtatatggtgaaaggtaggggtccagtttctttcttgtgcatatagttagccagctatcccagcaataacaatagggtgtcctttttccattgcttaatttgttgactttgtcaagatcaggcagttggaggtgtgaggttttatttctgggttttttattctgttccattggtctttgtctgttttcacgccagtaccatgctgttttggttaatgtagccttatagtacagtttgaagtcagataacatgatacctctggctgtcttctttttgcttaggattgctttggctactcgggctcctttttggttccatgtgaatagtcttttctaattccgtgaaaaatgacattggtagtttgataggaataccactgaacctgtatattgctttgggcaacattgccatattaatgatactgattcttccaatccatgagcatactgtgcggtctttgatattgggtcctgactaggccaagaagacagagatagactggtccctcaaaccttttctctaatgtctggagagtacatattttatgcttttcagtatgtatggcctctattgcaacaactcaactctgccattacagcattaaagcagtcatatataatatataaacaaatgggtgtggctgtgttccagtgaaactttatttacaaaaacaaatagtgggccaaatttagcctgcaggctcttgtttgccaaccccagctcaaatcatcctcagacaaaatttagggagctgctaataataacaaggccatgctctgctatagtgctattaagctattgtctcagcatcaaattcaccctttggtattctcttctgtgataactggcacgtttatgtattgacaagaaagatgaccaccacatattaagtggggaaaaaaatcacactttttatagcaatatcactttttttaacaaaatatgatcctctatacgtacatacataatgttgtataaggattcataagtctcagaaaggataatactgaaaggttcagaggggtaacctctggaaaatggaatcaggagtaggaagaaaagattactctgattttttgctttacattcttttgtagtctttgaatttatttagagtaagcaaatattaccattgtaagttaaaacaataaaaaggaataaatcaaggtggagtcttaacagtgctgaaacacttttgttaatccatttccccagttccaacctaagctttacagaggtgctattgtcaagcaatcactcattcgttcactctacacatataataggcatccactttgggccagaccctacgctatgtgtgaggaattcatgaagtttaggatctaggtggaaaaacataattatataagctaaaattgtaattaaaacaaataatgtacatgaaggagagatggcatcacatttctttattaatatatttattgggtattatatcccattattgctggaggataaaatctatgccagggaatataaaaagatgagacagagaaaatgatacgagtaaacacgctgaggactttagactcagcatataggtgtttggttcctaccatatcatctacataatttccttaaaactgctgtgaatataaaatcacaacagctgttttaaagagactgaaattgaaattcaatgaaacaaggcatttgtaagtcttccttggctttctacattgatagtgacttttttttttctttttcacactcttagaatcagggatgggttagatgttatgatcttgctgttacttcaggcatcttctgttatcattctccctagaggccaaaggcagagaccatgtcttctcttctatatgttggaggcactgtcttttgagttatatgccaaacaccttctctggaattggtttgccacttctagggactggctccctgtcgccatgtttgtgtaatatgacaacagacttaggcaagtgatcctagctgggccagaattccttcctcacacactcaaaacaggaacaaaagagagtggtctagattttacaatgtattaactcaagggatgaagaattccttataaactagacagagacaaagatcttcagagataaaagacgggtacagacaagcagagagaagattaccaagagcagatcattctgtccaggtgcctctgattttttgaggtctaggttcttccaaaggccctactacatcctttgcttgggtttttttccatatgacatcattctacacttacattatatcttcccttttcactgaagcatctatatataaattaaagcatcactaactgatgcatgtgtatatattccaagatgtttaatattgctttcctgacagtagggatttttatctgcagtgcttcagagccaaagcaaattctaatgttatttttttcctccggaatgttctcccagaaagtttctaccagtttgctacaagttgaatgccacttgttgtcatttcagaacctcatatacagtattctttaatagccagaaacacaattataggggaggtcagaagatacatctccaaagtcttctaagtgttctctcctgtgccctacaggccaaaatggtttatatatcaaatgaccttggacaagttgtttatcttttgagtttcagttgtctcatttgtatacaggcaattctgttggctctacagtgctgctggcaggataagtgacaaactctttggaaagtccctcacacacagtcagtgtcatttaaggtggctcctcctgtgagattttgcaattagggatatgatcagtcttagtccattttttgtttttgtgaagaaatacctgaggtggtataatttataaagaaaagaggtttatttggctcatgattctgatggctggaaagttcaagattgggtatctgcatctggtgagggcctcaggcttcttcatcatctcatggcagaaggcaaatggaagccattgtatgcacaaatcacatggtgagagaggaagcaagagagagagtaaaagggtggggggatgccaggctctttttaacaaccatctcttctggaaactaatagagtgagaacttgcttaacccaaaggacaggcatcgatctattcatgaaggatctgccctcctgacccaaacacctcccccaggccccacctcccatcattggggatcaagtttcaacatgtggttttgagaagacaaacatccaaaccatagcattccactcctggattcccaaaacccatgtacttctcacatgtgaaatacaattgtttcatctcaatagtcccaaaagtcttaactcatttcaaaatcaactcaaaagtttaaagtccgaagtctcatctgtgacccaaggtaatttctttccagctatgagcctataggatcaaaaataagatgtttgttttcaacatacaatggtttcatgggcactgggtaaacagtcccattccaaaagggagaaattggccaaaagaaagagaaaacaggccctgtgcaagtctgaaacttagccgggcagacatgatatcttaaagctacaaaataatcttctttgcctccatgccctacatcctaggtactgcaaggggtgggctcctaatgcctcaggcagctctgcccctataacttcagtgggtgcagctcaagtagctgctttccttggttggagttgaatgcctgtggcttttccaggttgaggttacacactgctgctgctgctggtggctgtataatttgggagtccctttggtagctccacttccatagctccactaggaaccctgatagagattctgtggtggctgcacctctgtggaaggtctctgtctatgctttcagagatctatgagtcatctctaaaatcctctgaaatctatgagtcatcaagcctccaccacccttgcattctgggtgcctgcagacgtaacgtcatgcaaaaactgacaaggctcatggcttgcaccctccagagaaggagcctgagctatatctggggccatttgagccatggctggagccagagcagctgggatgcagggagcaacatccagaggcagcccagggcagcaatactttaggcctgtcacctgaaccattctgtccatctacacctctgggcctatgataggaggggtggttgtgaagatctttgaaatgccttaagggcctttttcccattggcttgactactagcacctggctccattttaatcatgctaatctctttagcaatttcactggactgggcaatagcattggattcctcttctgaaaatgtttcctttcccaccaaatggccaggctgcaaattttccaaacttttacactctgcttcgcttttaattataaattacacctttagatctttcctttgctgctttaattcagcataacctgttaaaagtagccatgccactaactgaggtctttgcagcctagcattttcatccaccagataccccaccctcatcacttttaagttcgaccttccacaaagccctaggacatggacacgatgcagccaagttatttgctactatgtaacaagggtgacagttcccagtaagtttttcattttcatctgagaccttgtcagcatggattttacagtctatatttctatcagcattttggtcacaaccacttagccattctctaagaagttcaacactttcccttgtctttttttcttcttctgagacctccaaactcttccgactgctgcccattacccccaaccactgggtactaattttctgtcttagttcattttgtatcgctacaaaggtgtcactgaggctgtgtaatttataaataaaaggatttatgtggatcacaattctaatggctaaaaaattcaagattgaatatctgcatctgctgagggcccctggctgcttacactcatggtggaagatgaaagggagcttatgagcttatgtatggagagatcacatgacagagaggaagcaagatgtcaacaaggtgctagtctcttttcaacaattagttcccttgggaattaacagatggagaactcatcccccaaaggcaggcattaatctattcatgacggatctgccttcatgatccgaacacctcccaccaggccccacctccaatactggggatcaaatttcaacatgtgccttgacagggacaaacaaatcaagcatgatccttagaaacaccacatggtagagtggaaagagtatttaaatgttagtcaggagacctctattctagttccctgttctcactaactagttgcacggccatgctgcttacttctttccaagaaacctgtaccttcatgcataaagtgctattccctatgcccgagtatcatcctacatcatcatgtcatggaaaccccaactctaattcatgattcatcttgagtcctgacttcttcagcaaggtctcctcagtttccacaatcagaggagaacattcctttttttgcataaataaacactgtacttggatctctcttatgggagttattaggctcaaccctactttatagatctagcactactcaattccttcttatttactttctaaagacaattcatcttccaaagttatagaaaaacaaagtttagcatttgctgcatatgtccaacaaacataattaattggataagaaacttggcaggtaattagtactaggcataccatttgcttttttatgcccagaacctagaaaagtgcctgacacatggtaggtactcaataaatatttattaaatgaaaaaatacccagacttggttaggaaagactatgtaaggcaacaatttcaagggtatatgcttttaggccaattcagtttgccaaaatctagcccttgatgttaaaaggaagctggggcttacagaaatggaggaccccaacgctaatggcaagggcagaaatcatcatttatgagacatagtctcttgtttggtggggaatgtttgacagctagctgcataattccacacggttccacaggagatgattttggatgtggagggaacactccaagcacacttcttatgaagacctataatcagaggtcttaacaaacacaagtgattaatatttgttgacttcatgacacatttattttctttagagcacttaccacagcttactctaactttattaaactttttagtatatttttgggttttttttgttgttggtggtatcctcaataaactatgagttctgtgggggaaggaaccatgattccctgtccattgttgtacatccactacacagcacagagtagatgaagctcaacaaatgttggatgaataaatatgcatatagtatgatggatggatggttgagtggataaatggacggaaagaggccagctagtcacccatacaagcttctgggttatgaacctaaataataacacaagttcaacagcaacaaaaataatcccattccattataggctggatgaaaggcttacccactgtcttacaccattagcgctgctctaacaaaatacctgacaatgggtgatttataaagaacagaaaattatttctcacagatctgggaaatccaagatcaaggtcctagcatcttgtttctgatgagggtagtcttctgcttccaaaatggtaacttgttggcagctccttcggaggaaacaagtgatcacctcccaatggcaacatctcgtaatattgttgaattggggattaagttttaacatgcaatttggaggagacacaaatattcaaaccatagaacccacttagagatgacagaataacgaatatatatgaattaaaatgaatggaacaacaacaataacaacagccatcacttatgtagtgcttactgtgttccaggcattgatctaaatgctttacatatatgaattcttaattcctaatacaaaaaagtgagtgttccttcttgatctggagccaagactgcatctatcaaaatgggaatctgatcatctctcccatctgccccccaccccacgtacatcaatggtctacatgacaatgctacaattaattccagaagtaaacttaacctctcactaagtgcccaaccaaagagactgcatggtttcccagtatgaaaatgtgaaggatcaattcacaatttgtttcctgcaaaactgtcattcctctcttcatacccatcactggagaaattacttttcagaccattctacagcttgggaatactaaataagccctaatgagttcaaaagtcggtaatgacagtactaattcagtggcctgtttggtagaaagtcagtctcccttcttcaaaagcaaaataggattatcaagtgagctgggagcattttctttacgtgattgatgggtagaaaaagtaatcacctttgaagtgccacaacatataatatatctcctgtgttctctttcttcttctgacacccacaagtaattgaagggaagggagcctcttagaatgaccaacgaagtgaaggtgacaaccctttctctgctatctaccactagagtgacatgctggggtcttgaatagttgagaactgacatgagtgtctttgatgggctgctttgatgcttggttcagagtgtacctgccaccagtcaggccacacagactttgggtgaaacatacatctaaggagacaagtgttactacttcttagaagcaaagggcctgtgcacctgtgaaagaagatctgttgtctgagctctggggtcggggtaaggtccgcaaggtggaagtgaaggaagtcaaggagcaaagcaagttgaagcaggtaagaaacactgaatatgatttcaaaacagtttctcatcatactcatccataatgaccgattaaccacaatgttcagactgacaactaggagatcattagcctcttgacctcagctcactgatgcagaagcagacagtcgtctccttggaaaaggcactgctctacagtagcttactttgtaaggggatttttgcaactacaagtaattcaactgaaacagagttgacactcaaaaaccttaagaagcagggattatcaggcaggtgaacagttttattcttaagagctcactctttctgaactctcctaaagcccatccaggcaaggacatatgagtttgttatctgaaggaagaaaaatgctttgaagaagatttataaagaggaagggtctttggtttattgacaagaaagtaaaagactttctagagttgtaagcgaaatgtcgctgttcaggttctagaacttgctggctagagaacagatggctgccacttgttggcacctggagtgacaaggagttgaggaaggaagagagtgtcatccatgtgatctggcacagaacattcttctctggagccactcttataaagaagagactggcatgtttggtgggtttactgtatgatatggtttgaatctgtgtccctgcccaaatttcacgtgggattgtaatccttaatgttggaagtggggcacggtgagaggtgatttgatcatgggggcggtttctcacgaatggtttcgcaccatccccttggtgctgttctcatgatagtaagttaccatgagatctggctgtttaaaagtgtgcggcacctcccaccttgcctttcttctcctgctcccaccacatgagatgcctcactccccctttccctttgccatgactggaagcttgctgagacctccctagaagccgaagctgctatgcttcctgtatggcatacagaactgtgagccaattaaacctcttttctttataaattacccagtctcagatatttctttacagcaatgtgagaacagacaaatacaccatagtacctccaacctgctaattaagtcaggagtctccccctggttggctgctacccacaggctccactactggtgagtcgtagaagacaaataaaggcattttaaggaatagtacgacaataatctctagatacatctgcaatcaagtaacagtaacccctctcagaagctatgccagtatgttgcagatactgaacacacatctgttaaatgaatgaaaatgaatgaaagaataaatgattatacagtgtacttgtttcataattgtaactggtttatattgatttggttatatctgcttggtaccatgtgagttttgattacataaagatctacagtctttgtatgacatggcctcagaacacaagtcaacttcttcatctggttctcaacctaagaaataatgatctgttgcaaggacaggctggccatggtagaagtacgaagcaacattttatctacatagtactttagaggtaatgtaagagattttcaaaatcatgcttttacaatgtctacattaaggtctggcttttaactaaaaagtatgtgaaacatgatagcatttctagattgattccattcagaggtgcttttatttcacacatatatctcagaccaagggtaagtatggtaagaacaagtcactaggaggccagcaagagaggattaatgaatggaagaaatggaaaggagagtgaaacactggtaaactcatcccagctccagcaagaggggccaagatatctgagctagctggaacagcacaataataaaaataataacaataatgacattcactgtgagcaaaagaactctgtaagcaaatcaaaaatatcagtgctaagggtcttaatagctgattataatgaacttcctcatgtaatctcagggagcagaaaagagaaaatagattgtgcatctgttcaaactaaacatatttcaagctggaaccagcttggtgccaaagacatctctgtcacagagaagaaaaaattccaaatggaagaaaaattccacttcatgctcaaacaccatgaacttcgacaggaaaattaggtaaccactgcctcacttacaaggcaacgcatcagtttcctatggctgcagtaacagattaacacaaacttagtggcttcaaaccacaccactttcttatcttgctcttctggaagttgggggtctgacacaggtctccaggtgtgggcagagctgacaccttgagcctgacgcaggtctaaaatcaagttgtgcgcagaggtgacttcctttccagaggcttcttttccagtttctagagtccaactacattccttggctcgtggcctcttccttcatctttaaagtcagcaataatgggacgaaaccatctcacatcacatcactctgacctgcttttctgcctcccacctccacttctaagaatccttgagattacactgagcccacctggacagtctaggataatcttcctattttaacatcagctattgagcaacctcaattccatctgcaaccttaattccccactgcatataaggtaacacagccacagtttctggggattacgacatggaggtctttggtaggaggggggtattctatccagggatccccaaccgccgtgccacacagcaggaggtgagtggcgggtgagcaagcattactgcctgaggttagcttcctatcagatcagcagcagcattcatttctcacaggagcaagaaccctactatgaactgcacatgcgaaggatttagaatgcgggctccttatgagaatttaatgcctaatgatatagggtggaacagtttcatcccgaaaccactccctccaccaccgggtctgtgggaaaattgtcttccatgaaacaaggtccctggtgtcctaaaggttggggactgctgttctatattgcctactacaggcatcaatgtttcaaatttacttaaaaatctgttcaggtccagctaccacaaatacaagtgagtgcctctcatttgtgaaaaactgtgtatgtgtaaggtgtgagaatcctatcttattttgctaggcagagctgactatatgtgctctcagagcccccagaattccagaaaaccaaaatttaaaaaaaaatattgaagattaaaaaacagagagacagtgttacccagtgaagtttctaagagaatctacccactaacagacttttccccatctcaagttctcaatcattcattttgttacatttttttatatttgacaaatgatatctaatgcatttcattgctgttagcagtttagacacttatgagaaattaaaaccccattaagtgtgaaggcatctaaacaataccagatctgccttccactgaatatattttgggatgacaggtctgcttcatctgactcctcaacaagaacagcttatgaaactcacagttttagtgacagggcccaaccggcacctatttttgtatcacctggaaaaaaaaaatgcccacataggcaatacatctgatacagaaatgaaattaaatagaacaatactgaggcatcaaccactcagatccatttcactgtttcctattctgagacaacctaattgaaggtggcattccaaggttaaatcctagctctgacagcatctcctgtcagacacctgtcaaaatgtaataagacacctgtgaaagggaagtgatgccaaagccacatcattttcccctacaccttgattcctaacttgcaggattcatgtcacccagcaaacagagtggtagctgggtgctgctggcactgtgccaccatttgcaggtgagggagggaagggaagggaacacaaggggtgggggagagagagagagagaagaagagagagagagaaggagagagggagagaaaaaaaaagacaacactgcaaaaggaagcacccaagcgttttaagtttagcaaatgattatgagcataaaaggacaactctgaacggacttgaattttaggattcatccctagagtcttgatcatgatcagaagcagggaattattttttaatatctgttttacataattaaggggtggtagctttcatgcaaatgaacgctttgaatgctcacaacaccaaatgggcttcattagcttagctgggcaattatgaagcaggaagtaaaaagctgagataaagacttatctcaaaaaggtctgaagcagggcgtgttgatagccaagaggcacaacgatgcattttgtacatttattacctcggaggcaaaacttctaggattctagatagctttgaaagcagtgcatacattccatttaacacccaaatgaaacaggtggaatgtttaaagatctgtagaaagtcttgaaatcgttcccacacattggaaggttttaccaaaccttctctatttattctaagtgctttttctattgtttttcaattgcttctctcatttccctcccgtgtacatttcagagaaaattggagagcttaaaatgcgactaaatataacccctgcactaagcaaacagtgaataaatccttaagaaattatttttgaagcatattctttctgatttgatttaaaaactgcaatatcacatgtgagtcttgctcaggagaaaggctatttgttcacaagacgaccaagcatgtagagggaaagctgagggtgaagggactgaatccggttctcagctatttcaatacagatgtttttctagataatcggcctcattgtaagttaaagaatcaaacataaatcagatctctcacaggctgagaaaaggcaaaacaacagcctgttcgttctgtaaaaggaccattctagttggcctatctggtacaaccaccttgtttaaaagacagtaaactgaatccagcaaaagtttattgacttggtccagaatattactgagccaccaccacagccaggcttacatcccagagctcctgtttcccatcctgggctgtgtatattcttccacgtcacctccccaggtggctggctttgagaagaagggaatcataaaaagaccagaaataacatatacaccttgaaggagttgacacaggattttttcttgatcactttgcaagccagggacctctggccagtgacaccctgcccaggcctcactcggccatgctacttgctataggagatggcccgcccacttagcccgctcaggccgagtctgacttgcacactagttcccaagttcttgtcctgcgccccagcagaatgaggatacactgacaatcaaagaaaaagtcagggagttttattgagtgatgaaaacagctttcagcagagtggggatgcaggggtggtccccctatctgaaggcaggaaagtccacccaatttgtctgagtctggggcttttataggctcagaataggggaggggcaggcagtaggtagtactcgaaaaagcaacattagattggttcaacggcattattcagaaagaatcaaccaagaaaggtcaggcaaacagaaacgcaagttctcactctgggtcgcaggtttcatccaggaccagcagtctggtctttcagccttcaggctgtttctgttggttcggaggtgggatttcactggggactcacctctatctgactaggtatttggctgcctcctactgtcctcagagtcatctgttcatcagtttgttttccctgtaccttcctttctcacaaacattccattggcagatttctgttttgttctgtgtgtttcctttccttctccccagttcaagctgaggcagacgcatggacaaagaaaaacaaactgctggctaaatacagagcagagagtgtcatggaatgtttacagaggaaatggttttaggaaccagagagtaggaaaagctcaggctggggaaggggcaggaggatgcaagagggaatgactttagggtataaaaggaatggaaacggccaggcacagtggcttgtgcctataatcctagcaccttgggagactggggcaggaggattccttcaggctaggagttcaaggccaacctggccaacacagtgagaccctatctctgttattattaaaaaaaaaaaaaaaaaggaatagaagaactcgagtccttaaagaattagggtctccatgtagagtaccaggtggccaggtgaaaacatacccaaatatcaagtaaggacacccattggccagcacccccaaattttagtccagttattacacccaacttggactggcaatttatcccctacaggtaactgaacatcttatggtctgggaaatctaccagcccctccaaacagaagatgaggagcttaaatggaatagtaggaagggggagctttaccccttgaccatgatgggtctaaataaaatgagctgggaatttccctaggagcccagggtagtgctacaaagaggacacactgcccctgaggtatactgtgttcatttgggagctatctagtcccagttttccaagacagactccagggaaaacaggtctaccttgaacaacatgagtttgaactgtgtgagcccacttacacatggattttctttcaccttcacaacctctgagacagcaacaccaacccctcctcttcctcctcctttacagcctacttaatgtgaagacgataaggatgaaaagtctttacaatgatccatttccacttaatagtaattataattcctctttctgattttctttttttaatcttttcttaattctaccaattaattttttcttttttttaaaattttattattattatactttaagttttagggtacatgtgcacaatgtgcaggtttgttacatatgtatacatgtgccatgttggtgtgctgcacccattaactcatcatttagcattaggtatatctcctaatgctatccctccccccgccccccaccccacaacaggccccggtgtgtgatgttccccttcctgtgtccatgtgttctcattgttcaattcccacctatgagtgagaacatgcagtgtttggtttttttgtccttgccatagtttgctgagaatgatggtttccagtttcatccatgtccctgcaaaggacatgaactgattattttttatggctgcatagtattccatggtgtatatgtgccacgttttcttaatccagtctatccttgttggacatttgggttggttccaagtctttgctattgtgaatagtgccgcaataaacatacgtgtgcatgtgtctttatagcagcatgatttataatcctttgggtatatacccagtaatgggatggctgggtcaaatggtatttctagttctagatccctgaggaatcgccacactgacttccacaatggttgaactagtttacagtcccaccaacagtgtaaaagtgttcctatttctccacatcctctccagcacctgttgtttcctgactttttaatgattgccattctaactggtgtgacatggtatctcattgtggttttgatttgcatttctctgatggccagtgatgatgagcattttttcatgtgttttttggctgcataaatgtcttcttttgagaaatgtctgttcatatcctttgcccactttttgatggggttgtttgtttttttcttgtaaatttgtttgagttcattgcagattctggatattagccctttgtcagatgaatagattgcaaaaattttctcccattttgtaggttgcctgttcactctgatggtagtttcttttgctgtgcagaagctctttagttcttactaatattttcttttctctagcaaactttattgtaagaaaacagtatataatacatacaacatacaaaatgtgttaactgattgtgttatcagtaaggcttctggtaaacagtagtcaaattttgggagagtcaaaagttatatgtagacttttgactgcctgggagtcagcacccctaacccctgtgatgttcaagggtcagttgtattctgttagctcaccaatgtttacctgatcttacacttgtcctaacttctaatatggaaaggataggccaatgatatagtagagtgcttagatttgactgttgaccactggctctcaaagcctctccagtataactgcctctgcctcttcaccccatctcccactgtgcctaaaacccaacactccagccaaagagtaatcatgcgctgttgcctgaacataccccatacttgtctcctactagtctttgctcatgccagtcttcctacctcaaaggctctccctttgctctgtttacctcttgataacttatccatctaccaaccaagaatttttaacatctgaaatgattcacaaatggaatgggatgggctcaaacgataaaaataataatggctaatttggtgtcaggaactgtgctaagcatgtggaatacattattctcataattacctaagagggagctataataatcctcatttcatagatgaggcccaggagggtcaaagaacatttccaaggtcactcagctgggattctgacccaatcagtaggactttagagctgggctgttaacctgtaccctctatgcctctaatggtccttctaacactgtgaccctggcattttataatgtaactgtttctccccagatccctttctgaatgcccccaatgaggtgtaagccctccttactctggaagttatctcactggcctcacccgacatatttacatacttttttcatctcaccaaatacagatggtccctaacttcaatggttcatctcaaatttttttgactttttaatggtttactgggagtattaaatgcattttaactcatgataagtttattgggacacagctccatcatatgtcatagagcatgtatactgggtaagcttcatgaaagcggaaactctggctgatttacccacaatcagactgtctgagctgcagcagatattaaagtatttttcgtgaatgaacatctttcatgcttcacacagtagaagtgctccgtaaatggttgtggtgtgtgttgaattctgttcaaacaattatcaggaacaacagtcacagtttttcacagtagcacactggaaccccctttcttcactgtgagtgctgccctgaccctgacaatcaggtcaactggacagtctgttctcaccagtctcaatataggactgaaaagctatcttctccaaccaagttgtttggatcacctgaggtcaggagttcgagaccagcctgacccccgtcaatatggtaaaaccccgtctctactaaaaataaaaaattagccaggcatggtggtggacgcctgtagtcccagctactcgggaggctgagacaagagaatcgcttgaacccgggaggtggaggttgcactgagctgagattgtgccactgtactccatcctgggcaacagagcaagactctgcctcaaaaaaaaaaattgtgattttttgaaaccattaaattcttcactggtgtcatggtacaaacaaaatcacttgctttgactcttggccaagtccagaattgtgtcattttaaaaaactggtttttaaaaatcctaagttgtttccacctgcaggcataggcagaggagccttcgtccctcactacgctgaccccgagtggttccagtcccatcattccagaaacccctctctggtcttgtatcaaaaacaccacaaatcactgggattgctctgtcatggggtagaaggggctcgaggacaaagtttagcttaaaaccagagtgaatttatttctattacatatggttaaatcatgacttcttttctaatccctaaagctaaacagtagagtcatgctggagacacaccatcatctatgtcaatcagacaaaattaaaacagagaccaacatctccttgtttcatttaattttgttctcttgttactgcatgtgtgacaccaagaaccacttgacctttggacaaaaaagtagttatatataagccatgtatggctaaggtcctgttttcacaggccaggaacatgtaacagctctaattcttgttgactctatttctgaaatagagtctgaatatgtacacttctttctgtctcaaagtctaccccctaggccagaccaccattgcttcttacctggggaacagggcagtatctgctcttaactgacctgccggcccccgctccctattctaatcctttctgtatacagccgccagaagggcttgacacaaatgtaaagcagggaaccctgaccctgtgcttcaatgacttttcaatgcatggagaataaccaagcacattacctggcctgcaaggccctgcataatgtgatgtggcactgtacagatggccatgtccacctcgggccactctccctcacacctcctgcaccctgggctcactggcttcctctcacacctgagcacttgctgctcctttgacctggagctctcttctttcagctccccaggactggctcttgctcatccgttaagtttcagctaagtgtcaccttcagaaagtcctctctacctatgctttctacaaaggtctctgccttccctcacccaccccatgctattttctattacattacgtatttttttcttcctgctcctttttacacaaactgcaatgattgtctttacgtattgacttacttatcttcaattttccctattggaatgtaattccatgagggcacagcccttgtttatcttctttggcattgtaccccctattaacctgcaacacatcacatggatgtaaacagtatctgtgcaatgaataaattaacgaatgccaagttccatcacattccaaggtctgtcattacctgggcccctgccatcctttccagccttatcaaccagcgctctcccacatggacaattacgcaaggcacactgagccacttccttcaggaataggtcactttttcttgcctctgaaattttataccagctgttgcctctcgctaggatgtctttcttcccttcctcactcaagtctaattctgctcaaggatcagtttaattgttacttcctctaggatttcaaaagaatttttgaatgcaccaaggcaaagttaaatgtggcaacaatctgtcagaaaagctgccttttggtgggtgagtcccagaagtacagaaatcatggctaaatcgtacctttatcttcaatacaatacctggcacacaataggtgttcaataagtgttaggcaaatgagtgagtttaactaaattataacttcctgagaactaacaacatctcaatcactacgctcagtatagattgaggctgagggccgccaatgttggcagcagcaaagcctgcttaaatataataactacagctgcattgcacagaagtccagttagtgcagaagcataaagttttgagggtgtgtgaaaggaacaaagacaaagttcaggtgagacatggaagcaacgagaaatgcaacatggggcgagtaagccagcactttctgctttcacttctatcactttggaaacatttagtccagaatgatctgggggttcttacttatggttctaagacagcctccacattcctcagcatgtccagtcacaatcaccatctccccaagaaggcacaaagtaagcatctgtaaatccatagttggctattttggaaaattagtgttaaataagaataaaaaaaaaaaacccttcacctttatgtgtaataaagcactgcttaacaatcaaggtcacccatgtcaataacactccccaagcaaagcttcatatctttttaattcctaggctcataaagaccattgtcacttacatcattacaggattcaagggagaataacataaagagaatgtgcaggataattttcaaaataaaagagaaaaaaatgacacatctacatatcaaaccacacaagtcccgtgtctgataaaatcacaattatagatttggtgcatttaaccagtcatacatgccatgcatttgcgaaggtgccatatgggggagttgtggaaagtcaaataattcctagactttttctttctgagcacatgtgacaatgaatattatttacccctgtagtatagaaattatgaagcttaagaccccattgcttctttttaataaaagctaacacatcacagcttactgcttgacccagctccttggtctttgcacgttctcctctctgggcagctctctctcagttttaccccctaccacaggaaaggagacagctgtgtttctagacttgacagacttgtttttacttgataaacacattgtatattgtaggggagaaaacgatcacccctattcccctccttagttcttatgtgggctctttggcccgatctaggaaccaaattgacacaacacagattaacaaagaaaggcgtacacattttattaattttacacatacatgggaatcttcacaagacagtgaagttcaaagaagtgaccaaagcaacatgcttttacacgttttagacaaaaacaaacaaacaccacgataaatttgtgaagaaatgacaggataaaaagggatctggctagggaaaataatttctatgggagtgaccaggagctatatgaatgtaaaacaagtagaaggtaaggattatttcaggaagtttatttgctcagacacattgcagcacctaatcacagtctccactgataaggaatattctcttacccttgtacggagaaggcagccctcccaaaagaatctttatggcttgctacgtgtagaaaaagactggtcagttagccctctgcaattatactttttccaacgttttcagctcgaaataatcaacataccaattcgcatattctgggatggcatgtccttcactgcttcaggaatatgttttcctttgtgctttacttggatattaagttccaaccaattttaattacatgtcgcttgtgcataatattgccacttctaaaaagcagatcactttctgagttagaaagcttatctgctttccctccttatagacacttctgaagcagaaaggaagtaattcctatgctcctatcagatatgggctcatatttctgtttcaaatttaagtctgtgacccctacatgaggccaggattttgagaagagtgaggaaggtagactctttttaaaccatgccacaggcaaaaactcagaactcattttggggaggaaaaaaagtcctatcaaaccagtatactataaattaaacaatgtagcatcaaagataacttttcctttagttgttacccctgagtggtcacgtagccataagaaaatcacctccttgtcaacacatcatcaatcaaccagtgttcattaaataccaactctgtgctagaacctgcttggtataaagaattctattttgtgttcaatgtgtgcattcagtgctttgattgtaattatctttgaaatgacccaaatcattccaaacaactataagtgactttatattcagaatagcaaaaagctgacttgaacacacaatgtaaaagtcttgaagagagagtgaattaaacttttttttttttttacaacaatcagtgggcttatagaatagaaagagaaagagggggagaggtttttatcttttagaattgcaatgcagtgaatagtgatactagaagaacaatcaccaaaagattacagatgagaacttcagatgaaaataacaatgaaacaaagcaaaattcaattaatggccttagagaaggtgagatcagaaagagaaactgaaagttttttagacttctctttaagacagataaaatttagaatttttaaaaatccataataaaaaccagaacaatgctacctcgccaaagttgagttcaaatttagtcacttcagtcaccaagaatccaggaaacttagttactatgggaacagaggtcctcctcttcagaaaggagggcagtgtttctttcaaattccaccagctaaattcaagatcaatgatggttgtttaatatcctctcttgaagctcttactgtctttagtatactttaaaataaaataaaaactcaacaataatggagctcaattaagcataatttgtgtgcttcaacctttggctgggtgactgctctgtaccgttcacacttgtactgtagagcattgcaatttttaattaagatcactcattctatttcccctgaaccaaccaatgttgaggttattgtttggatacaaaactctccaggatacggcttcacttaacaaggactttgtttctttcaagtaccaggcactcactggttctgagtataggctgcctgccctactttaaaatgcatctcaactttatttcagagacagtaagatttcattgttactctacaggacttagaaataaatgcatgcatgtactcacacacaaaatctctcgataattttgcatataatacagtttttgtgctctatgccaacaaagaacagaatgtttagtaaatcacagagaaacacttttatttcttgagactgagatatgtgtggcttctctacttttctaggaattacatttaaaatgtaagaggacaagacctcattcaaccttttatgcctactttagtgatcagggtgaaacatataagaatattgcaacaccaaagctgtgtgtcactactcagctaatggtacctataaagaaacttctcttaattagctttaccctgaactaacttcctttgctctgccatgtataattaaatatgttagcaagacagaaatgtgagatgtagcagctttcacacccaaatttccgactccaaatttataaaaagtgtggatttttttttagttgaaagcccatcatgaagtattttacttttactctaaaaactttcaaaattacattaaaagaagaaaaagaaaatgggcaggaaaattagtaatgagagatgaattttcagagaaaagaattctacagtagtccctcctgatctgcagtttcccattcagtgctttcagttacccttggttaaccatggtccaaaaatattaaatggaaaatcccagaaataaacaattcataagttttcaactgcaagcagttctgagtagtgtgatgaaatctcattgtctctcactctgtctcttctggagcgggaatctttcctttgtccagcatattctggctgtatatgccactcacctgttagatacttagtagctatctctgttaccagatcaactgttgtggtatggcagtgcttatgtttaagtaactcttctcttacttaacgatagccccacagaagagtagtgatgctgtaaatttggatatgccaaggaaaagtcccaaagtatctcttttaagtgaaaagtcaaaagttcctgatttagtaaagagaagtcatatgctaagggtggcaacacctataggaagaataaatcttctatccatgaaactgggaaaaaaagaaaaattcatgctagttttgctctcacacctcaaaccgcaaaagtttcaaccacagttcatgataagtgcttaattaagatggaaaaggcattaaatctgtgaaaggaagacatgaacagaaatgtgttcgttcctactgatggcaattaggttcggtaccatctgtgatttcaggcacccactgggggtctttgattgtatcccctgtggataagggggtactgttgtatatcaaacaaaatctgaggtgcccagccaaggacagtgctgcttcccagaagagatgagactcccctatcctttctatcttcccaaagggtgcatgtagtgtacgcccattggtctctccctttcaggagtgaatccaaaagccacaatattgatggacggcaggaaacgtccagtatctgggctctgaagaaccttgaggatagaatccagctccaatcatacagttcctctgtatggataccttaaacaaaagtgtattttatcctttttaatttggcatcccttagaaatgtgaaacttccttgtgaaaactgctctttaaggaaacgaaacttttttattgtaagccttcccattgtctgtatataattaagaaaagatcagtgatagttcacggtggttttataataggtgaattaatcagttttaaaaagctgaattttacatgcatttgacaaccaatctgggcactattttcctaggaaaaggctcatttgattaaataaattttaacctttaaaagctttaattcttttttttttttttttttttttgtacacaaaggactcttttgtgatggttggatcaacttacacatccagagcacatgtgcatagataaaactttgcagtaaactatcctgttacagatagcttttcttacacataaaaatacattctgatgagcaatctaggggaaacaaaactaaaaaaaattaaaatacagatatacaattcatattctaatcttatcagaataacctactgttaaaacacaaactgaggcaggataaaattttaaagagtttatttgatcgaacaacaattcatgcattgggcagcttctaactggaagtcattcacgagctccacagagggaacatgatgggtggacttttataggaaggtcacaaaagtaaagcaagtcagtatgtgactggttatagctctataattgccttatttgctctatcccattagaaagtcactaaatatatatacataagtttgttggctacttccaactggacaggcttaagttctgttttcctttaatataggcatttgcaaggaatagcttaagtttcacttaagctttgcaagccaagcaaggtttaggtcacttatgaggtctgatatcatctgtttctttcaggcctagtctccattttaatttactttaacactatccataagaatattaaaaacaggcagcagatatgcagatattttatcaatacaaccttttataaatacaggaaagaatagtgttgacagtctaaatttgcttccttgaggcattatctgtttgaccagatttaatcatttaatttgaaacaaagaaacaaatactactctggggttgctgtgaaaggacattcagagtggacaaaacctctttaaacttttcttcaaggtttcatcttcacatatatgttagtttggttactttgacagattggtcaacttaatccaatacagttttatgggtccggaaagtgctttgcttgactttgaccgtatgtgtcatgtcagttaagttaaaagctaattcaatgtgtccacttcggggttatttccatcataaggcattatgtttttacttgggttgtatgggggagttcctctgaattgactagacagatgggaggtttagacacagtttaatattctgtacttgcagaagcaactattgagagctttgattacaactaaattcaagctagctcaaaagttggttctcagccatttaagtcaaaaggttaggtaatgtcactccctccaggggttcattgtccagtttttctgtgtattcattttgtttttatttcatgcctatctagtacccacccctgtgtcccacctatgcctgaattcttactgtgtaaactcttttggatgggaaatgaccagctcctgctactgaccacagccctccctcttgccagagcctgaaggacaggggactcctagctcgacagatcatgctaaaattataccttgtgcttagcatttcttggcctttaatcctgtcccagttacttctctttttttttttttttgagacagagtctcgcttttgtcgtccaggcaggagtccaatggcttgacctcagctcaccacaacctccacctcctgggttcaagtgattctcctacctcagcctccccagtagctgggatcacaggtgtgcgccaccaagcccagctaattttacatttgtagtagagacggggtttctccatgttggtcaggctggtctcgtactcccgacctcaagtgatctgcccacttcaacctcccaaagtgccaggattacaggcgtgagccaccatgcccagccattccttctcttttctaagatttgagttctcattgttaatctggtaattttctttttcacaccagataagcagagctggtttctgcattgctaactgggagcttcctaactaaaagagcctcacaaacagttaattctgctctagatgctgtaaaagagggggacgggggtaggggcagggagagagagagattacagtgataaaatgaaaatgctgtttcagccaggaagttttttctcccccatctcatatattaaaatgggcctgattttctaacttcagcataaaagcccagtaagaaatattagctcttcagttaatgtcattcacacaaggaatttatcagcagagtttgtgtttgaacttttcatgtcatctcacgcatctcagagggtattaaactccataaaacacaatcccaaaagtgaaatatttcccacttttactctataagtgagtcttagggaacggaaaaaaaaattccatgtctggcttattcctaaagagagagtaaatagagatatttcttgggccaaataatgagaagaatcacaacccttagggtttatgttccaaaggcctccaaatcccaacaggtccagcaaagcagaacagagaaaggggctgaatatacatgaagagaataacagaagcaagtggttaatggtttccttaaatgcggcagaaaatggcttatgtgtacctaagtatcctatagtactgagacttaccaagaagaaaaggtgaaaatggaacttgaggcccctggaagacatgttcttagctttgcctgctggctttctgcataaatctgacctttctgcaggtgaagttcttctttacagcccagtttctcctcttagttggctactgacccacagtagcagccaaaattaaaccaatgatgtatttctcgtacttccccaaatcacttttctttaaataagttaataataatccaaacttgcatttttcagctgagtgctttgatacttgcttctcaaaaaactacttggaaggtaaaggagttttcttttcgagacctcgatcagaaatactccatgattcacgcactcagttaggcctaaattagcccaatgttatggctataaaggaaacaggaaacctgtgttccagggacaatcttcttcatcactctattcccagcgtcctctcatatgaggacacggggggttgggctacctccatagaatgataataaaagtttgcctccaaaataatttggaatttttgggttaagcatcaggacatttcatatcatgtaatatactaacattcagtataaatctctaagcagggtaagtgggctcagaataagtcacaatctctcaactcatttcaccatcttgaaaatttcttccatggagcacaaagatgaactaagtaatcaccacattcctcgcaacatttatactttctgatcaggacaaaatgattctaaggagtgattaaagcagggtaagagagtcttctcaccctaatgaatccaaagatcaccaaatagacacccagtttatggcttagtgatgtaaaacaggtgtgattcagagccaagtttacgtaagttcaaattctgtttccatctttggtagctgtgcattcttggataagttacatcacctccgagcctcagtttcttaatctgtaaaacagacatactaacatgacttcatagaggtgtttgaaatagattatctaaaataagcaccaagtgttacatataatggttatttcagttattcattgatttaattcaattaccattaaggttgagacctggtcatcattacccagttaaggaaggggtttgacataaaaaccactcaagatttcttcccactttaggactttatgattgcctttaatttttcatgtttcaattatgtaactaaaatcttctattccatatatatcagaacacaccccatctaatctctgctaagtgtttctctactctgcctgtcccatgaaacaattcccaaagcctaggagagtctcctgtgatacagataccaaaatgacgtgggtcagaagtaactcatacatccatattgtcagaggtgaactatacaaaatactgagtacactacagagtgatctgataggccaagaagaaaaaaaagtaatctgatagaccgagaagaaaaaaaaagtatatgttgtttctctactaaagaatgtcaccgcatattgatttttctagtcttttacaaagactgtgttcagaatttagatcagtgttagagaaattcacttataaattcacatatacccgtatataaggatacagtcctgtatctaaggataaagtcctagcttaaatctggaatgagtaaaaacaaagtgtaaagttaaaaatgcccctctggtaagacaaacatatgcttttcacccaaaggtgcagttaaagaataacaacaaaagttggtagtgagatccctctaaaaccactgatatataatagactcctactgacaccctagaaaaatgatgccaacccatgcagattagtttcttccagcaatgtaattacccatttctttggggctatctttccttcaatggtgatttgagaaatacctttcatttatactccattttgcacaaataaactacatttaaagctctataattagctgtcctttgctactgtaaaattcagtgtttttgtccaaaaggaacagactattgatttacaaagaagctgaaatgctgtcaaactacccactgaagaagtaagaaaaaagtggtccctatcttggctctgcctctagactagctcttgtcctacctcagctttgtatccacataccgagccttctgttaaggtttagacttgcacagccaaggcctcccaggcatctccccattgacatctaagagacacctcaaattaaacatccaactctttgcctgaaacaccgttccttaagggctttccagattagcccttttttgcctctattatttgtatctcttaaatgcttactattgcaagatgtagaaaatcccaactaaaacgggcataaaccataagagaaattattgtctcacacactaagataagtggctcagtgaagctaagtatgggattatttctctttgctcatgaaagcatcaatgtgtcagttgggttcaagtacaagaatcagaacccattctagatattttaagcaggggagatttaatacagcaaagttggtgctggagaaataacttggagggctgaaagtacaactctaggtagagccttcagtaaggactcccagaacaatatcccattgacctcatggaacttgtaaggagccactcctcctgaagctgtcttggagccatagtaaaatcaagaacttgtcaccattacaactgactctactaatgcaagaaaccatagaatgcttatctgtagctgtggtcccgagtttcagaagcctgatcatagcgctgccactgctgcttctgccatcccaaccatttcgtaaaactcagaaagctggagagtgggcagaaaaacacgactgcagggaacctggacattgccacagctacgtttaccagcagaaacagccaaaggagggctgaaatatggcctccacatggctttcaccttccacacatcacatatacacatctaattggagaagactttttttgaagctggctaaaagagaatctgagaaatgatgcttttagttttgcaacaactttaacttgaatgaggatagaatggaaactacataaattcatctagagcatacgaaaataccagcttcctgggtgagtctttacataggagcatgatggaagcaagcagcaatcaaggctgccacagcctttgatatgttctaacagtagagaagaaaaaaatctctttcctggctatggcatagaaggccttcctttactccttatggaaccactttaagccatttgctgactcacagtcgaataccactgaccatggaatgctatgggctgattggctcagatggacaatctgttgagtgtcaaccacagtgtagtctatagtgtgcctgcttacataacatctaatcattgagggctttcctgaccatccaatctcaagtagcctcttctcctgacccatgaattctgtgtctgcttaccaataggtaagtcttcatggcacttaatgcactctgaaattatcttgccaatttacttatttgcctgctccttatctcctttccctactaagacgcaagctctgtgaaggtaaggatcctgtctttttcacgtctgtatccccaacacttacagcagcatgaaacacataccaagcattcaataaattgtttaatgcataaatgaataggctataatccatgtactacagaaaccttaccaataaaatgcttatgttcttcccagttaggccagcttagcagtttatttaaaaggggatgagaaagagagagctgttcaacgtgtgtgtggccatacacagtgaatctactaactggttagtcttttgggattcagtgttacatctactatgcgccagtcactgtaccctactattagcgatgcataaatcagaaatcttggcccaaaggaggactactggtacatgaagattaagattctacgatgacagctgcattggaaaacagtatcatgaaaagtgttttggagacgggtgcacaacaatgtgaatgtacttaacacttctcaactgtacacttaaacatgatcaatgataaattttatcattgggccgggcgcggtggctcacacctgttatcccagcactttgggaggccgaggcgagcggatcacgaggtgaggagatcgagaccatcctggttaacatggtgaaaccccgtctctactaaaaatacaaaaaaattagctgggcgtggtggcgggcgcctgtagtcccagctactggggtggctgaggcaggagaatggcgtgaacccgggaggcggagcttgcagtgagccgacatcgcgccacagcactccagcctgggcaatagaacaagaccccgtctccaaaaaaaaaaaaaaaaaaaaaaaaaaaaaaaaaaatatatatatatatatatatatatatatatatatataatgttatatgtatcttaccacaattaagaaacaaaaataaaaataaaaaatacattataaaacaagcacaaccttttatgtaaattacttacttaatcctcataatcagacaaggtaaacagtatgaatattcctattttaaaaattctgacccagtaaggttaattagcttgatcaagtttatatagctacttaggagcagggctgcgactagaatttaaaaatctccaactcctaagatcatgagcacacagatacacaaataagcaatagcatcatgttttcaaacagtctggtctcttccctggctctgtctgaatgacagactctcccattgtttcttgtaaacaggcaattaattgtacacactaatacacagaaatggcccttaaaataaggaagaacaagagaaatccttttttttttttttttttttttttgagacaaggtctcagtctgtttcccaggcctgagtgaaggtgcaatctcagctcactgcactcttcacctcctggactcaagtcatcctcccgcctcagcctcctgagcagctgggactacaggttcatgccaccaagtccagctaatttttgtattttttctaaagatgaggtgtcaccgtctttgccaggctggtctcaaattcttgggctcaagcaatgcacctgtctcagcctcatgggaaatcttgcactgatgggctaaacttattcaaaaagaaaaatcttccttaaaattaaaaatgaagagtaatagcaattgttggaagtgtactgattcaagggtatccaggtcaactgacagaagagagaggccagaaaggaatcatagtatactgaaaagccgctgtctgataaaagttggcaaggcagattctaggaagaaagagctcttcaacaaacaatggctaactatttaaggaaaatatgttacattgttttctcatctcatgtcaaatattaaaattaatcacatgcttattaataaaataagagcagaaaattgagccatattatacacagaagaaacttttatctggattaaaatagattttaagtataaagatcttaaaacaaaatgacaaaggaaaaaatgaaacataacgccccagaaaattaaaactttcagctccccaaagccattatcaataaaatgaagtgaaagaatagggagaatatgtattgaaaaaagtattaaagacgaagagctaacatcttcagacagagtgctattcaaatcaatatggtacaaatcctttattagaaaactaaatttaaagcatgagtagttcacagaataagaaatatatgtggttaactaccatatgataaaatactcaacttcactatattcaattaactacgattttaaataataaaacggtaattttgttggaaaaataggcagagtattttcatttatattcaagtcttcagaggccacaggtatatgtcactataagggaaaattggcctacatatcaaaatatttattcatagcgttctggcaacttatgccaatgtaatgatcagagacccacacaaagattagttgtaaaacatttgtcacagttttatgtataaccataacaaaactgtaaaaaactaaatgagagaacaaattctgatacacaaaggtgaatacttgaaagacattaagaaatcaggttttcaatacttcataaaatgaaaaagtattgacatagtaaagtataaaaaagtagaacacaaaatgtacaaacacgaataggtattatgtgcatgtataatacatatatattataaatctacaaagacctatccatatatgcatatatgcatttagataggaattttttaaagcactggaaggaaatttactcaaatgttaatgatggttatagatgagaagttgaattaatgttaactcttctctttatttctctccatttttcaaatattctttaataaattggaagtgtattagaaaacatccaatgatgtcatgaacactcattccctagacatattaaatctgttagcgttaactatagactagtgtactatgctaaggtgttatgacaaagaaaaagaagcagtagacagatacaaagacattcctgacattaggagaacttctggagaaagagacacatgttggtacaaaggctgtaatgtaagtaaagtagaaatataaacaaaaaaagcatgagaattatattgtagttgaaagccagaaaggcttcctggaaaaggtggtgtgtaacttttatatgaaaaagctggagccccatctcatggaacagtggcacaaagtattctcgatagcgggcatcaccatttgaactcgatcctcagccttcaataaaaatcataaagcccatcttcagagcccctcttttcttgcttctccataaattatgtactttcctcttttctcacctccttgagatactgtttacctaggaatgagacaattcattttttacagcccatcatgaacaattctgaaaaagaatcccctcattcattacaagacagtatgaattaaagctcaagaatgaactcttcctggcatttctaattaaatatgtagtctacctatcctctaatggtgaaataaaaagtagccccaatattaaagcaattccaaggatcaagcaagcaggtaaggcagattggccaagaaggaagagcaaggcactgagaaatcacaccatgacgcaaatgactttctctgttgatatgaaaattttttcctgccataggtgatgttgatattctaacaattttaaaacacaaaaaaattaaggggagtaacaaaatttcccttctattttttgagttatttaccgctaacaatctcccctctagaaaaagttacggaaatattgtacaaaatgcaccatgggttaaaaaaatgatttaaatacaggaaataattgttattaaatacatcttctagggagatccactctgtcccaatccttaaattagaaagtcagcaaaaagatgaactgaatccctgatgttaattgtacaggcttactggattagaactagagataattaattgctaaattttaatatgcattggactaaatggctgataagatttccagtagttggcttgaattccagaagggaatgattatttcttccccggcctgggagccctacaagccgaagacatttaaaatgtctgtatttggaatgaaagaagttgggtaaatagtagaataggttacagaatggcaaaaacttctagaaagaaaatatggaagttcaaattgccttttcccatttgaaatttagaatataatactgtatagaaaagaggatttaaatttttttatttttattacagcttcagtgattagcattcctgtactataatgtcaatattaaatccagacagacccaaagtctattacttcctatctaaaaaaaaaaaaaaaaaaaaaaaaagacactgtttatcacctaggtaattatattttttatgttcttaagaatttaggagcttgctatggttaattgggaaaaatgtgaattatggttaagtcgtgcctttttttattaaacttgtaacaaagcaaatgatgaagaaccaacaacttgccaatgctgagggtccagatgaacagacgcgcagagaatgcagatgagctgattccattaaaaagttggctgcaagggtagatgatgaaggttaagaagatgtaggactatagaggccaccagtgaaaaggaaaaaaaaatcccctgcttcctctgtacaaccttcaggatgttcaaggaggaagaaagaccaccaactgcagggtcagtacccagatgccttaggatatccatgaggctgtcaggcaccagtgaaaatcaggtctggttgtgcatcagaatcacctgtggagtttgttaaaagatgggattctgacctccattcttgcaaaatgctgatgatccaagcggtgagtttgagaccaaggatattatttatcttttaacaaacctcacagtaatcgtgaatgtacagcaaggtgttataatgtattttgatatcttattttttagagacagggtcttgttctgttgcccaggctggagtgcagtagtgcaataatgtctcaccgtagcctccagtttctgggttcaagcgatcctcctgcttcagcctcctgagtagctaagaccagaggtgcacaccaccatatccagctcatttttaattttttttttttttttgtagagacagggtcttttccaggatggtcttgaactcctggcctcaaggaatcctcctgcctaagcctcccaaagcgctgggattatacgtgtgagccactgcacccggccctgttttaattttttaaatttaacttttaaaattcaaatataggtagcgttttggtaatctcttattttaatctgaatgatggaatatgtcaaggggtgactgacagtagggaggcataatactgtcaggagcttcctacagtgctttcttcaattactttagaatctttggtctccccagaggtaaagtgactcgcccaaggtcacacagtgaattaacaaaaataagaaacgaatgctaatattagaaagtacatacctcctataattacttgcttgggcaataaactagaagttagtaaatattaagaacttcagggtccgggcctgtaatcccagcatgttgggaggctgaggtgggggcggcgggggggggggggtggtgaatcacctgaagtcaggagtttgagaccagcctgggcaacacggcaaaactccatctctactgataatacaaaaaaaaaatagctgggcgtggtggcgggcacctgtaatcccagctactagggaggctgaggcagaagaatcacttaaacgtgggaggcggaggttgcagtgagctgagatgctgccactgcactccagcctgggcaacagaggaaggctccatctcaaaaacaaaaacaaaaaaaacntcagggtcattaccctatttcttcaatttttaatttattttttatttttgagacagagtctcactctgtcatccaggctggagtgcaatggcacaatctcagctcactgcaatctctccctcccaggttcaagtgattctcctgcctcagcctctcaagtagctgggactacaggtacctgccaccatgcccagctaattttttattttttgtagagacagggtttcaccatgttggccaggctggtctcgaactcctgacctcaagcaatctgcctgccttggcctcccaaagtgctgggattacaggcataagccatcatgcccagcctatatttctttaattttaagatgcctattttatgtttttaacataaataaatgaagatgcatcttgtaattgatatgtttaatatggaagcactcattttttccaaaatatgaaatcagtggtgtacttacaactaacagcattataaaatccaggatatatgggaggggtattgcatatttattgtttctttgaaacaaggttttctatgaattaattttgtccctgtatgggtactgtcatcgtgtcgggtaaggaaatcaagactcacctgtgctagaaacctggaaataaactgttggcatatacttgcctcctatggtcagcatctaaccactcattgagtactggtgactcaatttctacctcttcaggcttttttcccttcccagttttaaaacttcaaccgtccctccagtgtagcactaatcaaatctaccacagagctgtcacatttatcctcattaaacacatacttgattccatgacttcctttttataaaactctactggctccccagtgctttcagaatcaagcccaaataccatcaaatggcatttagggtcctgtgaaatctgtccttaccctgcctttctggtatcacagtcatcagctgcttcttccctgcttaaaaaatcagcctaatcaacattcctgaagcttacggcactgttaccacatttctaatagtttaaactttcaaggcccagcttgaacatcacaccttccaccaaccttttccagtcctctcattaaaatcaatttctcccatctcagcattcccacaatatacagcacaatgagcatgtagtcttgcctgatgtatgcctgtctgtccacccaactggacagtaaactctctggcagcagaaactgggccttaatcatttcagtttcctccacagagatcagcacagtgcctgcacgtagtagttatttgctaagcatgaaatctttaacaaagccagaattgattctgaggcagggttaaagatattataaataaaacttcactgaactgaaattcatagtcccatgcagggcacctgcatatttttattaggtttcaccatggaaggcataattttaggtattattatgctgatgaagcacaatcttcctgctccaacttggccaaacccagggaagcaatttcctatttgattaagagtacgacagcagcgaggactggagtataaaaatttactgtagggttgagaatgtaagcttaattgtggatcaaatgggaaacattctaaacagcattttttaaaggaagtatttgaacagcctattttaaaatattcaatatcatcttcagcaataggcaagttttggaaactagcaagtttcaagacaggtactcactcattctctcttctgcaggatcctaaagatggtcctggggactatcagttacttaaatgtctcaggttattaattcttactttaattatatctcagctaagtgattttttttttccaccatttgctcacatagcagcgaacaactttacactgttatcagtcttcacatagcagttcccaaattttgcctttaggtttatatcatgtgcaatgagttttaaaaggctttctccacaaaatcataagagagccttaagagtttcattctctgcctgacctcctgaaaccctcaaaagataattaaagaatcatgaaatcttcttgtgatttcatttaaaaaactttttttaaatcattgatcatgtcttcattctactaaaccatttaagaagtgggcaatttaaactacccctataatggttcactagcctcagcaatcaaggctgtaagaagacagaagcctatgtccaacattattattagtagtaattatctgttacatattaatgctactaaagtaaaatgtgatctatatataatcgataatatgactataataatgtatataacaatccaatatagtttccccctttatctgctgtttcacttttcatggtttcagttacctgcagtcaactgcagtttgaaaatacatgtgtacaggccgggcacagtggctcatccctgtaatcccaacactttgggaggcagaggtgggtggatcatttgaggtcaggaatttgagaccagcttggccaacatggtgagatcccatctctaccaaacataaaaattagccaggcgtggtggtgcgtgccagtaatcccagctgcttaggaggctgaggcaggaaaatcccttgaaccaaggaggcggaggtggcagtgagctgagatcatgccattgcactccagcctgtgagacaaagcaagactctgtctcaaaaaacaaacaaacaaacaaaacaaacacacacacacacacacacacacacacacacacacattagccctgtgcctaatgtcacagtgccatcccttggtcccactccaacaactatgtatgaaataaacctgtgatcctatcagtcatatcccttctccaagcctccctttctgaaactctatgcctctaattctatgagacatttcacaatgttgtatctacagtcaactaagaaataatatatttgggtttatttcactctttgctcaaaccaaggataatttatcaggcctgctaagtataatctgctttcctaagtattgtgagaaatatgaaacagactacacttgcaaatcttaaattgtgatagaagaaatgagagaatgcacaaaagttttcttttcttcagaagagaaattgcaactaaaaaaaaacgcctagagataataaaagagacgttagaaagcaacacacaactgtcaactcaaatgtactgctaattactctagaaagaagtgttcagcattctaataaaaacattatattagtataatgtttgtcattaacaaagagttgcttacaaccacatcaacagataagatcctatgatacgtgttgtctggggcaaagcagggaattgtgggaaatgtaaaacaaatttgtgttgaatcccggccctcagggaacatttgagttcatgaaataaaactaggaatcagaaagactgggcaagatttgttttgctaggaattcaggatacatgaatccatgaggaaacatgaacgtcttggaactcgaacaggaggtggtggtaaaaatctaggagttaggtaaacagtgtctagccacaagaacagaggaggggtttaaacctctaagagatcattttatgggaaaaagcagcccctcctgaaaacattcaattcaggacacgaaggacagatagacactcagagcctcagagaaaaaagtatctggtgaaatctcttctagaaactttggctggggagagtttggaatgttgacttaaagacccacagtgaagtctagaaaaagatagaggcagcttgttacaatttacaccaacaggaaaccatttagaagggaagaataaatgttagttaaactttaaagattaaattacaaatttactcaagtgattttaacttttactgcacaagtagcaattttaagtcataagggatctgaaatgtttccagagttttaaaatggactgttttacacaagtgaaaaaaagattttggcttctagtgctgagcacagagcaatcctatgccttgtaatgggctggtataattgtgcagtttcattaaaataattttattactgacttcctagttttctgttaattatcatttcagagtaagaaaaactattacttttaaagcctatattaaagtaggcttaagcaagcacggaaaagaaagccagtgagagaaaatataaaaagaagctattaatattaacagttacagttggacacttgttcatttcataaatctttgcagtattagcaagattgatgagaagtagtacaaatgagaagcacatgagataagcgatcatttgttatcattactgaaatataaagtatgattcagtgtttcataatggatgttaaacttgatttaacatatggttggctcatttgctgaaaactatccttaaagacataaactcattctaaagtcaaagacattgtcttaataacagtctctgaattatctttctataagagactgagtaacctcaataaatacaaacttagggagaagttgtgaaaaggctgttccttaaggagaaaaaaagcaaatgtgttatatactctgattcattaaacatattatagagaattctaaaatatcgttgaaagagtaaagaattaatgtgttttaataccaacacagagtcttttgaattgattttcaaatgatgagtagagaaacccaatcactgctgtcagtgcttcagcagctacctaagaaatcctcctttgtcaacttcatttctctaatcatgagagaacgccagtgcccactttaagtttagtggattaagcagaccactgcaagtgctgctaaaataatttataatctatcattatacttcagtagtgatagtatactactgaatgagaatacactggattctcattcaacctggaatgagacacttaaaaatatttgttacatgagtatattcctatccacgacttagttttgtctgaattctcacttccattaacagaaatgcactaaaaatatatatatatatatatatatatatatatatatatatatatagagagagagagagagagagagagagagagagagagagagagagagacagagagagagagagatacaaagtctcactctgttgcccagactggagtgcagtggcatgatcatggctcattgtagctttgaactcctgggttcaagtgatcctcctgcctcaccctcctaaagcactgggattacaggcatgaaccactgcacctggcctacattttttttaaaacaacaatttatgtacctcctagagacaccagaccagtttgaagactagccgtcttcaacagtccctgtagcaattatgctcagaaaggcttatttcttgagctagcaagtatctgccctaaaaccaggttcattaataaaatgtctatctttcaaaaaaaaatacttgaatcttctgttttccctgatgtttgtgtctttcttcatccttggatacctattcttataacacagcccatgctcatctgaaataagtgacttcaagtcagctccattatcctgcatcctgcctgcaaaaatgatctagatatggggagtagtgcttccccttgttctatacactatatcaatataagttgttagactgcatcttctttaatcaaagtgtcatctaattcacatttagccatcagaagcatgtctaccaaagagcaatgcagccaaataagctttatgcacccatccttaggttatactccttagctaatgttactcttatttggcattgatttgatttattgacaacaaaaatacccatgtttgacaccaactagccttgatgtgccactattactgactctctcgactttgctcccccaatttgtaaaatgagaagtccaagctttcagtgattcatgaaagcagagtccactgtcagcctggccacacaactagcccctgaggatcttgctaggggtcaaaacccacatattagatctgatggggccctccaaattctctattttagtaagttcccaaatgcttctcacgcatgtctcttacagaatagatatagctgaaacaatctacaatattatatactgaactcattcaaccattagctcaaaggaaatgcatgctaaaccagctgcacaatccactctgtggagaaatccagcagccactccaagaagctgacctccaaaggtcatggagcaagatggagatgaagagccagccagggtctagagttcccactttgctctcttaccagctgtacaactttggacaagtctgttaacctctcagagattaggatatcttttctgtaaaatggtggtaataaagcctaccttagagggaaattgtgcaaattaatttttaaaatacacatgtaggccaggcgtagtggcttacgcctgtaattccagcactttgggaggctgaggcggtcggatcgcctgaggtcaggagtttgagaccagcctggccaacatggtgaaaccccatctctactaaaaatacagaaataagccaggtgtggtggtgcatgcctgtaatcccagctactcagcaggctgaggcaggagcatcacttgaacccgggaggcggaggttgcagtgagccaagatcatgccattgcgacagaacaagacactgtctcaaaaaaaaaaaaaagtgtatatatacatatgtgtgtatgtgtttgtgtatatatatgtgtgtgcgtgtgtacatatatatatgtacacacacacgtatgtatatgtaatgtacttacaaaatgggaggagtagagacactcgggaggactgcatttggctttattcattgttccttctggtatagcagctaacacacagtgagtacactaaaaaaacaatgctttgaagaaacaatctaatccaactacccatgacacgtgttattcattcagaacagtttattgagaggcctctttgtgtgaaacactgtgacagtccatttgctccttcaaatctcttcctccccttctttctctgttctgtgctgcagaaggctgatctatgtggactacactgacaggccccttggtgttctggcttctcctgcaagttggccagtgagggcttcataaggataccaaatgagaggaaaaacaagaacttggtctgatctagcagaaagatcagaccaaggccccaatcacagagatctcctgtttctcccaaagtactctgttttcccaaacatctctcctactgtgttgcagtaccactccctcaccttatccctttgggcttgagtctttaaaactccactgcttaccatccccaggttcctgtactaaccttgtggttcctctaaaccccaccagtgcctctctatatcgtccctttataaagaagttctctggagcgcagcctcagttgagtgtaccctctcttccagttggaagtctgatataaacaatgtgtttgaagttagggaatacagtaacaaacaaacaagtcatgatctctcatggaattctaactactaccactgtcataacaaacagctaccgtttattggacacatatcccatacaagctctatagaagttgtatacctgaggttgctatcatcatctctgtttttcaaatcaaaaaaccaaaccttggaaatataaaacccacatgagtatcaaccaacagaatttgattcacaacagaactcagattcaagccagagtcaacccaatccacagcacacgctcataaatgctgaagtattaccacatttacctcaacaatgtccctgccaaatggatcttcaatgtgagtcataagaaattttccccaatccttctccccatgccagatctggggattttcagaaagcctagtgtgaaaattcaggagacctgaaatgtgccctcttatcatatctactcaccaactggcttgtgagtttcctcctctttgagctaatacctgcagggaggtgcgcgcttccgtaactagtggcctttgttctaaccaccatctctgccatttttcctgtgaaatttcaagataaatgcaggcaagcaagggagagagcccttggacactcttctctagtattctaggacttttcaggcctgcctggtgagatcaggtaccttatcactagcttctacttgtgcaatctcccaattacacaagcgatcccatctagatttacaagtggccatcctctctgacccacaggccagagaactcagcccacgcaatgtttttaaaatagaccccaacccaggggaggctgacaggcacacagctgcaccaactttattaatgagtacccagacctttagataattgatttccactttgatcccagcctacgcatttctatctctgatatctaaatagcaaatcatgttatcttacaattaagtgataatcttcatggcagaaaagttgacaggtctataaatggcttctgcaagtgattaaaataacttcctccccctttccacccagccctggaaatgttctacaacttcacaaggctattacttgttaataaactccccatgatatgaacctcattcatattcaacaagtttacatactaagttactctccagaaatgatatacatcttattttttatgcttaaataagaacattttatttattttttatatctatttttttggagaaagggtctcactctgtcaccctggctggagtgcagtagcatgatctaggcccactgtagcctccaccttccaggctcaaggatcctcccacctcagcctcctgagtagctagcactattggcgtgctcctccatgtcagctaatatatatatttgtatatatccatggcagccaatatgtatacatttgtagagatgaggccttactatgttgcccagtctggtctcaaactcctgggctcaagtgatcctccagctttggcctctccaagtgctgggattacagtcatgagccatctcatgcagcctgcaagtacattttattagccttagtaagttacacaaagtcagcaaaacctttgactttaatattcaagtaatattaagattgttaaattttgcatgtatatgcatggatatgaagtatatacaagtgcagagtaacttgaagatcagtgttgaaacaacattgagtatttaatatgaaatgagaataaatgactaaaagaagataagttttacttcaataagtgaattgaatattgaaccctgatatggtttggctgtgttcccactgaaatctcatcttgaattgtagttcccataatccccacatgtggtgggaaagacttagtgggaggtaactgaatcatggtggctgttccctcatgctattcttgtgatagtaagttctcacaagacctcatgttttaagggacttgacctttcacttggctctcattcttctccttcctgccatcacgtgaagaaggacatgtttgctttcccttctaccatgactataagtttcctgaggcctctccagccatgctgaactgtgagtcaattaaaactctttcctttataaattgtccagtctcggatatgtctattagcagcatgaaaatggactaatacaaacccttactatgcactgaattctggggcaagtacccaagatattacagcaaacaatacccaccaatctgcttctatggcagaactgggccacatgcccagaaggcaagtaagaattactctgcaaccaactgatcaccatagtaactgagcatcaggtagaaagagtgctgggattgattagcagagtctgtgatttggattggacatagaaatgatatagtccattccatgtatgctcaatgaacactgcacaggtgaacagataaggctgtgacctcctctgaggcaagctccctggttattccatctccatatacctcaagactcctaacacagttctttgcacataatagacattcattttgcaggacagataccaagatgaattgcttcagtttgtttttaacaacgtaattctatttccaatttagataattcattgatttcacacctttccttcctggttactctatacttaattttcccttttcttctttccttttttgtttgtttttttttttttttttgaaacagagtcttgctccattgcccagactggagtgcagtggcgcaatcttggctcactgcaacctccgcctcccgggttcaaacaattcttctgcctcagcctcccaagtagctgggactacaggtgagtgccaccacatccagctaatttttgtctttttagtagaggtggggtttcaccatgttggcagggatggtctttatctcctgaactcatgatccgacctctcaaagtgctgggattacaggcatgagccactgtgcctggcctcttctttctctttctaaaagcacatcaatttacatttctacatctgcttcctacaaagaatttcctctgaatgaattcaacaagtgtcctgtacatgtaaatatatgtatgaatcttttgtacctatccatgtcaaagggtttttgaagccaaactgaaaactttcctagactacatgttgatgttctgaatatccacatttcgaggctcttaacaaagctgtatcaaactccttttcttctgagtaatatattatgtacgtaaagtcctaggagatgccctaagtctactataagtgaatttactttttgttttctgctttgcttcattcatcctgctttgctttttttctcatcccaaatataaacatctgttttgttatcaagttaaagttaaggagatataaaaccctctcagattaatgtacagcccattattgaattctggatcttagtgatatccaatatattatcatgaattttatagaatatactgaacttttaattcttatctgatttatcttcttaatgatgcttagatttccattcaaaaatcctgtctcttctcaccctttccacactgtgtctgtttttgtgcccttttctagagttttacatttctctttaggattatctctctctttctctcgctcacctacatacacacaccacacactccatgtccaaattcacagtctaagcattttggtgatatgccattcctcttctacctttgttagaagttcctctttcccatggaatcaattctaccggaaaaaagtgaaaaggaaccttagagagcaatcattaaaggtgcaaagggaaaggtccccatgtctgggagtgtctctaaccagctgtgtgatacgtgccatgtaatatctggctttggttttctcatctctaaaactggagggtaaaacaagactatgtcttgaaacctttctaattctgaaatgttcactattatcagttaacatttattgtgcttttctgcatggcaggcctcaggctaacggctggctataactagcactatccatgctcacaacaactccataaggaaggtgccacggttatcctcattatgtcactgagaaaactgaggttctgagaggtaaagtcatttcacacctgatgggatatggatgtaagactggaactcagacggcatgactctcaggttacagattctgcatcacatgctcatatcaactgatctgtatttttatacaacttcaaaaatgaaaacactgggcatgtgacctataaataatgaaatcatatacaaaaataaagaaacaccccacattgttgaaaaattatttcctttccaaaaattacttgaaagggcatcagtaagccctggcatatttgttcaaaatacagtcttactgaataggggtgtgtgtgtgtgtgtgtgtttgtgtgtgtgtgtgtgtggtgtgtatatacacacatatatatgtgtgtatgtgtgtataggtgtgtacatacatacacatacatgtgtatacatgtatatagacacgtatacatgtatatacacacatacacatatatacacatatatgtatacatacatatatgtttatatatatacatatgtgacaataaaccagtagaaaggtatatatatacacatatatacacatatatacatatgtgtatatatacacatatatacatatgtgtatatatacacatatatacatacatacacatgtatgtatgtatacacatatatacacatatatacacacaaacccacagtcatcccttggattggtttcaagacccctgcatatacaaaaattagcagttgctcaattccctgatatgaatggtatagtatttgcatataaccttcccacctcctcccattaactttaaatcatctctagattacttataatacctaacacaatgtaatgctatatagttattctaacatattgtttttatttgcattatttttattgttgtattactttttatggtttttttcccaaatattcttgatccacagtggatgaaattcacacacgcagagcccatggatacagaggtccaactccatttttaaccaatactcatattcgcacagattcatataatctcacactttcaagtaacgtaagcactatatgatcccattatattatcagcttgtcaagaaaactgcctatgctctgtgtcctttataaaacaatgttcctacctaataagggcagctacagcctttccccccagttctccctgctataaggtggcacccacagatatgtctccttctcttttgcctaagaaggcccttttgatttctctttcaatcctgtccccaagcctgaactcatcagtatcccctactgctgccagtctaggagagactccaatcatcttcccctactgctgagacagcagccttctacctggtagcctctgccctcctcagtccattctccacactgcttgctttcctatctcttctcaaagccaatcacataggtcccttcctcacttaaaacccctttatgactcctcattgcatcagaaataaaatctgaactcccttccactgtttcagaggcccactctcaagctctccacatctataaagtgccaactagtctttgccagttgtcaaacagactgagcttagctttctctcaacccagaacctttacataccctggctccttgatttggagtgctctctctccatctgccttctacagtcggaccttcacatctttcaggctgagacagaaccctcctccagagagctttccatgtcccccttatttagtctgacccaagcccattattctctcttcactcttcatttgtttccttcataataattctgattgatcattgtgttatccatctccacgtgtgtgtgtgaactatattctctcactatcacacaagcctccggaggatggaaagcagctggccttgctgatagatacatcccatgcatttaactcagagcttggctcaggttagatggtcactagttatgtatttgttaaacgaatgaacatatgacctcagatctttttgccttaagagaaagaaaagtaaaccatttgaaaaggggggaaaaattataaggctagcaaaagttaatggtattggcaaacattactacaggcccttgatagatgttaaaagaatggagaaagccctttaacatatttaatatatcatccctagttggaagatacttttagaattgtgcctatgcccaaaagttaataaatgggtgaggatattctgtgtgactaagaggggctaatgaattgataagtatttctgtgagatttactggatggttgaaaaatctctgtacattttcccctgattgtctctacctttctgctggcttattgtcatgctgatttttatggatctacattcaacagctaaggtaaataaggtaaaatgccagagaataatccaccataatatagtagaaaacttttttaaaatcaaaattcctgttgctaaacccaccatctaacaccttttatcacatttgagtgatctttaaaagaacatcacacttaaattcgcttttgagttagattactgaagacaaatgacatactgaaatagcatctaaaagcgttaatatacaaacatctacccaatacagatttaaatatagcagtgactgtacacctaccgaaacatgaaagactaccaggagacagggatttaatgtggattgatactaaaaagctaatggaaatccggtggtctttatgattgagatggaacatctttcacggctcttaaaaccttaggctggacagtgaagacatgggctggtgctgatgaaggagggctataccccaagcctgggaatctggaaatctgatgtgttcggccagagaaactccaaagttctccgtgtttctgcctttctctacccccacaaacttcaattcttcccttgctaataaaatactggaaactgagtaataaaaggcaaatttcatttcaatcctttgggctcaaagccagctccctgccaaaacttctcctgcctggaggggtagagcagggaatgagttggggcaagcacagatgtcctgcttctactctagagggagagatctgcaaagggtatggctcagcatcttgtctaccagctaatgtgattcataaataaatcacacagggagaagtgtgggaggcccctgtggttcaattctttatctctttttctcttccccagtgtggaagattgtcctgagagtgtggggaccagggggcagagtcacctacatggtctgctgtacagcagctctggcagcttagcacaacccattcacatactgggcagagcccttccaatgttaacctctgccagagctcctcctgacttttttttttttaatcctaaaagaggaagcatttcaaatgacctaaatctaaaaatagagtacttcatgctcatgactattttaaatagcatctaaaataaagaattaaaaaaaaaaacatgtttccatttttgtgacagtttccccttcccttgaaaaaaagaaaatactgtagagcttgtcattcaatctaaaatcagacttcgtgccagctggaatcctaggtttatttattactgtgcacagttcttacattaactgtttgttaaagactgattttaccaccactgagacacaatgtaagtgaaggtctttccatgttttaccaaaaagagtgattcaagcatgacccgtccaggagaaatgatattaaagaaaagggacagaagtactactcagtcactgatccaactatatttctggagaaatcaagtttaaacataagtaattgcctaatggagttgggccaaggtggagataggaaaatatccatgacacttccagtatttgcaaaacaggttcaaaaataaaattgcaacattttatggtctgtaacatacttagtcacttagtcgcagagacatctggaaaaagataatccaatggggcaggtttttattctctactttagaaaattgttcacatttattccctatcatagtttcaagtagaatggttataattcatccaataagcttttttaaaaagcagggaatcacagtttctgggcgtggggcccacaggcctttacaaaacttcataggtttatacctacataggtcatagattgtgaatgacacacaacatgatgactatgttcatgaacacacatgctcatatacatatatacatgcagtcaagctcaacctagattcacaaatcttacaaggttttacttccacaataatgggctcctgttcagtctctcttgccagccaatcctccaagagagacaccgacaaatgtagacacgtaaacatgctcctccaaacatggaatagctatcacttatttcaagtcatcaaacgtatgagtcagctgtatcttgatacaattagttgaggttctctttcaatgtactccttagacactctgtggtgtcaagctgtggtactatggctctttcactagctcattaccacctccagcagagtctgccttggtatagcctcagaggcacagagcaagcactcaataaatatggagtagaggaaagagaaaggtggacaggaaaaaaggggggagggaggaaaggagatgaaaaaggatagaagagaaagggaagccagtgagggagtgaatatctagctgagaatggaggaggaatctcaaataaaaagggcaaagtcagaggacactcagaaaaacagaagtggatggacaacagtgccacaggaactcaaaggtgcaatgttttcaaaagatagatagattccaaagatggcacccactgatgaagcttttctattaccagggtcacatacaaacaaatcaattcggcacccagggctgaggtggtacagcgtcacgtccttaaaatgccttcagggaccaggcaaatagcataaatataagattataggcgagaaaatgcttaagtttcaagcacagcatctgtttcaagcagaaaaactgtgcagatcaaacagctcagcccagactctatccctacaccctggagctaacaaatcaatttgattcaaatatttgtggaatacctacaatggggttttaatcacaaaactttacttgaacagctgcaacctctagcctctccaggcttctttcctcatcatggggagaaaaacacaaacatttcaacatttgttgagaggagaagaggttctacatgaagtaacccgactgacttatttgtactgagaaaggaaaagcaactaaccctgacctaccagaacttctcacctcgggcagtggcagtgagcagaggtctcagcagcaggagcctgcacaaccccaaaggacatagcagagactccaataccatgtctgaagcaacttctttgaaatcaaaatgctgatcttctcacatgctgattacagacacttccattatcaaacagaagaatttggggcaaaatggattcttaatggtgtctgtttcctacattttcttatcagtagagtggctcaaaatctaaatccacctaaactgtccatcatcgccccctccccaccaacaatgctctcattttatcctgtatgtgtttttataaaacgtctcaccatctgtaacaatatatgtatttgagtaattgctggtttactgtccattgcctccactaaactgtaaactccatgaggtcaagtacagagtctagacttgctcatgactaaatcacctgcatctggcacatagtcagcatgggatatatatttatctgttggcccaacaaatatgactcttgctgctatctgattttacacaagcacacctccactggcacaacacaaggagaggagaagagggaggcatctggagagctcaatgtcaaggttacttcccagctgccattccttgtgtttcctgaatgcaagtgtaactagtaactgtactaacagagccaagggctatatattcttcttcatcccataaacagaaaaataaacagttctgtggaactgtgcaaacccaacttaaatttcagattccagacccattatctggcaccctttgctcagaaatactttactaccactagaagacaatctaacccctggtctcacataccacataatgctgaaattcttccccattctgtctcaaacctgcccacaactccgtttcatgagggctgagccactatccaatttctatccttataggggttcggttttagactatgctcacaaatcccaaattcccagtgagttcaggaatgatgcttccttaccttaccttacataggaccttgaagatttctattacccgcagatgtaacatgcagttgttaagaccgcacattgcatcagcccacgaaatgagttgggggctatccagcctggcccctctcacgaggccatgtaccttgtgggggagctgtgtctccacaaaaggagtatctttttctattttatacaaacatgccctatggattagtaacagtctgatactagaaaaaaggaagctcaaaacttcacaggacatggcaaataaaacccagtgacctgataagaggtacaatatctccttggtttaatatttcacctcttctaattagaataaaatattcactaggaaaaatttttatgatagtgtccttttggcattagcatgaatacctccaaggagccgtattattcaaacaattttctatttcaaaatacacaggtagtaagaactaacaaatcattacatttccaccaaatgcacggaaacaacaaacttaactaagaaaatactgaagcagcttttcccaacggtacctcgcctccctagagcggaatggttttcttttaaggaatccctattgatgccagaaccaccttggaagaataattaatgacattttgaaaactgaacttccttctcactgcctttcataatgcaaagtgaaggggaggcggggtgagagtcccccaggaacacacaatgcatttttacaagagcttctaaagcccctcagtgagacagaaacacactttctcatttaagcaaaactttagaaaactaacaattaaaatgtgagttaaactgaggaaacatcttacatctgtgattctccctccagaataatatgactaggtagctagctgccagacactcttgtttcagcaatcatgtgactatgtgatgagggctggcttcatgattcaggtggaactgatcagggcactgacactgatggagacaaagcttgtcaggcatgatgtccttgtaggcaacaatacctgaaactctgttaggaaatctgaggtctttggatagaaggaaggaaataagccaaaggctagagtcacacagtcagtatcacttcagacaagtcagcactggatcaacctcttcacctgtaaaatgagggtaagaatatccactcaataagtatatgataaaaagaaagtgacaacacaaagtgtaaatgaatatttaagcaacatctacacataagagaccctaaatgaatatccgttgaaataaaagcaatggttacatgcttctcatatcctgtggcccactgacctcattagtcattatcttgaccagctccacttgcacagcattatgaattacatgtgtgcagggctattcaattgtctagtttgatgttcttaaccttgtgaggcagtaaatatccattttaaagatgagaagactgaagtttacttcacaatcttagtggctccaatcgaagatcgtccactgtaaaattcagttatctgcctcatgatttcacggcttatggctctatggaagttctattcttaacatgacgcaaaggaagtcagaagttgcaaaactctgagttagataattaagccatgaaaagtgattgatgctaagcatctgtacacaacatgtgaaccaagggaatgagtgactagaacccaaagagagtttggagttatttggctgtgactgagaaatgatgggctaggaatccaggtaacaacaacaacaaaagtaaatacacattgtctctcctctttgagaagatgaaagaaaacatctttttcagttcaatgatgcttcctgtagacagaaattttctcattgaatggacaaaactagcaagtgcacaagttaataataaccttttacccaaggttccatagcaagttccacatgctatgctatcatctaggctccctgcctgcctcttctcattgcatcctcatgacaacctcataagttgtcatgctatctccaagttttggatagagactgagtctcagtagaggtaagtttgtttttcaggcagggttgagcttttcgaagtacagagagaactggggaatggggtgcttcaaagtcactgaaagagctgaagctgtgggctctagaaagacatccaggatgaccacgaggagtaccactacttctgccaccatcagaaaggcagagactcaggaagtcaccaacagaatcattattagaagtagactgtctgaattatgaacatggatcagaaagctgctgtcaccaacacagcctttgactttataggaaagccacactagcaacaaaataaacgctctatccactgcttctcagtggcccttcactgagtggccaggtactgaaagatgagtgcccaaaagcccgatgtctcctccaatgttctagccagcaaagatcacagagaatacagaaagttggcttcagtctcaattctgtcttccaaaactcaaacaagtgcatctaactggcaaacaaggaatcagatccagggccttagctgtaaagcatctggaaatgtaatgtttgaccttcccgcctttcagtacaggaaggcacgtgatgaggaggctagcaaggttcctgagagctcaatcactgtgtctacttcatcagatttgccatcccatagctgattcctaattaaagggagtgagaaccaaaaagggggcaaagccaagtatatgagtaaatgcacagaaacatgacagactaatttaaccagagaactaaaaagggtttagcacccactaagtgaagagtgcatttggaaacaaggtggaggatatagctggagaggcaagaaaaggccagatgatgaaaagtctatcaccccagcttagaagctttctcagcctaagctaggatatcccttctgaacttcttagaagccttgcacaatcctcagctactcattgatcacacagaattgtaaccattcatgttcttgcctgctttactgttccccctgactatgagggtgggaggtcaagggaaaggaggggctattccactttgtatttctagaacatagcacagtgcctggcccataaacgaaagctccagaaatacgtgttgtatggaattacgtcccgaggttccttccactatcaatcatctacttaaaaaggagaaaatgctctctttaccttaagtacctttcattattaaaaaaaaaaaatggttaactatggccacgcaatggctctcacctgtaatcttagcactttgggaggccaaggtgggtggatcatgaggtcaggagttcacgaccagcctggccaagatggtgaaaccctgtctctactaaaaatacaaaaattagccgggcatggtgacacatgcctataatcccagctactcaggaggctgaggcagagaattgcttaaacctgagagacagagtttgcagtgagcagagatcgtaccactgcacaacagcctgggcaacatagtgagattccatctcgaaaaaaaaaaaattggttaattgtagattacagattgataattgtaagaatatattcctatagacatatttttgtacatttatgtacagtagtagacaaatgttgtttctgttaactgaaccaccattctcccattctgatgatagtgcctcaattttcctgtaggaaaccacagctactcccctcacatgaagaaattcacatgaggggtatgacctcagccctggggtttcagtttggcacatgacatggctggatcaatgaaagttctccgtgggattcttgatatgagcaacttggcagtgagggggaaaaagttgctctcttatgctgagattgctactagtggcaagatagtaacattgtatggccaatgaccaccacatgagacaaggtgtccaaagaaggcaacatggaggaatcagagcccatggagggaaagacacagactctattttttttttttttttttttgagacagagtttcgctattgttgtccaggctgtagtgcaatggcgtgatctcagctcaccgcaacctccacctcccaggttcaagcaattctcctgcctcagcctcccaaatagctgggactacaggtatgcaccaccacgcccagctaattttgtatttttagtagatacagggtttctccatgttgatcaggctggtttcgaactcccaacctcagatgatccacctgcctcggccttccaaagtgctgggattacaggcgtgagccaatgcgcccagccgggagagacacagactcttaacaacactgagtactcggatctagggtgtcaaagctgtcatcggtcagtaaatttctttttctttttcttagaaggtctaggatggtttcagtctggtaacaccaaaagaaattcaaagttttaagtttaccatacataaactattagttgaagaaatggcaatgactaaatagcagaagaatgaaactcagctttgggggacatcaatctgtcagtcatctactgtgcagccatttcgaggggggataactggaagagatgaggctatcacctggacattcttaagagaattaaaacataataagccctctccctgtctaaatgcacagataattgattaacagaaaatgatcattactaaaatggcttcagagtttttcagggttgtgggaattacaattgttctgaaagaaaactgattacttacagtttcctcctaagattgtagttgtgcagtaatgatattgagacagcatgatgcccattaaaaaaaaaaaaaaaacactgaagactttacaaataactgagccaaatgagatattgaaaaatcaaagcgagaaagtcccatcactaaaagtatacaaatacatgagaatcagccagtaaaacaggaagtcactctcatctaaaatggcctttgcttgtcatcaaactcatatagaattcctaaaatctgtcagtgtagtagcttctaagtgatatgtcaacaaatatattcactgagaatacttattctgcctagagccaatgtttttagaaaaacatcctaaagagtcaactgttaaatcactaaaatgaatgttttgagcaggtgtttggaattgtgctgatttatccatattttccagtttaatttccacgtttaccaacaaacttcagcaagaaaacataaaatgtacctggaaggattatgttcatcataaatacaaggacagttgcgctaaacatatctgtactggtaacagtgattcataaaccatattcattaacctaaatccttaaagttttctgtttaaactgtagtgattggaacgccaagtgtcagagtttaaaatggtatttttaagctattagcagttgacattttaattaggcatatttatgacagacatggggggataaaaaagaaggtaagcaaggaataaaaggtgcatcaaggacacaagaaaagagaaaagaattaccatccattcctgttatccttttcttttagcatatcaataggaaagcagtataactaactggtcaagaatgtaagatctaaagccagcctttatcagctcaaatcatgactctgatatttaccagctgtgagaccctgaacaagttacataaactgcatctgtttccacagggataatgccagcacgtagctcataaggttgctgtgggaactgaattgggtactgctcaaaaaatatgttgcacagggcccaagaggaaagaagtattcaataaatgctaactactactatattatttgtaaccttacttaccgggtcaagggctaatagtggtagtaaattgttgcttaaaattttatttatatatttcttcttgaaccagaaaagatgccaggctatttattttttaattttttgttgttgttattgttttacaaagggtttctcagtctgttgtccaggctgcagtgcagcagcacgatcatggctcactatagcctcaaactcctgggttcacagagtgatcctcctgcctcagccacccaagtagctgggactataggtgcacaccactatgcccggctaacatttttgcgtttctttttttttttctttttttttttaagagatgggatttcactatgttgcccaggctggtctcaaactcctggcctcaaatgatcctcctagatcagccactcaagtcactaggatcacaggctcagccactgtgcccagcatgcaagacaatttaagaggcatacaaaagacaaaaatataactcaacttaagaacagattaagaattaacaagataagaatatttaagaataggttaagtaaacaaatgtcatagacaaaactagagtcaggaacaagacaaaggataagaatcacttagatatggctgctctaagcagctactagtttgtcttcagctttctggcatccaacacaagaaagaaaactgggtctgcggcacaattttcaatattcgtgagattaaaatatactaaatgcccagaaagagagagtacagtgattttgttagaggccgagaacataaggaactaaggccatgcagcaaatcttcagaggggcacatcatagccacggtagatagcattgccaaactcaatttcttagccctccttgtatccacacctgtatatggcctctggggccacacgtatttccccacctcttcagtcaaagcttggtcctaggacttccttaggccctgatatatggggagaagtgacagtgcatcttcactcagttctcaccctctgccttaaaaggtcttaagcatttctgcttgccttgctgcatctccactacagccatagaagtaagtgacatagttggtgtggttgctagtctaagggagatgaaaaacacaaagcagtatggagcagagccatccactgagcccagcctagatctgctaaaccccagatgattcactaagacacaagcaaaaataaatgattattgttttaaacttcagagttttgggataatttgttatgcagcaatggaaaacaaattcagtaacaaaatgatgacactttttaaagcagtatttctattgccaactataagtcaaacagtatgccttctaaatggcttaccataacctatcttcataactttgatttctaaacttattaaccttgttactgtaatttcagagaccctcaacaattaatataaattaaatttgtcactcaccctactaaatgaaagtactctggaatacagtcaccaaaattaaataaaggttgaggtcataggcctccaaatacaggccatacagcataagcaaaattaactgggaggtggggtagggaggcaagcagtaggtcataccttaaagagagaccaacggcttccaaagtaacaacactaggcatgaaagtagcccatgtgtggccctcaggagagctgccatgtgtatgaagacacactggactgagaaatcagtctcttcaaatgtgtgctttattcaaaagatatcagggcagatgtcccacaggatttgtgttgatttgagttgcttctcacatgagcaaagctatccagcatccatacggcagaagttgttatggggacttattcatttacacatggataatgaaactcatgagcaaggctggggagaccaactaacaactctaataacaacagtaatagctgaatcccattgatatggatggtgctagtcactgtgttaagcactaagcatcaattatttcattcaattcattgaacactcataataacccaaggaggtagttatttttattcatttctccaaccaactttgccttttgcttttacaggcaagtattctggagcttggagagactgagggacctggctatagttacaaaggcaccaccttgtttgacaggggctctcaggcaaaattagaacaggtaaacttgattagtatttgctttaggtaagtcttgaacattttctcagttaactgaagattttttttaatgtttatgtattttttaatgaatacattataattgtacataatatttacggggtacaatttgatgtttcaatacatatccgtgttgtgtaatgatccaatcagggtagttagtatatccatcacctcatgcacttatttggtgaaaaccttcaatagcctcttttctagttattttgtaataaacaatattttactgttaatcatagtcaccctaccatgcaataaaataccagaatgtatttctcctatctggctgttgattgtagttttaattcttttcttaaatatgaagcttctgtaacttcaactggtctgtgaaaatattatgccaaatagaaagcactttttgtaaataaagggcgtgtgatgcactatgaacacctcccaaatgatttggaggaaaaaaacatcaattccagtgatattgtttcagattatcccaatggtctaggtttattccaaagactttgacctaaatccctcagtattccccttcaactaactctcaacccatttgaaatcttattcatatgttctcactgttagattgtccacctacaatttttttttgtcctttgaattactttctactgaaaataatacacagacctcggtgttattggaaattgcattgtgaatacacaaggttttttgtctaaattttaggtagttttctctttctgttgctacctcaaagagataacagattctgcagtcacattatatgtaaattatgtacaagct

SEQ ID NO: 23171 - DNA, 2397 bp, Homo Sapiens
atggagatcagaggggcactcgatctgcgaaaaaggcaagttctaatattccttgttttgctgggattgtctcgggcaggtactgaatctgcacactattctgtggcagaggaaacagaaattggctcttttgtggctaatctagcgagggacctagggctgggggtggaggagctgtcttcacgtgaagcccgggtagtgtctgatgataataaaaagtatttgcaccttgatttgctgactgggaatttgctcctaaatgagaaactagaccgagacgagctgtgtggctccaccgagccctgtgtgctgcattttcaggtggttttggaaaaccctttacagttttttcggtttgagctgtgtgtcaaagacataaatgatcactcccctacatttctagacaaggaaatacttattaaaatatcagaaggtaccactgttggagctacctttctaatggagagtgctcaagatttggatgtcggaagcaacagtctccaaaactacacaattagccccaattctcacttctacattaaaattcccgacagtagtgacagaaagatatacccagagctggtcctagatagagctttagattatgaacaggaagctgaactcagattaacactcacagcagtggatggtggatccccgcccaagtctgggacaactttggttctcatcaaggtgttggacatcaatgataatgcccctgagtttcctcagagtctctatgaggtgcaagtccccgaggacagaccccttggctcctggattgccaccatctcagctaaggatctggatgcaggaaactatggaaaaatatcttacacatttttccatgcatcagaagatattcgtaaaacatttgaaattaatccaatatctggggaagttaatttgagatcacccctggattttgaagtaatacagtcctacactataaatattcaggcaacagatggtgggggtctttcaggaaaatgcacccttctagttaaagttatggatataaacgacaacccaccagaagtgaccatatcgtcgattacaaagagaattccagagaatgcctcagagaccctagtagctctttttagtatcctagaccaagactctggagacaatgggaggatgatttgctctattcaagataacctcccttttttcctgaaaccgaccttcaagaactttttcactctagtttctgaaaaagcactggacagagagagccaagccgagtacaacatcacgatcaccgtcacagacttggggacacccaggctgaaaaccgagtacaacataaccgtgctgctctctgacgtcaatgacaacgcccccaccttcacccaaacctcctacaccctgttcgtccgcgagaacaacagccccgccctgcacatcggcagcgtcagcgccacagacagagactcaggcaccaacgcccaggtcaactactcgctgctgccgccccaggaccggcacctgcccctcgcctccttggtctccatcaacgcggacaatggccacctgtttgccctcaggtcgctggactacgaggccctacaggagttcgagtttcgcgtgggcgccacagaccgcgggtccccggcgttgagcagcgaggcgctggtgcgcgtgctggtgctggacgccaacgacaactcgcccttcgtgctgtacccgctgcagaacggctccgcgccctgcaccgagctggtgccccgggcggccgagccgggctacctggtgaccaaggtggtggcggtggacggcgactcgggccagaacgcctggctgtcgtaccagctgctcaaggccacggagcccgggctgttcggcgtgtgggcgcacaatggcgaggtgcgcaccgccaggctgctgagcgagcgcgacgcggccaagcacaggctggtggtgctggtcaaggacaatggcgagcctcctcgctcggccaccgccacgctgcacgtgctcctggtggacggcttctcccagccctacctgccgctccctgaggcggccccggcccaggcccaggccgactccctcaccgtctacctggtggtggcattggcctcggtgtcgtcgctcttcctcttctcggtgctcctgttcgtggcggtgcggctgtgcaggaggagcagggcggcctcggtgggtcgctgctcggtgcccgagggtccctttccagggcatctggtggacgtgagcggcaccgggaccctgtcccagagctaccaatacgaggtgtgtctgacaggaggttccgggacaaatgagttcaaatttctgaagccgattatccccaattttcaagttcatgacactggtaggaatatgggggaaatcgagaactttcgaaatagctttggacttaacattcaataa

SEQ ID NO: 23172 - DNA, 2822 bp, Homo Sapiens
gaaaaaagaaaatgtcagaggaatttgaagccaatactatggattctctggtagacatgccatttgctactgtagatattcaggatgactgtggaatcactgatgaacctcaaataaatttgaagagaagtcaagaaaatgaatgggtcaagagtgatcaagtaaagaagaggaaaaaaaagagaaaagattatcaacccaactatttcctgtccattccaatcaccaacaaagagattataaaaggaattaagatcctgcagaatgcaataatacaacaagatgagcgactggccaaagcaatggtcagtgatggttcctttcatattaccctgctggtgatgcaattattaaatgaagatgaagtaaacattggtattgatgctcttttggaattgaaaccattcatagaagaactcctccagggaaaacatttgactttgccctttcaagggattggtacttttggaaatcaggttggatttgtgaagctggcagaaggagatcatgtaaactcacttttggagatagcagagactgcaaataggacatttcaagaaaaaggcatcctggtaggagagagcagaagttttaaacctcatttgaccttcatgaagttgtcaaaatcaccgtggctccgtaagaatggagtgaaaaaaatagatcctgatttatatgaaaagtttatcagtcacagatttggagaagaaatattatatcgcatagatctttgctccatgctgaagaaaaaacaaagtaatggttattatcactgtgaatcttccattgtgattggtgaaaagaacggaggggagcccgatgacgctgaactagtaaggctcagtaagaggctggtggagaacgcggtgctcaaggctgtccagcagtatctggaggaaacacagaataaaaacaagccgggggaggggagctctgtgaaaaccgaagcagctgatcagaatggcaatgacaatgagaacaacaggaaatgagcccggaacgcaggcccccatgtctctgtgcaaagcctccctgcttccctctgctgagtctagggactgacttgcagcgtgctgtttaagttaagtttctctggtgcaatctgtgaagattgcctaatacttttcatgatcgatgtgttcgcattgctgaaacacaacagaagaaaaatggagtgctgggactggcagaggaaattaattgatgaaagaagaatggcccaagtttcattcgccctcagccacgcacaagggaaagggaactttgggttatgcctcctggacgcaaattaaaggccgagaaagaggccttgccatcaatggaatactgccatttatattgcttagcagggcatttgactactttatctgaggccagaactctcacacacagctatcaagtgctaagtttaaaataatcactgttggaattgtcatctgtacaattagtccataatgtctcatgtttgtcctaagtgtgctgttgctatgcagtgtgatctttatttatagtaaattatgtctcatgtaaatgatatatttttggtgaaatgcaaccttttctataaaatgtgggcaacattttaaagtttttttaaaatcctattttgataagtcagtatgccatatttaatgaaatgttattatataatttttttttcttaggcaagaaacctattggaattcgagacttaattaatgaagctttgcatcgagaaacgatgggtctgaagtccaaagtgaaacagataaaggaacttttattaaagcctgagactcaggccagaattaggagggagctttttgaaggaagacttattaacaacagtaattcagcaaatgacgttgatttcagcacaactttgacataagctctacattgcgattgtgacaacatagcttatgaaatcttttcagcttattaagtagctctttggtaaacaccaaagaagtttctgatagtgtctgcacaacagcaaaccaacatttggtgaggaattagcaatttcttgccaaagaaaattgattctgcccaattattttttgagctacacttgtgttttagaatatctgtttctgtaatattgagagttattttatagaaatgatttcttaattagctgttgtgagatatttctcgggtccttgcagaaaaaaacatacagactgtgaacaaatcattcacaaacagaataaaacagagccaacaacagtattttaagggtcacttgcctcctgttgacacaattgttgctaaatcaaaagaagcgttgtccaggtgtgtctacatctagtgttacttttaatgagaatttgaatgtttattgaacaatagtacttgaatgaacatttataaatgtaattattgcgatcactggttaagaatgttttatatatccttataatatttttcactgatcaaaatgttgttctgctttttcatttcttaaggaatacatgtttgggatttttattttttacgtgtccgaagataagctccaggtcttatcgtatcccttgccatctgaacttgtttgcactgcttctgtttgaaagagcatcttgaaaaacttccccggtatgatgattgttggtaacaactttttctatagtcattgatggagtagatcatgatggaggggaaatcactggagatcaaatatgtaaaatcatttcaaatataaaatccagtttactcatggattttagctattttttcactgggtaaattatactacatttatttacaaatgagtttatgcattttcatggctcttaataaacatattgttttccccttgaaaaaaaaaaaaaaaaaaaaaa

SEQ ID NO: 23173 - DNA, 3668 bp, Homo Sapiens
ggcagagggtgggccttaggacgggtctcccttaaactgggcgatcaggcagcgaccctagaggcgtctgtagggtaaagctgggggttctgtagccggaggcggcggcgagtccagaacgtcctggccttacagggagaaggcgtcactcgcggttacaagtgcctgaccctcactccagttggcggaggaggagaaggaaggggccgggccgggtcccctcccctcgcgccccggatggatgtgcccggcccggtgtctcggcgggcggcggcggcggcggccactgtgctcctgcggaccgctcgggtccgtcgcgaatgctggttcttgccgaccgcgctgctctgcgcctacggcttcttcgccagcctcaggccgtccgagcccttcctgaccccgtacctgctggggccggacaagaacctgaccgagagggaggtcttcaatgaaatttatccagtatggacttactcttacctggtgctactgtttcctgtgttccttgccacagactacctccgttataaacctgttgttctactgcaggggctcagccttattgttacatggtttatgctgctctatgcccagggactgctggccattcaatttctagaatttttttatggcatcgccacagccactgaaattgcctattactcttatatctacagtgtggtggacctgggcatgtaccagaaagtcacaagttactgtcgaagtgccactttggtgggctttacagtgggctctgtcctagggcaaatccttgtctcagtggcaggctggtcgctgttcagcctgaatgtcatctctcttacctgtgtttcagtggcttttgctgtggcctggtttttacctatgccacagaagagcctcttctttcaccacattccttctacctgccagagagtgaatggcatcaaggtacaaaatggtggcattgttactgacaccccagcttctaaccaccttcctggctgggaggacattgagtcaaaaatccctctaaatatggaggagcctcccgtggaggaaccggaacccaagccagaccgtctccttgtattgaaagtactatggaatgatttcctgatgtgctactcctctcgccctcttctctgctggtctgtgtggtgggccctctctacctgtggctattttcaagttgtgaactacacacagggcctgtgggagaaagtgatgccttctcgctatgctgctatctataatggtggcgtggaggccgtttcaaccttactgggtgctgttgctgtgtttgcagttggttatataaaaatatcctggtcaacttggggagaaatgacattatctctcttttctctcctgattgctgctgcagtgtatatcatggacactgtgggtaacatttgggtgtgctatgcatcctatgttgtcttcagaatcatctacatgttactcatcacgatagcaacttttcaaattgctgcaaacctcagcatggaacgctatgccctagtatttggtgtaaataccttcattgccctggcactgcagacgctgctcactctaattgtggtagatgccagtggccttggattagaaattaccactcagtttttgatctatgccagttattttgcactcatcgctgtggttttcctggccagtggtgcagtcagtgttatgaagaaatgtagaaagctggaagatccacaatcaagttctcaagtaaccacttcataatatactgctgaagggcttcttcttatagcaagaactctgcacagcaactgcctggatgtatttgattttttaaagcgtagacatatatttatgaatgtgcatttcttgacttcacagcagccacttgactaataccttgtgttccgggaataacatgatactattcagaggagccagaagtaaagtttatttcatggattatttatgagagctaatttaaggatgactttttttctgattcaaaagtgaacttgattttaaaaaccagtcaagagcaatcaaagcagcacatggtgttgtatacttcattagcaagtgagtttggtgttttataggtcacatatgtctgtatctacttagccagatgcttggcctggtgggaccagggctccacagaggccacaaaatgttgcaagtcatgatggatggaaatatgttctaacagcatctgcctctattcaatttaattcttatttctgtgttactcatgtacattggtctttctacatagttattctatcactggcaatatttgttctggtttagtgttctgtattttaaggtgtacgtatcatttctaattttaagttattttaaaaaaattcatcatatgaatgttcttggttcccattgtgacgattatttatttctgtaaaatttgtttagaagtacgtttttgcattattcatatgcttcccagagaagctcatttagttagaaaataaggcaagttttgaagcctgctaaatgaagagacttaagaaagcttaaggtacgcttgcttgtctttaaatcttcaatatgaaggactattaattccaagattaaaagttcatatataggctaaagatgtaactaggccatttgtatttgtattcccttttatttccaaaataaaatgaaaaatctttttttaataatttcatccctatttatagtttttatattaatttgtttttcttatccaagtaaagatgtcaataggaattgcattagtccaaggcctttttcataaactgagcctcttttcaattatttcaatgggacaggaactaggatagatgtgattcctgcatttttttaccttaaatctgcctttgtttctaaaggtagatcatcttgaatatttgcttaaaattgctagtgatttcattaccaagttacttgaaaaaatgttctatatgcatttaattctgaaatcagtctaccaaggggctgctagtatatgtcagacatgaaaactattttaaagctgactttgttgccttatcttgaaaagaatctagataggtgcttttaactggggtattaacttttttagaatgacacagctgaacagtgttaataatagtgtgtcaagattgcaaagtcgacatactcatttggtttaagcaggaatcctagaagcaaatggatggggataagaataggtcattttctattcaccatcctttactattaagggaaaggaaaagaacactagctaaggaagggaaagggaagtgatatcataaaagtagcaaccttcattttacattctgtctgtttttctttttttgctttgttttgtttgtgctaatttgggaattgtgtactccgaaacaagtagaaaagtgctgtttgagggattttattaaatctttttttaatggaatgtggtacaaattgttcatgttaccaaagcaatatttccctggaatttaattcaaagtttgtggcatacaacctgagccttttcttatataagacaagaatatgttcacatcttggtatgtggccatatttatagaatgctgaactcaatgtgcaagttgtactgtatgcagttttgtaaataagtgaaaataatttgttgtactttttattcaattctgtatagattataaaattatttttattaaataaatattttacagtataaaaaaaaaaaaaaaaaa

SEQ ID NO: 23174 - DNA, 8011 bp, Homo Sapiens
cgcccctcgggggcggctgtggcggaggaacgatggccgacggcggcggccctaaggaggcgccaagcctgcggagctctcccgggccggcgccgcgggtcccgcgcgcggtcgggccgagtggcggtggcggggagaccccgcggaccgcggcgctggcgctgcgcttcgacaagcccattaagcaggccttctacaacaccggggccgtgctgttcgtgtgcctgtgctgcggcgccgcggtgctggtctacttcatcctggaggccttcctgcggccgctgctctgggccgtgctgtgcggcacttttctgcaccccttcaagagctcgctgacgcgcctgggccgccactggctgcagcgcctgcaccgcgcgcacacgcccatcgtcctggccgcgctgctcctgccgctctgcttcgtcgactacggcgtcgaggccctgggcgagcaggcgctgcgccgccgccgcctgctcctgctgctcggcgccggcggcccgctcctgtacggcctctactgcctcggcagctacttgggcgtgcaggtgctgctggtgcacgctgccacgctcatctgccgcgggctggactacttcagcagcctgtggatctggacgttggtggttggctatgtgttgactgtttcattcaagtggaatgcaagcactgaacgctacttgagagcagtttcaattcctgtctggattatattgctttttcatttagcatccctggctggctcatggagaattccagtattcctggttattgttttcctgatgtctgtgggtaccctctatgaaaaacagaatggaaaagagtcttctggggcagagttaccagggcaggttatctccatggcagcttctactctggcaaacttggccatctctatcacagggtatgaatcaagcagtgaagaccagccctccactcagcctgcagaagcagtggacaggggagaatccgctccaacgttgtccacctccccttcaccctcctccccttcacccacttccccttcacctactctgggcagacgaaggcctgaaataggaacgtttcttagaaagaagaaaactagtgacatctactttgtgtctctagtttgggccattgtcgtcatgcagatctggttgaacctgtggattgtgcagttgctgccagtgccgattgcagtctggatactcaaaaagcttgtcattcactttggagttgtggatttcctagagaaacgctaccatgtgtggtggggcattatagaaagcttcctgaaggagcggcagggagctctcgcgccttggcccattgtcgggcttggaaaattcttgttaaaagttgatagcaagctctggcactggctaaataagaagatgatcatctggttggagaagatgttagataaaataattagcattttcatcatatttttgttagtgataggaactcttcttttagccctactcctgactgcaaaggtacatcaagagagtgtacacatgattgaagtcacaagtaatttgattaatgaaactctagcaaatcaccctgagtgggcaaattggcttcctgaggctcaggtagtccaaagagccctgaattctgcggctaacaacgtgtatcagtatggacgagaatggataactcacaagctccataaaattctaggagataaggtgaacaatactgctgtaattgaaaagcaagtactagaactttgggacagactgtatcactcttggtttgtaaagaatgtaacacactctggaaggcacaaaggacagaagttgcatgtcagtcgtcagaatagctggctgggagacattctggactggcaggatattgtttcctttgttcacgagaacattgagacatttctttcgatcttggagtctctgtggatcgttatgagccggaatgtgagcctgctgttcaccactgtcactacactcttgaccatcctcttctacagcgggacagcccttctcaattttgtactctctctgataattttcctgaccacactattttatctattaagttccagtgatgagtactacaagccagtgaagtgggtgataagcctgactccactatctcagccaggtccttcttctaatattattggccagtctgtggaagaagctatcagaggggtgtttgatgcttccctcaaaatggctggcttctatggattgtatacctggctgactcatactatgtttggcatcaatattgtcttcataccatcagcattagcagcaatccttggagcagtgccattcctggggacatactgggcagcagtacctgcagttcttgacctgtggctgacacaagggttaggatgcaaggccattttactgttgatttttcatctcttgccaacatactttgtagatactgcaatctactctgacatatcaggaggtggccatccttacctgacaggcttggcagtggccggtggagcatactacctaggcctggaaggagcaatcatcggtcctattcttctctgcatacttgtggttgcttccaatatctatagtgccatgctagtgagtcccacgaattcagttcccacgccaaaccagaccccatggcctgctcagcctcagcggactttccgtgacatttctgaaagatctgaaatcttcagtaaggttgatgtggtttcctctgcagtgatttttctaaggaagttcaaatttgacagcgagttcagctcagctgtggccttctgcccttccagctgtgcctagcaagcaaaacccaggaaagaagcagaagcctcctggccttacatacagaatgcctggacaagagagaacttgctgcgggctgctttgtattttaaaacacagcttgagagttcagcgttggtggtttgctcacttaactgttgttaagatggcttgaaaagtttcattttatacactggtaccctggcttgaaatttttccactttggttatctatgttactatattatatatttataaagttattttaagaactctaaactacctgctgttaaaagaatagatggtgtaattttttcctggtttaagaaatgtattgttaaacttttctaagacagtcacttttcaaggaagagggctttcacttttgagtgtgtagttgagtgagcaggaaaaatgaatcttctacccttctcccacaatgtattatacgctctttaagaaataataaatcataagtataagggtggggtggcttatttgatgttcagttttatattataaccctgggagatacaaagactgaagctcttcctcctcttccttttctcttcacgcttctttacactattgccaaattattaaaacttgggctgaccacgttggaagtgaaatacttattaagctgctatgaatggtaacagtatgataaaattcatgctgttattaggttttctccttccaggtggttgaagtgaaaaatctcaggtgtagcaatactctgatttgttaaatgtatccgtttcattatttggaactctgccaataagttagttttcagcagaattttgtatttatgtagtattttcccatctcttagcacagtgccttgcacatgactctaaatgaatcttgttgaattgaattgcaactttaaaaatatctcagatatcacaataaccagcatagtgctttacattttacaaagtccttttgcacatactatttcacaagtacatcacatcagctttcatatagctttatattattttacatcagttttacactgatggagaagctaaggttcagaaaagtgaccaactcaaagtcgtaaagtgtagtaggatttggcctcagatctttgactccgttgtgtgcagattctgctgtattagtgttccttctaaatattgtatgcagttttcccagtgttacgagattggtgttgctatccatttgttgtgaatgaagacttgtcctatagtacatacagggctgagagtggactgtagttcttagctgaaccctttctactgtttaaaacaatcatcaggcctatcctctgctcccaggggaatgtgggagagaaaagggttcttggccaggctgtaggtggtggctcacatctgtaatcccagcactttggaaggctgaggtgggtggattgcttgagcccagggatttgagatcagcctaggcaacatggcaaaaccccatctcgacaaaaaaaaaaaaaaaaaaaaaaaaattagctgggcacggtggtgtggctatagtctgagctactcaggaggctgatgtatgaggatcacctgagtccaggaggtcgaggctgcagtgagccaagatggcgccactgcactccagcctgggtgagagagtgagacactgtcccaaggaaaaaaaaaaagtgttggggggtagttcttaagcgttgaagatttcctttttggaaagtatttaaaggtagaaatattaataatttttcctaaaacatctccctaagaagtcactgataattataattagtttaaatttattcttacactacttaagaaaaatttcatttagaaaaggctaccatgagatcttttgactatatggagtagactgcatacagatctctttatttctattatgaatattttagcgattataatcagctattccactgagtattagatttggtcactaagtaactcatgtttttctttagtcaatcattcattcattcactaaaacatttgttgagagttggctaaactctagattctgtgccaggcactgtacagggtgatggagatcactcataagaaggcctcttgctcttagccagatcatatgtaatactaaatttaaattttttgcattaaaaggctaaaaaatcatttgtttttgttaattatatactggttgatttatagatgtaattagcacatattcataagagacaaatatatacaatgagttactatacatatacaaagtgattttagctgtataaagtgatattgcaaaaaactacagctaatgtttcttgctgggtaattattagcataaatatcaggttcttagaggtctttaagagaatactttagagctaccaaaattagcagcagtgatgtaatatcaccctgaaataccaggagcagaggtgccccagagtgcttcacagctatgatcaggaaacttgacctgccccattgctacagcaacggcataaggactaggaaggtccactagctggggaggtcttggaaccctccgagccagaaagaagcattccagcatgattcctcagatgcaatgaggaaggtttacagaattttcacagggcaacagagatcaagtggtatgaaaaggtaggagttttaagctcaagtctcaaagataacctacctttacattctcagtcagaatttgacccagaaagaggaagtttcttcaggaacagaccgtacgttgatgaagtagaagtcatttcagtaaaaacggagtacagaacttggtcataatatcttgcattttatagatttattaaagattagtttcaagttcacattcgctattcagttgtaaaccgaatggatgggaggggagaaaatacaagctctccacacaggtatgctcctctcttttctgagagagaaggcatgggattttcagcataaattccatgttatgtgagtgctgtttgagttctgaagttcctatcaatatctgttcctgcaagtgatctctgtaagaccaccttacatgctggtcttagttattgttaaaattgcaaggtttcttcacaccctctttgataagaagtgtttagctggcagagctttcccttgacttctgagtctagtgtgggttggcccatgacagtgggaagaaatccaacatgttacatggagaccttgtatgtaaacaaactctgtagcctttgaaagtggaactgctttttacagttaaagggctgctaaatcgcttgcagatgagatcttctggctcaccttgatcttcacatgaacccattgtgacctatctggatttcctaggacctgtagtttccatttgggttatattagtgcctcaggaatgtgtcactactggtcaagcaatactcagaaattcaggctgtgaggggttagattagaggaaagtaatttaggtgagctatccagagctttcaacctcagggtttataggaaaaaaaaaacaaaatacaaaaacccttaggacttctcatactctagccctgaccttgcagtctcctctgaggggcctcctaagacccttaaaataatattacaataggactttgagtgtgcatttcacagtggaaatagcctctggctagcattacttccaaatgctagttccagctaaaaacaagtactttttattagtttcttgtctttcaacattctgccatcaaaatatattcattttattaacttaccgattattgggaactgcaaaaaaaaaaaaaaaaaaacacacatgctgtctgcagccactgtttggttatttttgatagtttaagagaattataaatcaagttgttctgtctactagagtcagaaattctgtgctagaatgggacttctaaaattaggtggtcctgtcactttctagagaaagacccaaattcataggtttaagtggcttgtctgacatacacatacagccagttagtaacagaattcagaatagaatagagttcttttttttctgcagtccgttgttctacttctctttccttttcttcatggttgagcagcttttggcaaaatgtgttccatatagcagtagttccaagagatgttaatagatgtaagaaaaaaagtgtgtgtgtgttgggggtgggggattgcatggtcaattaaaatgaaggaatgctgagtttgtttccttactgtaggacttctaagagttttgaacatgctattacacattgtgaatttataaaaggggacaaacactgtttgaccttagactgcactccccttctttattcctcagagcatctcaaaggactacagggtcctttgagaaacatggcccttgatcaagtttacaactctttgagaagacatccctaatggaaatactgaatggcagatctattactgtggtaccatgtagtgtgtaataaatcttgaagtccagaaagcaagtatatttgctgtttagagctatacttaaggtatagagattcttttccacctgtggtgtgtaaaatcagtattgtgtttaattttgcaggtttttcaaggatcaactaatgtgcaaatacagtggtgatatattgatattacattttaataatgcttttgtatggcactttatagttttcagacaccttttgtaacagccctgtgagacagacaatattatccttattgtacagatgggggggctctggaggctctgaaaagtttttggtgatattcccctaagtttataccacaaaatgatggagccagaatttagttgcagaacttctgactccaagtccagagttctttactagacatctggtttcttactagctttttgctagctttttattttacagtgaaaagtatggaagcaaatcctgataattttggcttattatcaaatatcatttattttttattgcagagacccagcagatgtaactctcattgtagccatcccaaagaaaacccttctttgccctttgcagtgccacttatttaggtaactgaagtgtatttccagtacaatttgattttgaactaagatttgatatagagttgtaattgcttacataactctttgaaaatgtatcatccctgggttctcaggtgaaagaggcaattcaaaagtaaaaaagaatattcgaatacaataaataccctctgttctcacacaaatgctgtttcttagctaacttgctttgacaacctactgatgtaacttctttattaatgtgaaatatttatattttgaaataaaattactagtgttgaatgaatcatgtggtaaaaaaaaaaaaaaaaaaaa

SEQ ID NO: 23175 - DNA, 2382 bp, Homo Sapiens
ggtctttgagcgctaacgtctttctgtctccccgcggtggtgatgacggtgaaaactgaggctgctaagggcaccctcacttactccaggatgaggggcatggtggcaattctcatcgctttcatgaagcagaggaggatgggtctgaacgactttattcagaagattgccaataactcctatgcatgcaaacaccctgaagttcagtccatcttgaagatctcccaacctcaggagcctgagcttatgaatgccaacccttctcctccaccaagtccttctcagcaaatcaaccttggcccgtcgtccaatcctcatgctaaaccatctgactttcacttcttgaaagtgatcggaaagggcagttttggaaaggttcttctagcaagacacaaggcagaagaagtgttctatgcagtcaaagttttacagaagaaagcaatcctgaaaaagaaagaggagaagcatattatgtcggagcggaatgttctgttgaagaatgtgaagcaccctttcctggtgggccttcacttctctttccagactgctgacaaattgtactttgtcctagactacattaatggtggagagttgttctaccatctccagagggaacgctgcttcctggaaccacgggctcgtttctatgctgctgaaatagccagtgccttgggctacctgcattcactgaacatcgtttatagagacttaaaaccagagaatattttgctagattcacagggacacattgtccttactgacttcggactctgcaaggagaacattgaacacaacagcacaacatccaccttctgtggcacgccggagtatctcgcacctgaggtgcttcataagcagccttatgacaggactgtggactggtggtgcctgggagctgtcttgtatgagatgctgtatggcctgccgcctttttatagccgaaacacagctgaaatgtacgacaacattctgaacaagcctctccagctgaaaccaaatattacaaattccgcaagacacctcctggagggcctcctgcagaaggacaggacaaagcggctcggggccaaggatgacttcatggagattaagagtcatgtcttcttctccttaattaactgggatgatctcattaataagaagattactcccccttttaacccaaatgtgagtgggcccaacgacctacggcactttgaccccgagtttaccgaagagcctgtccccaactccattggcaagtcccctgacagcgtcctcgtcacagccagcgtcaaggaagctgccgaggctttcctaggcttttcctatgcgcctcccacggactctttcctctgaaccctgttagggcttggttttaaaggattttatgtgtgtttccgaatgttttagttagccttttggtggagccgccagctgacaggacatcttacaagagaatttgcacatctctggaagcttagcaatcttattgcacactgttcgctggaagctttttgaagagcacattctcctcagtgagctcatgaggttttcatttttattcttccttccaacgtggtgctatctctgaaacgagcgttagagtgccgccttagacggaggcaggagtttcgttagaaagcggacgctgttctaaaaaaggtctcctgcagatctgtctgggctgtgatgacgaatattatgaaatgtgccttttctgaagagattgtgttagctccaaagcttttcctatcgcagtgtttcagttctttattttcccttgtggatatgctgtgtgaaccgtcgtgtgagtgtggtatgcctgatcacagatggattttgttataagcatcaatgtgacacttgcaggacactacaacgtgggacattgtttgtttcttccatatttggaagataaatttatgtgtagacttttttgtaagatacggttaataactaaaatttattgaaatggtcttgcaatgactcgtattcagatgcttaaagaaagcattgctgctacaaatatttctatttttagaaagggtttttatggaccaatgccccagttgtcagtcagagccgttggtgtttttcattgtttaaaatgtcacctgtaaaatgggcattatttatgtttttttttttgcattcctgataattgtatgtattgtataaagaacgtctgtacattgggttataacactagtatatttaaacttacaggcttatttgtaatgtaaaccaccattttaatgtactgtaattaacatggttataatacgtacaatccttccctcatcccatcacacaactttttttgtgtgtgataaactgattttggtttgcaataaaaccttgaaaaatatttaaacaaaaaaaaaaaaaaaaaaaaaaaaa

SEQ ID NO: 23176 - DNA, 5397 bp, Homo Sapiens
gcgcactggagccctggccagcgcgcagccttcccggcgccggcgggctgggtcttgggaattctggtttgctttggctcactcgctttttacaaaccactggatcttacatgcctctgtaccccccacttccactccatgtccccatgctcctgcgccagcaacaggacatgttctctggatgtcagctgagtcattaaagtaactctgcatgtcagtagacagaccttggtagaaccacaaggctcccagagacacccatctctcctcatttttttggtgtgtgtgtcttcaccgaacattcaaaactgtttctccaaagcgttttgcaaaaactcagactgttttccaaagcagaagcactggagtccccagcagaagcgatgggcagtgtgcgaaccaaccgctacagcatcgtctcttcagaagaagacggtatgaagttggccaccatggcagttgcaaatggctttgggaacgggaagagtaaagtccacacccgacaacagtgcaggagccgctttgtgaagaaagatggccactgtaatgttcagttcatcaatgtgggtgagaaggggcaacggtacctcgcagacatcttcaccacgtgtgtggacattcgctggcggtggatgctggttatcttctgcctggctttcgtcctgtcatggctgttttttggctgtgtgttttggttgatagctctgctccatggggacctggatgcatccaaagagggcaaagcttgtgtgtccgaggtcaacagcttcacggctgccttcctcttctccattgagacccagacaaccataggctatggtttcagatgtgtcacggatgaatgcccaattgctgttttcatggtggtgttccagtcaatcgtgggctgcatcatcgatgctttcatcattggcgcagtcatggccaagatggcaaagccaaagaagagaaacgagactcttgtcttcagtcacaatgccgtgattgccatgagagacggcaagctgtgtttgatgtggcgagtgggcaatcttcggaaaagccacttggtggaagctcatgttcgagcacagctcctcaaatccagaattacttctgaaggggagtatatccctctggatcaaatagacatcaatgttgggtttgacagtggaatcgatcgtatatttctggtgtccccaatcactatagtccatgaaatagatgaagacagtcctttatatgatttgagtaaacaggacattgacaacgcagactttgaaatcgtggtcatactggaaggcatggtggaagccactgccatgacgacacagtgccgtagctcttatctagcaaatgaaatcctgtggggccaccgctatgagcctgtgctctttgaagagaagcactactacaaagtggactattccaggttccacaaaacttacgaagtccccaacactcccctttgtagtgccagagacttagcagaaaagaaatatatcctctcaaatgcaaattcattttgctatgaaaatgaagttgccctcacaagcaaagaggaagacgacagtgaaaatggagttccagaaagcactagtacggacacgccccctgacatagaccttcacaaccaggcaagtgtacctctagagcccaggcccttacggcgagagtcggagatatgactgactgattccttctctggaatagttactttacaacacggtctgttggtcagaggcccaaaacagttatacagatgacggtactggtcaagatgggtcaagcaagcggccacaagggactgaggcaagcacaatggtttcaaagaaagactgtaagctccatgattagcataaagcactaaccatgtctccatgtgacccgatggcacatagatgttgtagaataagttatgggtttttatgttttgttttgtgtttttccaaaacttgaacttgcaggcaagccttggttgggtatttgatttatccagaatgcttctctttagggaacaaggatgtttttaatggcataacaaaggcaagactctgccttaatttttgaaaagctgctaactacatgaacacaaatgtgtatttttgttgcagtgtagttttccttttgtgtaattttaaagtcagtgttgaattttattgaaagctcatgatgcgcttcaaagtggcaagtatttggctattaactgccaaaacaagagcctgattttttgaggccagtaattcgtttgctagaattgattttttttctctctctctttgttacataagggcattatgtaacactagccgaatggtagcctctgggttgttgtttttttcttttcctccatgatgttaatgggttatctcaaattttaagttaaactacctaaaataaataccaaagataatgcatatttttgcacagtggagcttacacttaaaagaaaacaaagccccatgggctgccttgaaatcaagagacaataactttgaacctcagcaagaccttgaaccgccggttcattttgcaccttattcagaaaatagagcatcatactcaccgagtctagtcagtgtagtgcttttaaaaattttgtcctttcatgtaacttttttattttaagaggaagaagaagaaaggggcacacacacacaataccgacgtctatcctttcctgctaggcagtgctggccaggctcatgtgtagtgtgcgagatggtgatgtactcttatatttttctgggcttttccttttgcacattccaaaattcatttcataagacaagatcttcataggacctccttggcatcctggcattctcaaaactgagccatccagcatgaaagataaatgggtttaaacccttgctgctgaatttattgcctggactgtcaggacatcaccagcccaccttcaccttagggaagatgccacacctggcctccacacttgctcttctgatcagtctgtctggattgagtcctacagtgtcagatagggcggcaaatgccaaagcagggaaacagggaggtgtggacaagccagtttgatgcagcacttcagatcaagtgcttaggaaggagaggaaacttgccttttttatggcagaggatagtaatgaaaatgtctcagtattttagggtcaatgagagccataaaaatataacataatcacaagtaaaggagataatggtctaaaacagctatttcccttttctgtgtgcatacttatgactgaatgtgagctaagcattttctcctgtggagccctagagcaggttactaaggaaggacacattgttttccagaagcctcccctgcctggctgactgccttgctagaaacataattttttttttctcactgaagctcaataatggaactctttttttttttttttttaatttaaagttccctatttgtgaattctgggattactgacttttctttttaattggagtctcaaaatcaactctcttatggtattatatctctgtatgccattaaaaaacagcttgttctagaatcatgtattttgtaaactgatgtttgtgatggtctctggttcttgaacagccatatctgaatgccgtgcctgcaaaactatgacaatttttgctgttttcagccttcagatttgatggcttgggaaactgaggtgttattttcaatgaaacaaagaaagagatgttaagcaagtggttgttttagatccaaatgtaaaggcaggtttgggaaggtgtttaaagagttggaggaattggggattgagttgtaaagaaaacttacagaagaggcaacaatttggttcttgacagtgagaggatattgagggcttcagctgctgctattatgatgttttgcaaaggaaaataatcaaaccaaagagtattcagtgatatgtaaattaaatgaagatacagtggagaatgggggtgaccacaaaagaggctccccctaaacacacagtgctgccacttaaaaagacttgagaaatttgaaagggggtgggtatggggggggcaagaaagagggagggaaatctttcaacttatttctgaaaaagagaaaaaaatataaaatttctggtgcacaggtttgttttttcaagaaaattttgcagaagctatgtttttaaagtgtacattttataaagtttatcagatattttcatatttaaagccaaatgtaaatagaggtctgtaaagaaaaataattgccatagaaagtataatttcagtgcagtaatttctgagagctagtacctatatgctaccggttagcatggttttagcaaatatataccagccttataaggttcgtattgctatgttcttctgttatttatttcagcatggactgttcatttgaaacctttttctagttattagcgttttaacagttacaagctttaaatggcaattttttttttttttttttttttttttttttttttgtcaagagccaagacacaggtaatgcacgacattgattgctgcattttaccttcaaaatatttgtccttattgactgggtctccttaattaatgtacacatgtcattagaatgcagacggaggggactcaccatgaatatctggggttgattcccagatgtgtgttgcttctctattgcaagcagattccctgttggatttacttcggatttattcccttttaaagaatttttgcccatatctggaagggcactatatttttgggaggagccatagattcctggttatcctatttttaaacaaaatgtagacaaagtgaactctattttgattattgagaaaggagtagttttctatccctctaagagtatacttgaatcagacattttaaggatgtcactatggcactgttgtcatttccaaattcctagaaaagtttgttttactttgtttttattctgttaatgcattctttcttctctttacttcctttcttaccagtacactcctatctcaactctgtttatttgatgagttctgtcccgtaaatcatatttcccttacaattaataaatgtcacttcatattttataataaaccactcagtaaaagcaaaagcttgtcctgagaagtagagtgagttctttttcactctgtgtctaataatgttaaggtgggaaaaaaaaaagtgtggcatagctacctgcccatccccaaccctcagcaaagtagaatctcttttctggtaattttgggtttccgctctgggctctggcaagttgaacaatcctagccattgacaatcgtgatagttattattttcccatttgctgtctttttgtatctaaagtcttcctattgtactgcacaaaccatggattgtacatatttttatatattatgtcttattttattatttctaaataaaaaaattaaaaattgaaaaaaaaaaaaa

SEQ ID NO: 23177 - DNA, 4080 bp, Homo Sapiens
gcactcaagcagagaagaaatccacaaagactcacagtctgctggtgggcagagaagacagaaacgacatgagcacagcaggaaaagtaatcaaatgcaaagcagctgtgctatgggaggtaaagaaacccttttccattgaggatgtggaggttgcacctcctaaggcttatgaagttcgcattaagatggtggctgtaggaatctgtcacacagatgaccacgtggttagtggcaacctggtgaccccccttcctgtgattttaggccatgaggcagccggcatcgtggagagtgttggagaaggggtgactacagtcaaaccaggtgataaagtcatcccgctctttactcctcagtgtggaaaatgcagagtttgtaaaaacccggagagcaactactgcttgaaaaatgatctaggcaatcctcgggggaccctgcaggatggcaccaggaggttcacctgcagggggaagcccattcaccacttccttggcaccagcaccttctcccagtacacggtggtggatgagaatgcagtggccaaaattgatgcagcctcgcccctggagaaagtctgcctcattggctgtggattctcgactggttatgggtctgcagttaacgttgccaaggtcaccccaggctctacctgtgctgtgtttggcctgggaggggtcggcctatctgctgttatgggctgtaaagcagctggagcagccagaatcattgcggtggacatcaacaaggacaaatttgcaaaggccaaagagttgggtgccactgaatgcatcaaccctcaagactacaagaaacccatccaggaagtgctaaaggaaatgactgatggaggtgtggatttttcgtttgaagtcatcggtcggcttgacaccatgatggcttccctgttatgttgtcatgaggcatgtggcacaagcgtcatcgtaggggtacctcctgcttcccagaacctctcaataaaccctatgctgctactgactggacgcacctggaagggggctgtttatggtggctttaagagtaaagaaggtatcccaaaacttgtggctgattttatggctaagaagttttcactggatgcgttaataacccatgttttaccttttgaaaaaataaatgaaggatttgacctgcttcactctgggaaaagtatccgtaccgtcctgacgttttgaggcaatagagatgccttcccctgtagcagtcttcagcctcctctaccctacaagatctggagcaacagctaggaaatatcattaattcagctcttcagagatgttatcaataaattacacatgggggctttccaaagaaatggaaattgatgggaaattatttttcaggaaaatttaaaattcaagtgagaagtaaataaagtgttgaacatcagctggggaattgaagccaacaaaccttccttcttaaccattctactgtgtcacctttgccattgaggaaaaatattcctgtgacttcttgcatttttggtatcttcataatctttagtcatcgaatcccagtggaggggacccttttacttgccctgaacatacacatgctgggccattgtgattgaagtcttctaactctgtctcagttttcactgtcgacattttcctttttctaataaaaatgtaccaaatccctggggtaaaagctagggtaaggtaaaggatagactcacatttacaagtagtgaaggtccgagagttctaaatacaggaaatttcttaggaactcaaataaaatgccccacattttactacagtaaatggcagtgtttttatgacttttatactatttctttatggtcgatatacaattgattttttaaaataatagcagatttcttgcttcatatgacaaagcctcaattactaattgtaaaaactgaactattcccagaatcatgttcaaaaaatctgtaatttttgctgatgaaagtgcttcattgactaaacagtattagtttgtggctataaatgattatttagatgatgactgaaaatgtgtataaagtaattaaaagtaatatggtggctttaagtgtagagatgggatggcaaatgctgtgaatgcagaatgtaaaattggtaactaagaaatggcacaaacaccttaagcaatatattttcctagtagatatatatatacacatacatatatacacatatacaaatgtatatttttgcaaaattgttttcaatctagaacttttctattaactaccatgtcttaaaatcaagtctataatcctagcattagtttaatattttgaatatgtaaagacctgtgttaatgctttgttaatgcttttcccactctcatttgttaatgctttcccactctcaggggaaggatttgcattttgagctttatctctaaatgtgacatgcaaagattattcctggtaaaggaggtagctgtctccaaaaatgctattgttgcaatatctacattctatttcatattatgaaagaccttagacataaagtaaaatagtttatcatttactgtgtgatcttcagtaagtctctcaggctctctgagcttgttcatcctttgttttgaaaaaattactcaaccaatccattacagcttaaccaagattaaatgggatgatgttaatgaaagagcttcgccaattaagaagggccatgtaaatgtgggtaacctgattgttttgtcaaaaatgctaaagcggggtggggggtggcgcagtggcttatccctgtaatcccagcactttgggaggtcaagacgggtggatgacctgaggtcaggagtttgagaccagcctggtcaacatggtgaaaccccatctctactaaaaatacaaaaatttgccaggcatggtggcaggtggctgtaatcccagctactcaggaggctgaggcaagagaatcgctggagcctgggaggcggaggttgcagtgagcagaaatcttgccactgcacaccagcctaggcgacaagagcaaaactctgtcaaaagaaaagaaaagaaaatgctgaaggagttactcagggtcaagaaagttttcagaatgtccgtaagataacatcatcatgggacactacctgttgctgggtgctctgcggcttttacactgatgctgattgtgtgagatccagaaaaagaaaatggagttctacatgcccatctcacagcagggtcatcaaatcctgctagtgacacagaagctgacatccagctcccacccgccttcctcccaggttcggggagcaggtagagtgggagccattaggtgggctctgccagtgttgtcatagagtggcaagtcctccatgggatgggagtggcatgtgggagccttctgcatcatgcactatgaaaaaagaaaatttactatggggcaagtggttcatatagttaagtgattgtatatatatatatatatatatatatatatatatacactatggggcaagtggttcatatagttaagttgattgtatatatatatatatatatatatgtattccagtgtagaaagtattggctgggtctgtaatcaagtattccacagaagtgccttcataggtgctgaaacaggattatgagagtgacagacacaggactgaagacagggagaaaatgtgcatggctgtgagaatatattgctttgattctttgacttctcatgatatatgaaaacaaataaagtgggggggggtgacttcaataatatcacgaacatatttaaaatgaaattctgagcatggagaaaaatttcaaattctggtataaacaaataatctaaaaatatagataaggaaaaaatgttttcatttttttggtcatattgatttgggtcatatatgattgaccaaaaaaaaagatatttctaaaatcctggtgctttttcatttaaaaatagacaaccaaagaggaaaatgaacaatgatggaaattcgtggaagaggaaactaaaatggcaaaatagcatattaaatggcactgagccttggtgtgatcaaaaaaaaaaaaataaagcaaaatgagatattactgcttaaaaaaaaaaaaattaaaaa

SEQ ID NO: 23178 - DNA, 35809 bp, Homo Sapiens
aaaaaccatcttgtatgtggtgaagtgaaatataatttttacctcatatttaggaaggaattttaaatgacctttggatttttatcaagattcattagcactatttctgaaaacttgtttgttttattaaatattaaggtttcattgcctgttaagttcttatgaagctaataacctaaaagcaaagttaaagaaataatcatctttcctcctttagtccatttctttaatagcatactatgtaaactgttgatttcttgagaataagagcatgagttgtcatagtacattctcaagagctgtttgatgaaaggattttcttttattttgatggagaaataaagacacaaaaactcacttaaaattaatgcaaaaaataaatttctgagatggcatctccatatctccatttcaataagaacaataaccaagtcccatgtagaggccattactgatttcaatttataacaaaatgatttgtgcaaaaacgctgcaattgatatcatatctttcatgctaatattatttgcatctttgctttaaaatcatgctcatctggaactttctttaaggtaaggataagtataacatgattaccattgcttttctcttcttcaagagaaacccaaacatttaaaaggtcatgagtgatgcaacagaaccagtttttgaatcctcttaccgggtaaaaagggggctcttctgtaatctacaatttcaaatacatgtgcatgtcatgaaaggagtgtttaccatttccagtagccatcatcttagaaagtaagactggaaaaacggagtcagaactgggaatgctgtcccatcagagcttgttggggggcactcacgtgctctgttttgcctgtggagactgctggtaggaatgatgatttctggaagggaagggaggttggtgctggcctactgaaaattaagctcttcttttaccttcttgcctcttaatttggtgactgtgagattaccagtcacaggtagtcactgactactgcaagttaaggttccgtataaatatctgcatctttagaaccttggcccatttatgtcttggatgcattttgcttggagtacaaaataactcagtgatttcttcttcttctttttttttttttttttttttttttttttttttttttgaggaatgccatgctttactttagcctagattatagtttttgtgggttttttttgaagtgcttttatttgattttttaaaacagatgtgatatttagtgtgttaaaaatatagatatagttggccgggcacggtggctcacgcctgtaatcccggcactttgggaggccaaggcaggtggatcacgaggtcaggagatcgagaccatcctggctaacatggtgaaacccccatctctactaaaaatgcaaaaaaattagctgggcgtggtggtgggtgcctgtagtcccagctacttgggaggctgaggcaggagaatggcgtgaacccgggaggcagagcttgcagtgagccgagatcgcgccactgcactccagcctgggtgactgagcaagactccgtctcaaaaaaaatagatagatagatagagatatagttaattatcttatagaaaatgtatattttttaggatatcatctctattccttctatgttaatgaatcatgctctttagcattgatgaaagtttcaattttgagaatagtagaccttgtcaggtgtcactttgagtgccagcaaacggttgatttgaggcaagaagaataaagtttaaaaaagaaaataaatctagcatttgcttaataatttgccctttgcagcaccagaatcttatgtgaccacccacattcatctggttactgacgtggttcttgcttcaattgcagaagctatttttgcaccttttgtgtcttttgaggaaccgagtgggcctacttgcttataatgattcatgtctcaagtgcacagggtgtcctgaagtgctactgcagtggtgtgcagaaaggagggggaaactgaagcaaactacttcctttaagcactttgaatgttcacatgaagtggtactgcaggaaagcacactttaactgttatgttttaatgctttagttattcttatgggagatttgtaataacttgtcaggacaaaagggcgatttttttaaaaaaataacaaatatacgattatgggtattataatattatttttaagtaggtcttttatactgggagataaactctgttaagattgttgattaatctattcagattaggtagtttgatcttccatgcatttctttggatcatacttgaataaatattaattccatatatgaaaagttcctttcttcattacttactagacttttaaagtctgaattttgctttggttgggtttggattcctatttcagaatttaattttagcacaaagtataacattgctgaaataaactatagaaacaaatttacaacaaggttatctgagacttcatcctgcgaggtttagttgctaatacacccaaagaagttctgtagaaatctcagctttgtggcagaaccgtatcatggactacaatgacacaatttctagtgctggtacttgaagttttaactctagcatttcactgttacagggaattccctttaattacaagtatttattcaaaagatttaaactatgttaaaagaaaggaaattctttcctgggggcaaaaaaaaaaagcttcttgagagatccagttccaaattttctttcctaaaggaaggcaggttctgtgagtgaagaagaatgagcgtgcttattaaattcattacagatgtcatcatcttttaaatcttcttattcatcttttagattcccagaagttgtgcatgagttcctgtgaggagagttggcatcttggaaatcaaagacggttgtgatgcagttttttgatatgaggataacaggttaataactaaaatttatttattcttactctcttgttacattaaacttgaaaagctgttttggcctactatggactcatatataaactggagggaggaaacaatatattttccatctagagagaaaagtgttgttttgttgtattttgtttttcatagtagactagtctttttttttttttttttttttttttgtgacggagtcttgctctgtcgctaggctggagtgcagtggcacaatcttggctcactgcaacctctgcctcccgagttcaagtgattcttctgcctcagcctcccaagtagctgggactacaggcacctgccaccatgcccggctaatttttgtatttttagtagagacagggtttcaccatgttggccaggatggtctcgatctcttgacctcggcctcccaaagtgctgggattacaggcgtgagccactgcacccagcccaccaatcttaattataattaattatcattgttataattaaaatagcattattcgacagaatttatttctgacaaagtttattttcatgttagactctacttagtgaatcctaataacttttgctgtataatgagaaaacatctcagtagaaaagtgaaatcacaatttaaaaaattattttaaaaggtatgacaaaatattaaaagcagcatgctgtagccaaaataagtcataaatatcttgactaaataggcaaactctacaaatatatgcaatgatgcctgcattgcagcccatgtgaaaaaatatgtttgtttctcattaggctttaaatatcaaattagattttaattacatcaaattagaggatgatcatcacagtatttttacttttctccaaaagttttctgaattgcttggcaggattgtatataatagagttttctccatatagacaacttgctcattttggagagaactgaggttgttatgggaatttttactaaaagaagcctttataatgaatttggctctcaggaagccacctttttaaaaatcatcctgtggaaataagtctttattcagctggactctggcactcatcacgccttctttcttggtagttcctttttcccctcatcccatactctctgagcatatatgctctgagcggtggttgggcaatgagtgtctaagtgactcgtgggatcaatgttacaactacaatgccccgagatgttcatgtattttttaaagattttacaactgatctgtggcactttaataacaaatacaatgatgtcccttctaaaatgtcattcactaattattaccataagacacgtattttgtttacaagtgtcaaaccacaaatcctcaacaaaagacgaaatgtttagaagtgtcataccaccaaatcctcaagaaaagaccaagtgaccatttacatttttaaaaatgttttattattaaaatgttggaagtggagaagccgtgtttgctgccagtcattgtataccgtcattatttaggatgtcattatttaatgctcacttgacttttgccaccactcaagtaatgattaatttcctgaggtaaggtttttttctgagataatgttttcctaagcaaaagatcccagattgacaaccctgggtactgtaggtctttattcctctgcagagtaagcctgtcttcctgccaatcccacccagccgttatcctgaagagacctctgaggaggtccatctaggaggctgtttatgtgtctttcctttgggaccctgtctggggaaattatttaactgggtgccaaacttatttgagtgggactctgaagagtggccaaaggagagggcacacttctagaagaatgcctgctcttccctgtaatatcattttctttcgcttcagttcctttagttccattaccactgaaatagccatgcagaggtaatctcttttttaacatgatccccctctgaaaagtgtgatgagcctgccagacaatgtctgtctttactgactagaggactcctgtgggctgtagcagcatccacaggaaacccaaagtcatatcccctgagttttattctccagtaaattatcttactcctttcatagcacttaaaacccactagagaaaattttaactgtgaatgcaaaactgtatttggaattccgctcctttgttggcagtgggtgccaaaaatgactttgtgtgggtttggttaccataaaaggaaatctcagtgaataaagtgacgactcgctgttttcatatgagaattactctcatactgcattttttgatatatcaattgattaggaaacctggtatatattttaatgaaatattagagaatctgaaaaatgaattgactctacacagtcatagagaaatactgtagctataattaaccatattactatagatctttatagttctaagtggatctctgttgcagaaattaaactaaaattgcaggtagatacaatggtacatttaatgacttgtaataatgttatgaagtccaaagaaagtattttcctgacttaatgattcatttaatgtagatttccttatctaacatacttttaaaaatgttttgttatctataagcatttttatacattttagtaataaaatgtaagctcaagaatttatgccatttggaagagttaagttgcttagtaaaagtgtcacctaacaaaacaagacaaatgccattatctaatcttgaaaaccctattgtttttaaagtgaatttattttcctcagtataacatgagtggagtagcagagaaactttcaaaccctcccaaatcctgcttgtttttaaagagaaagtcatgccatgttcagtaatagattatgatgcacacaatttccattgcagaatcttttcagtttccaggataaagcagctgtagaaaagtgacaaatacaaatagtccatatttttaatggttcataaatatgatcaataaattctaaaagaagccatcgctcactttctctcccacctacctttctttatatgtctcagaaactccaagaagagacgtgattttatggatagcagttagtcaaaggctccccaaggatagtgttggagagaaaaagacatcctcaaatatgtttcaaatcaaatgtgaaagttcatgtgaaataagcatgatttctagttccctaataagcctttcactgaagtgaaaaactagacattgtggatcagaggaggggtccctgtagtgctgggacctccagcttaggcacaaagatggaagctcttcccgcacaacccaggagagaaagcatggcgtgggatatcacctagcttcctggtaaaatggtggggcatctcgggtaggcttgtcttagaaatttaaaaggaagagattttcttgacagaagctatttgcataattgagttaatgttttgaatcttaaaaactttctggataataaatgctgttggaatatagaaagatcctatgttaaacttagcaaaattattttttaaaataaagtgatagataagactttttttctgattatcctccttctcctaaaaattaaacaattaacttaatggtctagacatgttttgttctgaccatgaggtatctggttttgaattttgtgtaagtcactttttttcaacttctggtgtattctctggtagcaaaatattatttctgaattttatttgatgcatttactatatgatatgcccttagtgtataagaatggttttattattttataccataaaaattaaatgtctgatttataaaggtattacctcattgctaagtgaaaacattatattttattgaataacttatgaaataaattattccaaccctgttttttataaaattgtatgtacttattacttgaagtttatgctgttttttgttttgtttgtttgtttgttttgagatagtctcactcttttccccaggctggagtgcagtgctgcaatcatagctcactgcagcctcgacctgctgggctcaggtgattctcccacctcagcctcctgagcagctgagactacaggtacacgccaccatacccagctaatttttgtattttttgtagagacggtgttttgccatgttgcctgggctggtctcgaactcctaagctcaagcgatccacctgcctccacctctcaaagtgctaggattacaggcatgagccaccatgcccagcccctgaagtttatgttttgagcaaaattatatattctgtgtcaaccaaaagatagaaaatgatacatacctgattttcacttgtaaggttcttattttccttaaaactaatgatttccaagctgggcacagtggcttaggagctacttgggaagcagggcccagaggatcccttgagcccatgagtttgagtccagcctggacaagaaagtgagacccccctcctctaaaaataaaagtaatgattttcaaagaacaaaagaaaacagtctggcatgagactttattatggtcttacaagaagctgttctcattaatacttaatatacatattttgaacattatttaaattatggatttttttatttctaggaaatggcattttggggccattttttgtactacaaacatgcagagctcatttatattctctcagaaccattaaaagttgagacatttcatatattaaagttaagtggaaatatttagatgaagatattattgaagatgtattattttaagttgtaataaaacttaatggagagtagtggtgagtcctcccagacttagaagtcaccaaatttagatctgaattttgattctgaaacccaacctctctaagaatcattctcaactgtaaaataggtgtaataatacccttagcatagaggtataatgaagataaaataagacaatgtatatgaaactctttaacagtatgtatcagcccatggtaaatatatagtaaatgacagtcattatcattgttataattaacaatgaaactgcatacatagatcaataccatgataaaatattaaatctgaaaaataacttagaaattattcacttcaagctctgagtcctaattgaggattcatacatgcttgtcttgaattgaaaatgtagtatatttccattttagagggtatttatttacctctacaagtctggcagaggttgtgtctacatgaaccttaaatatttagttaattaaacacagtcagccaatttagattcaacattgtgtcttcttcttgttagcatggttcctggaattgacacaaggaaatttgcattggaatattatgagactatcatttgtgtttcgtttttgcctcatttcctgcagagggatgctaaagaaaattattgcacagcaaaaaattaaatccaatagcaaaactttttagcaaactgagattaatatctttgtttagtattttgactgctgctttacaaatctcttaggcttcatggccattaacagaaggaatctttgagtacagatgtcttactacaaatatctgggggctactgatttctcacccaaaagacttaccgttcctgtgggaatttccgggtgcttttcccctctcaaagtgcaacttctgtcatcatcatcatcacagtcaaattcgatgttagggagaaaattgcccatggaagtaagactactatttgagtttcgctttaggaatctgcagtacatctgcatggtagcattttaaaaaattattaactagtgttttatttaaaaagataaacatgctcatgttaagaaaaataaacaaaaattaaacttactgaaagtcatgagatggaaggtaaaaatcctttctttcctcttcctctgaatcccaggttccacttttttttttttttttttttttttttttttttttttttttgagatggagttttgctcttgttgcccaggctggaatgcaatggctcgatcttggctcactgcaacctctgcctcccgggtccaaacaattctcctgcctcagcctcccaagtagctgggattacaggcatgcaccaccacgcctggctaattttttatatttttagtagaaacagggtttctctatgttggtcaggctggtgccaatgctgcctggcatcctcacaggaattttctgttgatcaactgttcctctttttcacccataggattaacaatgtgtcttcgtactagggtgcaataagcttttcttgcatttaatgttactatcccctgaacaagtttctatattggtacttatagctgtactttatttattttaaatgcctcagttttatcattgagccataatttatttaagcggttcttgtacatatatattggtgtgcgcttgtgcaagtacacctgtaaggatatatttccagcagtggaatttctaggtcaatgtgtatgatcttttttattttgataaacggacacattgcctatcaaggaaacatctgaggttctatgacagtggatacagtttatcattgaagttctcagaatcctctgggtacctcattgaacactcccctaaggaagttgagtattcacttaaaattgaacgattacttagttgtcaagtcttcctgagccatacgccatcatctagaggactccttcactttgctatgatgtaaatttcctaaaagggaaatttattcttttaaacataaacattcaaacctatcagaaaaaaaaacccactattttcatccaggcgaggtggctcacacctataatcctaacgctttgggaggccaagatgggcagattgcttgagcccaggagtttgagaccagcctgggcaatatggcaagagctcatctctacaacaaaatacaaaaattagatggatgtagtggtgcatgcctttagtcccagttacttgggagcctgaggtgggaggatcgcctgagctcagggaggtcgaggctgcagtgagcagtgattgcaccactgtactccagcctgggcaccagagtgagactctatctcaaaaaaaacaaaacaaaaaacgcctgtatctcaacttttaatatctagggaattagaactaggctgattacatttaagtaactaagatgtttcatatataataatcttatgtcttagaaaatattactatgatgtttttataatattttctctgagttatttttgagtcacagtgtcagtgtaaggtttactcttctggtgtaatgctttctgaagcagtttcttgctttcgttttagggtacatagcattgtgaaccctttatataatgaactggaaattggaatttgtatttgtatatatcgatggtaaggtttaatggaacaattttccctaactgcatttattttgtatccaggaagcgtcaggacaatcatgcccataagaactctaaactgttcaggtaatcatttcgtttttaaactgtcctagaaatatgctttgttttctatattaagaagactttataattgttttgtttagatgcacccttttatcttttccaaagttctgtgacatctaattcttatagccttgatgtcattttattaatcactgattttaagctgtaaaatatagttatactttatagtaatatataatactttatgaattatgtattttataaaacatgtatcatatatgtatgcttatatgtatactatgttatatttatattttatattaatatgtaactatatatatggtttttttttgagatggagtctcgctctgtcgccaggctgcagtgcagtgacatgatgtcagctcactgcaacctctgcctcccgggttcaagcaattcccctcccttagcctcccgagtagctgggactacaggtgcatgccaccacacccagctaatttttgtatttttagtagagacggggtttcaccattttggccaggatggtttcagtctcttgacctcgtgatccacctgcctcagcctccccaaatgctgggtttacaggcgtgagccaccatgcctggccacatattgtttgtattaagctataaaacatatctctatatagagatatgtaatacactttggcatacaagtcataaaacttggttaggaatagctctatttttttttaatggggctttctaaaaccttatacttttgtagataatatccatcaaggattttccttcaaatggttttctaaagttaaaaagtatttaaaagagtgaccaaaattcaaacatggaagagacttatgttcatgacttaatgctgagtttgaaattaatatattttaattgtggaattaatgtaatctcaataaaaataattccttggagtaaaaaacatttcaaatttatctaatttctggttggttagttaggttttttttttttttggtttcttatttgaaactgttatgacaatctctttgtattttctttttcttcagatcattttatcttagtgaaactggcaattgaactttgctctagttgatgggcaaaatttctcctagactattcatcatcccaatttcatcctagttgaaaattttcaaatgccataagaaatctttatagatttgcacttagcttttggatggacgtttctacaatggagagaactgtgttatagccctggtccaaggacattactagctaatgcccatcgactgtggtgtgcgtgtggaaggttccaaagagaaggagcaatcagcaagtttgcagacaccctggaacatggaagcaaccaagctttaagaagcacagctttggagacactccatgagtctgcactgctttcaggggaactagcacttaagaccttgtgtaacaaaatggacactggggacacagctctaggacaaaaagctacctcaaggtctggagaaactgataaagcatcaggtagatggagacaggaacaatcagctgttattaagatgagcacttttggcagtcatgaaggacagcggcaaccacaaatagagcctgagcaaatcggaaacacagcatcagcacaactgtttggttctgggaaactggcctcccctagtgaagtggtgcagcaagtcgcagagaagcaatatccaccgcatcgtccgagtccttactcatgccaacactcactctctttccctcagcactcattgccacagggggtcatgcacagcaccaagccacatcagagcctcgaaggtcctccgtggcttttccctggccctttgccatccgttgcctctgaggacttatttccttttcctatacatggccacagtggtggttatcctagaaaaaagatttcaagtctgaaccctgcttatagccaatactcccagaaaagtattgaacaggcagaagaggctcacaagaaagagcacaaacccaaaaagcctggcaagtacatttgcccttactgcagcagagcgtgtgccaaacctagtgtactgaaaaaacacatcaggtcccatactggggagcggccatatccatgtataccttgtggtttctctttcaagacaaagagcaatttgtacaagcacaggaagtcacatgcccatgcaattaaggcaggattagtacctttcacagagtcagctgtatctaaattggacctagaggctggttttattgatgtagaagcagaaatacattcagatggtgaacagagtacagacacagatgaggagagttctttatttgccgaggcttctgacaaaatgagtcctggtccacccatcccactggacattgccagcagaggcggctatcatgggtcattggaagaatcattgggaggtccaatgaaggtgccgattttgattatccctaaaagtgggattcctctccctaatgaaagctctcagtatattggccctgatatgctaccaaatccatctttaaatactaaggctgatgattcgcacacagtcaaacagaaacttgcactaagactgtcagagaaaaaaggacaagattctgagccatcgctcaaccttctgagcccgcacagtaaaggaagcactgattctggttacttttctcgctcagaaagtgctgagcagcaaataagccctcccaacacaaatgcaaagtcttatgaagaaatcatctttggaaaatactgtcggcttagtccgagaaatgcactcagtgttacaaccacaagtcaggagcgtgccgcaatgggtaggaagggcataatggaaccattacctcacgttaacaccaggttagatgtcaagatgtttgaagatcctgtttcacagctgatcccaagcaagggagatgtcgaccccagtcaaacgagcatgctgaaatccactaagttcaacagtgagtccagacaaccccagattattccatcatctatcaggaacgaaggaaaactttatccagcaaacttccaaggcagcaacccggttctcttagaagctcctgtagactcttcaccccttattagaagcaactcagtgccaacttcttcagcaactaatctaactattcctccttctttgagaggaagtcactcatttgatgaaaggatgactggttccgacgatgtattctatccagggaccgtgggcataccccctcagcgcatgctaagaagacaagcggcatttgagctgccttcggtacaggagggccacgtggaagtcgagcaccatggcaggatgttgaagggtatcagcagttcatccctgaaggaaaagaaattgtctcctggggacagggttgggtatgactatgatgtctgtcggaaaccctataagaagtgggaggactctgaaacaccaaagcaaaactacagggacatttcctgcttgagttctttaaagcatggtggagaatatttcatggatcccgtggtgccattgcagggagtaccaagcatgtttggaactacctgtgaaaacaggaaacgccggaaagagaagagcgtaggggatgaagaggacacgcccatgatctgcagcagcattgtaagcactcctgtgggcatcatggcttccgattatgaccccaaactgcagatgcaggaaggagtcaggagtggatttgccatggctggacacgaaaacctttctcatggtcacacggaacgctttgacccatgtcggccccaactgcagcctggaagtccatctcttgtgtcagaggagtcaccttcagccattgattcagacaagatgtcagacctagggggcaggaaacctcctggaaatgtgatttctgtgattcagcacaccaactcactgagccgacccaattcatttgaaaggtctgagtcagccgaacttgtggcttgcacacaggataaagccccttccccttcagagacttgtgacagtgagatttcagaagccccagtgagtcctgagtgggctccacctggggatggtgcagaaagtggggggaaaccctctccatctcagcaggtgcagcagcagtcctatcacacacagcccaggctagttcggcaacacaacatccaggttcctgagattcgagtgaccgaggagcctgataaacctgagaaggagaaggaagcccagagcaaagagccagagaagcctgtggaagaatttcagtggccccagagaagtgagaccctttcccagctccccgcggagaagttgccacccaaaaagaagcgtctgcgacttgcagatatggagcactcctcaggggagtccagctttgaatccacaggcacaggcctctcccgcagccccagccaagaaagcaacttgtcccacagctccagtttctccatgtcttttgaaagagaagaaaccagtaagctttctgcacttcctaagcaggatgagtttgggaagcattcagagtttctgactgtccctgctggttcatactcattgtctgtcccaggccatcaccaccagaaagagatgcgacgctgctcatcagagcagatgccttgtcctcacccagcggaagtcccagaagttcggagcaaatcatttgattatgggaatctgtcccatgctcctgtgtcgggagcagcagcctccacggtatcaccgtccagggagaggaagaaatgctttctggtgcggcaagcttccttcagtggctccccagaaatctcccagggcgaggttggcatggatcagagcgtgaagcaagagcagctggagcacctgcatgctggcctccggtccgggtggcaccatggcccgcctgctgtgctgcctcctcttcagcaagaggacccagggaagcaggtggcgggtccttgtcccccgctgagctcggggccactgcacctggcccagccacagatcatgcacatggacagtcaggaatctttgagaaatcccttgatccaaccaacatcctatatgacaagcaagcacttacctgaacagccacacttatttccacatcaagagacaattccattttctccaatccagaatgccttgtttcagtttcagtatcctacagtttgtatggttcatttaccagctcagcagcctccctggtggcaggcacatttcccacatccctttgctcagcaccctcagaagagctatggcaagccctcttttcagacagaaatccattcgagctatcccttagagcatgtggcagagcacactggaaagaaacctgctgagtatgcacacacgaaagagcagacctacccatgttattcaggagcatcagggctacacccaaagaaccttcttccaaagtttccatcagaccagagcagtaagtcaactgaaacgccctctgagcaggttcttcaagaagattttgcctcggcaaatgctgggtctttgcagtccctcccaggaacagtggttcctgttcggatccagacgcacgtaccatcctatggaagtgtcatgtacacaagcatttctcagatacttgggcagaatagccctgccattgtcatatgcaaagtcgatgagaatatgacccaaaggacactggtcaccaacgcagccatgcaagggataggattcaacattgcccaggtgctggggcagcatgcgggcttggagaagtaccccatttggaaagcacctcagactttgcccctcggcttagaatcctccatccccttgtgtttaccttccacctctgacagcgtggccaccctgggaggtagcaagcgaatgctttctccagccagtagcttggagctcttcatggaaaccaagcagcagaaaagggtcaaagaagaaaagatgtacggacagattgtggaggagcttagtgctgtggagctgaccaactcagacatcaaaaaggacctctcccgcccccagaaaccccagctggttcgacaaggatgtgcttctgagccaaaagatggcttgcagtcagggtcatcttccttctcctcgctgtcgccctcctcatctcaagactatccttctgttagcccgtcttccagggagccattcccgcccagcaaggagatgctttccggttcccgggcaccacttccggggcagaagtccagtgggccttctgaaagcaaagaatcttcagatgaattagatatcgatgagacggcatcggacatgagcatgagcccacagagttcttcattaccagcaggagatggtcagctggaagaggaagggaagggccacaagcggcctgttggcatgctggtccgcatggcctctgcccccagcgggaacgtggcagactcaactcttcttctcacggacatggcagatttccagcagattcttcagttccccagtctgcggacaacaactactgtgagttggtgcttcttgaattatacaaaacccaattatgtgcaacaggccaccttcaaatcctcggtttatgcttcatggtgcattagttcctgtaatccaaacccatcaggattgaacaccaagaccacgctggctcttctgaggtccaagcaaaaaatcactgcagaaatttatactctggctgctatgcataggcctggaaccggcaagcttacatcatcaagtgcttggaagcagtttactcaggtaacaaatactgttttaggaagaactttgtattgtggatttgattgctgagcagactacatagtgaaggatataaggcctaaaaaaaaaatacaagtaaaatgaaggtcagtgtgggggcgttttcagaaagtctggccttactcaggagtggaagaagccactgactgcacttggttctgaggtctcaggcatggtccattttcagaagaaaaagcctacatttatgcttttaaaatttaaaaatttgggtgccatgaaatcctaccactgggattaattcccatgggttattttccttctgacctttgtgagtgacctagcaggtctaattttctctggatgtgaggaattcagggaattgtgaagtgggccatagagcagggaatggaggctgaaaggaaagacgaagaaggaggaccgagctttgcaaatgctgcagggcttactctcattgacgagacatctgtctccttcaaaacttatttttccaagttgctggctggtttattcctacaagaaccatcaatgccttccatgtaaaattataaaaatattaaggggaattttgaaatttctgctaaattaataaggaggcaaatagaggatttaaaaatatgttttcacttttatcagttaccattttcccttcaataatttttgagactacttccttaattaatatagattgttttcattgctacttcaaaacatagaatgtgtcttttaagtattagcattgcacagagtgctgagtgtatatgtgtatctatatatttttatatataatatatgtacttattatatatagctgtaacagaatgttgaatttattcagtggaaactgtcattcttatctgattttatccctagtggtccttattttatataactagttcctggccttttagtacagaatttaggctcattttcagagatgatggaagagtgggacataggggctcctgtgtcttggagaaagcatgtgaaatgattctctcttcttgtcttacagatgaaacctgatgcgtcctttttatttggcagcaaactagaaaggaaactagtgggaaatatcttaaaggaaagagggaaaggagatattcatggagataaagatattggatccaaacaaactgagccaatccgaattaaaatatttgaaggagggtaaggaaacaaagtgcaaatgtaaaatgtgcagttataggtcagagtaaatggtccagaatgtctgcatggaaaaggtactgtctaatctggttgaaagctgaaagtaaattccttttctattcacagttctgaactctggctggtaatagatcataagttcatgcccttgcctttgggatttgctttgcaagaaaatgtccctaatggatatcattcaagcctcttccttaaattttcacccctctaatttattatgaaatctactaaattggtggacacttgatgtcatctaagtttgttcattctttgatcattttataggtatttgttttattgacggacatatttttattgtatgcttacaaaaatcagatcatgcacaatcatgtataatcttcagaactagttaatttgtttgtttgtttttcttattatctaaactagaggctttaatgggatttcaccagttccatcaatatccttttctgtcccaggatccaagtcagggtaccacattgcactcagttgtcttgccttttcagtcttctctggtgtatgacactttctctgtatttaggaatttcttttcaaatcttgagtcctgagtcatagaaactcaagtaataaggttcaaagactttgttatttgtatagttaagaaaaattacacatatgtaatgtcttgttttagattttgatagaaatgtatctttcatccagtcacatagaaggaaaagcctacacttatgcttctaaaatttaaaaattttgaagcgtgctaaccacattttggagattatgatgtaattagccttatctctacaacaaatctattatttacatatcttcatgggcatgactttattccaattatatttggaggaaataatgttacttgtttgactataaaatgtggaatgttcagtgagatgaaatatccatttctcacctagcattaccggtttggagatggattattctatttggttgtcccttaggttttgccctctttggatatctagcattttcaccactaaaaccacaattgtatgtagtcatgaagcttgtcttgatatttttttgacatcccccatcttttaacacaaacgagagaaatatagattttatctctcctcagagactgagaggtccctgtgactgaatcaaccctctcacattcagcagccttcatagcagtgtacttgcaccaatagattagcgagaactccacaattactgtatgctttggggagcccatctccactaacgaaggacacaagtgaaaaagcgtatgtgaacattttattgctgtgttttggtgatccaaaaggattgtgcccatatttcatttcctcctcctttaattgccccgttttatgggctgtgtcccattacttcttaatctgtggcccaatttctgcccagtggtgaccaagtgttttttccaaaccttgtgttacctcctcttattttggcaattgcaaagtgatagctaaaaaaataaaaagtattactgaccaaaattgtaagtgtatattgtctaactgataggtttaataataaattcaataatttagttaaacacagctttgaatgtttttcaaaatccatcaattaccttatcaagtagattcatgggcctgtagaactgttgtatgatatattatttataccagtttctctaatacatcattatattttatacagaattttactgtattttcattctggaagcaagttaatcagctaagacattgaaaataaaattatactgcttgatgataaaatgcatttcccatcactatgatggcaggctatagtaagcttgaagtatccttccttgaagaaaattagctttgtacaaaagtatttgttttagtctatatgtcttaagcaatttcatctagttaggggcagagaatagtgaaatttaaaggtgaaagacatttgcatctttagggttttttctactttattgcaaaagacaaagataaaattcaaaataattttgaagaacaagtggaagtcaaaattcctggtaaaaggggggaaatttaaaggaacggaagacatgcaaaattgattattcatagttttgaatagtttctacttaactctcatctggattggtactgaccaaaaagtagataacgttaagattagatgtgaatccgtaacagagttgctgtttaaatatgtggatggatttcctttcttaaaattatttcaatagattggatgactgaagttaaacttgcctttattcctgtttgtggattagctaggataaaatgaggaagtttgcaatgctcttagaatgtaaaaaaactgtaaatttagtgcctttaactaaatccacagtggattagggcattttgcatgtcagtttacctttggaagttatgaaaagaactccccaaatggagcgtctttccaaaaataacattagacccaaaattctagcctagctttgacttaagagataatgacagtcattgaattagtccgtataatactactatatcttatgacaaattatgttttattgtattctaaaatggaatggttgagcattgggtagatttcttcccttgattatcaaagaaaatacctaagactgtttttctagccgatttgattaagcaagatgacctcagatatcctttcaaacatctctatgaaacccttctggaaacaaatgcaaatttgattaaaaatagaatctctagttttcattatgtaactaccttgaagaagctagttgaaatttagactccacattattacagattcatggtctttgggaagagcagatcaaatctgtagacaacagttggtgagctgagctcaccctgtgtaaactagaaatttctgaggcactctcgtgccaggattgtaaaaatagagtaggaacttgcagtgaagaattctattatcagttatacttaatttagcaaatttagagggttgtatgtttgtacatgtacatcttagatgatgtaatgttaacaaaagatacatgatgaacatgttggtatgctttttgtatgtcccttgattggaggccatactagaatccagtccaaaggtctgcagctctttgaggtttacataagtcattttgaacatctacttcccaactctataaattcacatgtaatagtgaagccaattccattttgaattccatggagcattacattttgtttacagtgccaaatctattatctagttctttcagccatttactgcataaatttcacaggcttcgtagaagtaaagttgaataattgtctgcaaaagaccctcataaaactttgccgtgcaaataattagcttttgctttaatatatagcatgctaagaatatttgaaaacacactggattccctctttttaaaacaggtacaaatcgaatgaagattatgtatatgtcagaggacgtggccggggaaagtacatttgtgaagaatgtgggattcgctgtaagaagccaagcatgctcaaaaaacacatccgtacccatactgatgttcggccttatgtatgcaagttatgtaactttgccttcaaaacgaaaggtacaagtctgatttttttgagaggaaaaatacttctctatggctacttagatttctgagtgctattttataactaaccttcatcaacaataaagatagtttgtttgtgaaaatatgattccacgaaatatattttctccctcaagtaagtgatcaaaggatgtatgtgagactgtgaggctccttttatgacttaattaagagcagtagacataggtccaggccagttgtctccaaaggaagtggctacaaattgtctggatagctattacttcatgttggaaatgttatgtggtctagataatatttacaccagtattgaaatcctgcacatgcagtggtattagagaagcaaggcagcagctgggaagaaaacatgtgctcttggtcagtttcaagattataaataatgtagagacccacacactcccaggtgggtgccttcatccacagttgcattaattatgcatagaaatttgatagcttgtgttccctgtttttatcagcacagagacaatttctgattctcagtacataactgttagtcttataaaactaggacttgccttaaaatttttttttaaaatctgtttttaacaggtagatttatgtaaaaatattttactcaaggaagttgcttcggttatatttttattttttataatattatgaaaatgttcataagtctggtagtctcagaatacaaacagtagtgaattagaggttgttcgacttttgcagaagtgtgttttaccttaggtttagtggatactataggcaccccctcaacactttaaattttcatattgattaatctgctcattcaagaaaaagaaataccaagtaaaattatctttggtagagaaatgtatacctatattcttttatagctgaaaatcctaaattgctagaagtgtaaatgggtagcctctcaacatatctgtttctcttttattaaaaagatctatgtaatagaattgcctcatttgaagctgaaaaaagtatgtgttcatttgtgtctcaaaaaataatcatatggccttttaaataccactcacctctgcacaatcaagccttttatacagaactttactaagagattccctaggagataagaaaataaaaactttggtttcagggaatattgcaattcaatagtcattacgaatgatacatatcttcactgggcatatgagtttgctgcaggtatagttgtgtgaaaaactggatgaagaaatgacacatctctagatatttttaaaaatcaaattaagtctgcctctgaatcatcatctcctgaaggaaataatttattcttggtcattattggagtttccttgtcaccctttgggaatgtgcaaatgtctcagaatcttaaaatgagcaaaacatcctgggaaaccctgccagttttcacctccgactgaaatgcctgttgtccaaacccacattgtcgtctgagcacagatggaacgcccttgcatgaccaatcccttctccttgtctgtgccacttcttcaggggcctcccccgccactctccttccctctccttgtccttatacattacttctgcagctcatgactttaacaaactaaagccatggtagaattgtttcagatccagatttctagctacagacctattctgaagatgggagtctaaagcctgactatccttggaatggagagaaaaatgtaggagaaagaaacacatactaaaatctaaataaactatcccgatatgcttagcatctatacctatacacatccatagcgtacttgcactctggcacaagtgatgatttttattaatttgtagatacatttcattaattttctagatttaagcattcttgatatgtctataacatttttgggctctttaaaaaatggtagatataagttttgataaataggaggagtgggggcctggaaatatttctgtttggaattattcaaaacagcatgtaaaatttataagtatataagcaataagtaaataataaagcaatatgagtaaaataataaacaacagtgtcccagttttaactgtggctcatatattacatgaacagcaagctgaacacccctaccagaggaataaactgtgctagcaggctgagtttccacggagatttcacagagccttctcttaaagtatttgttggtacattgctaaagcgttgtcaagggcacagataacattatggctattttcactgaagtgatgtaaaggcgccttacaactgaattagttcctgaatctcttttgataagttatatggcatataatttatatgtatgtgtgtgtgtgtgtgtgtgtgtgtgtgtgtgtgtgtgcattcttctgtagatcctgggtcaacgaggattggaacaatgttttcaaaatttctcacatttcataaagcagttatacaaattatatatataatttatatccacacatgcatatacacatataattgtatatgccattatcattataacatattcagcatgaaacctttcttttttgttagtgtgataggagcctgaagataagtaaagagggaatgttgctgctccagaattttaggaattgctgtcataacttttgctaacatatgccagacagatagatgctaaatactgggaataatgctccctatgagtagttagctaattatttgtatggatctttcagagcactgacaaggttggccctcacattagtttgtatgtatttttcttctgaatggtgaagatccttggaggttactctgtacctgatcagtcacagaaggtcaggggcccagtgggtgtgttgagaatatttcattctgaagtatctctgaggtgtgtggccagattgcgtttcctgtttatgtggagtcccaggaggctggtgtatttgggtagatatgaggtcccttctcaggcagaaaagcctgggatttctagtcttgctttgagcctactcttgaaaagatgtgagcctggacttccacatatcttctagaataaagaatatctgagattgggccaaagctctcagggattgatatcttcaaagaccagattattcttcttaaggttgaaacaaggggtagtgggtagaaacaaatctgtgttacatgatgaatttaataaaattagttcatttcacattgaatttggagcagctatcagcagttattaatttgataaccaattaatttctctcttttttttgctacattttcaaggaaacctaacgaagcatatgaaatctaaagcacacatgaaaaaatgcctggaattgggagtctcaatgacatcggtggatgatacagaaactgaggaagcaggtgtgtatgtcataaatgagttgacagacctcttcattatgcacagtggagctctgtggctgaggtagtaaaataagtttagatatttttaaaaagtgatcacttttcattttattaaatactaaatatagaaaataaaactgacacattgaattgcttgaaatctactgagaagaaatgcatttcagttttgactccgagggcaaaaaaggccttactttgaaaatacttatatttagagccttctatgaagggaatagaattgcacttgctttgtgatagcaaattagattttatgaggctttttgggaaatttgaaaagcattttaatgtattattattcaagttaagaagaaacccagtaggaaaacaaataaactagcaaacaaacatcattaaggttggccagacctcctgagatacatcacttagacatacgtttgtacctgagcttgcagagacaggttgttgcctttctttctcctctagcatcataattaacattatccatgctcatttgttgagggttttctgtgagtgggatgatgtctgagatataaagtcctactatggaatctttcttgtaagttggggatgaaaacaaatagatatacaagaagatagaatgaacgcagggtcacacaggtaagtgcctcattttataggagttctcagacataactatctgtgggcactagggattgggaaaagcgtttagaaagaaatgaggcttaaataagatcctaaccttgacatttggatcttgatctccattatctttgtttaattgtttcagaaaatttggaagatttgcacaaagcagcagagaagcatagcatgtccagcatttcaactgatcatcagttctccgatgctgaggaatcagatggtgaggatggagatgataatgatgatgatgatgaagatgaagatgactttgacgaccagggagatttaacaccaaaaacaagatcaagaagcaccagtcctcagcctcctagattctcctccttgcctgtgaatgttggcgccgtaccccacggggttccttcagatagttccctgggacattcttcgttgatcagctatttggttactttgccaagtattcgagttactcagcttatgacacccagtgattcatgtgaagatacccagatgacagaataccagaggctattccagagcaaaagtacggactcagaaccagacaaagacagattggacatacctagttgtatggatgaggagtgcatgctaccttcagagccaagctcctctcccagggacttctcaccctcaagccaccattcctctccaggatatgattcttcaccctgtcgagataattcaccaaagaggtatctgatacccaaaggagatttatctcccaggagacatttatcacctaggagagatctgtcacccatgagacatctttcaccaagaaaggaagctgcattgagaagagagatgtcccaaagagatgtttcaccaagaaggcatttgtctccaaggaggccagtgtctcctgggaaagatatcacagcaagaagagacctctctcctagaagagagagaagatacatgaccacaataagagcgccatctcccagaagggctttataccataacccaccattgtccatgggacagtatttgcaagcagagccaattgtattggggcctcctgtaagtataatccacttttctttctaatacataagtggaagcacattggtcctcctgataatgcactggtgtgaagtttagtagaacatgggtatctgtcatgggtggagtgaatctggctaatgaaaatagcggggagacatttttgtcatatgctattgtcagtaacatggctgtggcattacctaaagtgtagtattgcatcagagcagcagtgcattcccagtgggaacaggtgaggcctttctgaaggctttctaaacttaactaatgatagacgtaagctgaagcctttttgtaagtaaaaaagatgaacctttagaatgccatgactgcatggacatacactcacagggacatttaggcatcacttatataactcatcaccaggtaaggattctgattcagctgttaaccttgactttccaaaacttttatttttaaaatttttattttatttattttttttgagacagggtctcactctttcacccaggctggagtgcagtggcacgactttggcacactacaacctccgcctcccaggttgaagcgattctcccatctcagcctcccgagaagctgggactacaggcgtgtatcaccacacctggctaatttttgtatttattggtagaggcagggtttcaccatgttggccaggctggtctcgaactcctgaactcaagtgatctgcctgcctcggcctcccaaagtgctaggattacaggcatgagccactgcgcctggcctcaaaaactcctttttttaataaactctaccttgcccatcatgaggggacatgtgaaactggtcagggccagggagaggagagaatgacacactcggcatgtttataaatcaaagacatgagcctgtctgcttttcttgccattactactatcaagtgcacttgctcagtggaagcgtgggcccaaggagaacgggaaatcaggagagctaagtgagaatgtgcagagatttctatgatatgccttcattataagtgaagataacagtaaccaccatggattacatttaagcagtaggtttaatacaaattcatataaaagcacctgtcctgcctaattccacggctcagtagactgtgatgtctctttcagtttgtgtaggattttaaaaaatgaataaagcatgcacttagcatagacagaggcatgatacctttggaatctgtctgccttgaatgtgttttgatttcctggtttctactctttgttgtactcccttgctccggatctctgtgtcaagtgcatcagcaccatccttcacagccagaggagacactgccagctcccagctctgttttatcactgccctggcagccaattttctccctctcatcaccttccaccaccctgaatcctgagctcagcctgtcattttttcactttaggaaagctgctgcattcctgtccccatccccagcaccatcttttcacaagtctggtaccaacttcatcttgatgaagcaattcctgcagaaacatatatagcaattgggatgttgtttaccaagctaacaaattagcaagctaataagaaaaagagatacatttccacaggttttggtgccttagcaaaagtaggaaagagggatcttctgcagtttatgccattgcagcatgaatagagaactgtaaatctcctggatcatgggataccaagtctgggatgacacatgctttctctggtatacacgcagtgatgctggcagagtgtgttagatgagcctctccctgccatccctgcagcttgtgttctagcattggccaggtggattgagagtgtggcatttgtgaaacagtggtgcatgttcagtcaactgcaaacatgcgattcttcagtcagaaaaagtaagcctttatcgcaaacatgctgtggttgtaaaaatttatagcaacccacagtcaagttaggcaaaggaattggaagagtggactaagggagttcatctgatttttagatacatgcccagaaagttagagagagatgagttttagtagtcactgagtttgtacaagtttttttgatgtgtttttgttttgtttcatttttttttaaatatctgatcatgggtattattattattttgagatggagtctcgctctgtcgccaggctggagtgcagtggcacgaccttggcttactgcaacctccacctcctgggttcaagcaattctctgcttcagcctcccaagcagctgggcctataggcacgtgccaccacacccagctaatttttgtatttttagtagaaacatggtttcaccatgttggccaggatggtctcgatttcttgacctcatgatccgcctgcctcggcctcccaaagtgctgggattacaggtgtgagccatcgcacctggctgatcatggttatatttcatagtgttattaaactttatcatttatgatgcttttggcctgttacccagtttaattctctttagaggatgtatagcctgctgcattgttcacatggtatgagggaacagatctgggaatcctccctgatgtagggacagttcgtcccaagcactgcccactttatgctttctcacaccacaggacactgactgtggtgtgaagggaccttacagcccagtcatattctgcctgcgtttggagtaatggtgatcatagccaacacaggttgggaagaaatgaatgaattcaaatgcagattgtgttaagtgtatgtgcatatatatgtatgcacacatatacacatatgtacaaatgtacctacacagacatctatatatacatctatataccagttctattaccccactcatctcttcaacagtgtggcagtaaggagctctagacacaaatgatgagaaggaggtagaagtgctccagtgcccctgttagttttaattttaagacagatggatggacggatagatagatagatagatagatagatagatagatagatagataaggtatcttttatccatttattcagtatctactgaatttttgagggtctactacgcatggttcgaggttgaggatgaaataatattatggctgtggccttatctttttttttttgataaataaatttccttttccattttaaagcttttgtagataggtagcaggaagagaaacaaaggtgtgtccaggccctcagtatgtagtgtagatgaagattgtgtctagggaaacagtcaacattcattcctatcccttgttatctgtgtgatcttgggcgagtcacttaacctcttgaccacagttttttaatttgtttctggcagccagggaggtggcccatgcagatttttgttcctgaaagaacgtgccattcagctgtaaggaatgtagtgggcagacaagcctcctgctggcatgtcagcaccttcaggacaggactgttttgaagccaaagccatgctctccctgcagccccagccagtgactgagcacaaatgggtcacttctccttctctgctccctgctgcccccaaggaggctcttgctcttctacctccctctcatcatttgcatctagaggtccctactgccatactgttgaagagatgcgtagggtaatagatctggtacatggcgtatagatgtgtatatagatatctgtgtatgtacatttgtacatatgtgtatatgtgtctatacatacatatgcacttaacataatctacatttgaattcactatttgtttttccacgacaaaattttcttactgagatttaagtaagatggaagtttgtccaccacatttataaggcccaaattacaaaacaataggattgcaaatggagtaaaaaccaaagtagagaaaacttattgggagtttctttggaggatgaagaaggggtgaatgagaggagagaggatgtgtagaaatgcctggtggggcttggagcagtggaagtggccacatggtagaaattctacttgtacacgtagctctgtggttaaaatcagtgaagggctgaatttgaaactttcattagtagcactaataagattttattggatttagaacatgctgagtattattgtagttttagaggacaattcatgactccatttgtcagcctggatttggggatctcaagtcagtttacgtaataggacatctctctctctctctgacttctgttccacttccttggtttccccacagatccacattctgactggttgtatgcaatggaggtcatggaatagcagccagaagtaaaacagaaaaataaccaagctcggttttattttaaactttgaatctgtgattgctgtgattaaaagaaaacgtacttgattatcttcaaagatcgttactgtaggcattacaggtcttcctcccaaactggtgtttgatgaaggagacgtgccttttccaaacctgattaaatacaagggggattttgtctatgtgcagaatttaaatgattctcataccgtaaaattcccacctttcccagcttatgaggtcgtggtaacgatagtgttaatgattgcaccgtttcactcacactttcaggagaatccatgtttccagcttgcatatgatatatcacagagaagggtaagggctaagcatcttagagagtagcagaaatcataatctagatagaactggatgaatctttaatgctacagagcataccttgagttttagaactgaaactcttgaaatagaacagtttctttggctctatcctggactactaccatactgtatgggtttatatctatctatctatctttggttctcaaaaaatagaaaaataaatgaagtcctttttagatgacaatccattaaagaatgaatcacattaattaaaatatgataatattaaaacctgataatctgacaatctaagttgtatttcactacagaaacagtatagaaaataaattctccattttcaggactaggactatgaaatctgaaattctggctgaacattttaagcatccttaattcattgattgccaagaagatattgaggtggaaatgataatatgaacaaaagaattaagatgcagtcatctttggttcacagtatagagttgaatataagttgttaactgtctgaaataatgttaactacttctatgatggatagtttcctttaaaaaattattattgatgtaagacttaaatggacttggtttgttattggatggagaagctggccttctgcattgagtatctcttagcaggaatgcattcctttagaccaatgtcttacacattggaggaaccagtttgtggatcctcaccaccgttttgtcatctgttctgtggaaaactttttaaaaaagccaattttcagacttgtcattccaattatatactcatcaacacttaagaaaaatattaaaaatctgtccagtatagcaacagatggtaatctttttatttccttttgaattaaaaaaaaatattattaatgtttattagtgttttttgctcagtaaacttttttttttttgccaattatccattaatttcttttcattatctcttgtgaaaaaaacagagctgaaatgtgtctctgtacccaatggaaaacaccctgactgctttatcaccttgctgtttaaaaacaaaagcaacttttcacaggccgacacctttattcaaggattataaaagacaacagagaaatctcttttgtcttgaaataggaaaacttgatcaaagaattaggtattgaagcctctctaggtagtgaatgtgtgaatgggtgagtgaatgaatccaacagcttgacctaagaatgaagcgtagcaggctctgaattttgtgctctctttgtttctctgcgcagaatttaagaagaggattacctcaggttccttacttcagtctctatggagaccaagaaggtgcttatgaacatccaggctccagccttttccctgagggtcctaatgactatgtcttcagtcatcttccactccactctcagcaacaagtgcgagcccctatccccatggtgcccgttggtgggatccagatggttcactccatgccgccagccctttccagtttacatccttcacccacattgcccctgccaatggagggctttgaggagaagaaaggcgcgtcaggggagtccttctccaaggacccctatgtgctttctaagcagcatgagaagcgaggtcctcacgctttgcagtcatctggtccgcctagcactccctcctctcctcggctgttgatgaaacagagcacttcggaagacagcctaaacgcaacagagcgggaacaggaggaaaatatacagacttgtacaaaagccattgcctctctccggattgccacggaagaggcagctctgctcgggccagatcagccagcgcgggtgcaggagccccaccagaaccccctgggaagtgcacatgttagcattagacactttagtagacctgagccaggtcagccctgtacctcagccacccaccctgacttgcatgatggtgaaaaggacaattttggtacatcacagactccattagctcactccacgttttacagcaagagttgtgtggatgacaagcagttggactttcacagcagcaaggaattatcttcaagcacagaggaaagcaaagatccttcatcagaaaagagtcagctacattgatctatgatgcatggagactttcatttccacattttcccatttttttgtttttgtttttctagaaatggaggtaatccagtttatagcatgcctgtcctaagttacagtagtttgctattatatatacttttgttatatcaaaagaattaggtaaattaacaagtcatcatgagcctgaccaaaacaaaatttgaaattaacctattgggtctggtacttttaaaattgtacagatgtttgtgccttttctttactttgcttatattcttataagcattttttagcagtaatttgtacatattttagaatttgtgtatctgctttgtaataaatgtaatttctttccttttttggacacttggatctaaatgatgtaaagcaaaacagcatcaatatatatgtgaggttgcactaaaacatatttttatatgattaaaactgaacagcttttatgtacagctctgattctgtaatactaatatttatttactttgtttcataaattgtacattttttcttaatgttgtggattgcttttctatgtgaagcatgggatttactgttgcgtaactagaacaaaaatgtacattgtaaacaagatatttaaactagagtatcttattctgcacttatgcattagttaaaaaaagataaaggatgtatcagtcagttcttaactcttgtatatttttttgtctcttgtttgctggattgactataacttaagtgctgattgtgattttaaaatgatagtaccgtaaagcattaaagtaaacaatgtgctattgtgagttttttcaaagctttataaatcagttataaataatattaaaagtatttggtcttatgtgaacatgttgatctatatactcatctaaaaatatgggaaaacattccaccccatgtaaatatgtacaagtgcatcactggtacaattttatgtaactcagttggacactaggttgccacagacctatgctaggtgtctttaaaaaattaaggtgacaaagcacatgggactgtgtagagcttggttatcggccggcccggtggcttggcaggcagtgctgtgcgctgctcatggagaagacctgggcttagcaatctccttagttcttgctacacaggatggtgactggaactaaggctacacagagggtcgcacttggactctgagggttgggtgtggaagggggaaaaggggatggagacctgctccccagctcttcctgtcagccggtttacatgggaacagggttaacatctgtgttaggggaggtcaccttaccctttttcataggggaagagtgtcacactcctggctatctcagggggaatggggaaaagaatctttcaagggcaaagaactcgtgggaggatgtctgttgtatgtaatactcacaatggcttttggttagtgttgaaggtgggaagagcatttgtaggtccagaagagtgaaagagagggaggggtgcagcaacatgtgcacaggcacgcacatgtgtgcacgcacacatacaatctgggttatctttgtgctatatagtggattataattctgtgaaaccaagtttgtatattgaattacattaaggagtgttctttaaaaagagaaataaatatacaattacatgcttgaggtgtctagttcttatgtgttgctttacattttaatttcccaattttgtttctaaagtaattttgatactagcaacataccatctgtgcttttaattgctaggctctgcccatcctgagtgtgaatgcttttaacaagtgagaagacagtcattggcttccatagattatctgattagaacagatagtggtcaccaaggtgtgggccctaggaatagacttatccaaacctcagcatgggcctgggcagcatatgttgcatctgaacagattcatgaataaagcaaattatcatttttcctctgcctctcttgcagtatgcatacttatctgaaattccactggggaaacctcttctttctttttgctaaggtggctgaagctaagaatcaactaaaatatatcagaagatacccacaaatcacagttcttttattagaatgagtagaatctttttaataataagagcagaagctcattaaaagtcaaaacctattagtattttcactataaaaatctcaaatttgtggatttacaatgtacctatttgcttttatgagccagactgtctttttaaactgtgttttacaaaggtgatttaaaggtcaacacagacactctaatatctgtctcttaccaagaagaatcttttgattatgtagggtgatttgtgtgtcatattcctcattgatgtgtgcgtgcgtgtgtgtgtgtgtgtgtgtgtgtgtgtgtgtgtgttggtgatcccaggccaaatcaaattactctgtttcctcctctacctaattcatcactcatttattcagtcattcatt

SEQ ID NO: 23179 - DNA, 1160 bp, Homo Sapiens
gcggcggcggcggcggcggctcctcagagtccggctcaggctccggctgcggctccagcccgcgatgccccattccgtgaccctgcgcgggccttcgccctggggcttccgcctggtgggcggccgggacttcagcgcgcccctcaccatctcacgggtccatgctggcagcaaggctgcattggctgccctgtgcccaggagacctgatccaggccatcaatggtgagagcacagagctcatgacacacctggaggcacagaaccgcatcaagggctgccacgatcacctcacactgtctgtgagcaggcctgagggcaggagctggcccagtgcccctgatgacagcaaggctcaggcacacaggatccacatcgatcctgagatccaggacggcagcccaacaaccagcaggcggccctcaggcaccgggactgggccagaagatggcagaccaagcctgggatctccatatggacaaccccctcgctttccagtccctcacaatggcagcagcgaggccaccctgccagcccagatgagcaccctgcatgtgtctccaccccccagcgctgacccagccagaggcctcccgcggagccgggactgcagagtcgacctgggctccgaggtgtacaggatgctgcgggagccagccgagcccgtggccgcggagcccaagcagtcaggctccttccgctacttgcagggcatgctagaggccggcgagggcggggattggcccgggcctggcggcccccggaacctcaagcccacggccagcaagctgggcgctccgctgagcggcctgcaggggctgcccgagtgcacgcgctgcggccacggcatcgtgggcaccatcgtcaaggcacgggacaagctctaccatcccgagtgcttcatgtgcagtgactgcggcctgaacctcaagcagcgtggttacttctttctggacgagcggctctactgtgagagccacgccaaggcgcgcgtgaagccgcccgagggctacgacgtggtggcggtgtaccccaatgccaaggtggaactcgtctgagctgggaccctgctcccacgcctgcttcttaaggtccctgctcggccggtgtaaatatgtttcaccctgtccctctaataaagctcctctgctccaccttgaa

SEQ ID NO: 23180 - DNA, 3146 bp, Homo Sapiens
gttcctgagacctgaactattgaccatcattttaatcggaccaactgcagctgtaacaagcttctctttggggtcacaatgaccactgcaggcaggggaaatttaggcctcatccccaggagcactgctttccagaagcaagaggggcgcctgactgtgaagcaggagccagcaaaccagacctgggggcagggcagcagtctccagaagaactatcctcctgtctgcgaaatcttccggctacacttcaggcaattgtgttaccacgagatgtctgggccgcaggaagcattgagccggcttcgggagctctgccgctggtggctcatgccagaggtgcacaccaaggagcagatcctggagctgctggtgcttgagcagttcctgagcatcctccctggggagctccggacctgggtgcagctgcatcaccctgagagtggtgaggaggctgtggctgtggtggaggatttccagagacacctcagtggatcagaggaggtttcagccccagcacagaaacaggaaatgcattttgaggagacaacagctctgggtacaacaaaggaatctcctcctacctcacccctcagtgggggctcagcccctggagcccacctggagcctccttatgacccagggacacaccacctccccagtggggacttcgctcaatgtacttctccagttcctacccttcctcaagtggggaactcaggagaccaagcaggggcaactgtacttcggatggtcaggccccaggatactgtggcatatgaggacctatctgtagactacactcagaagaaatggaaaagtctcacactcagtcagagagccctgcagtggaacatgatgccagaaaatcaccatagcatggcctccttggcaggtgagaacatgatgaagggttcagagttgactccaaagcaggaattttttaaaggatcagagtcatctaacaggacatcagggggactctttggggtggttcctggggcagcagagactggagatgtttgtgaagatactttcaaggagttagaaggacaaacctcagatgaagaagggagcagactagaaaatgatttcttggaaataacagatgaagataagaaaaaatccacaaaagacagatatgacaaatataaggaagttggggaacatccacctctgtcttccagtcctgttgaacatgaaggagttttaaagggacagaaatcctatcgatgtgatgaatgtggcaaagctttcaatcggagttctcaccttattggccatcagagaatccacactggagagaaaccctatgagtgtaatgagtgtgggaagaccttcaggcaaacctcccagctcattgttcatctcagaacccacacaggggaaaaaccctatgaatgcagtgagtgtggaaaggcctataggcacagctcccatctcattcaacaccagagactccataatggggagaaaccctataaatgtaatgaatgtgcaaaagcctttactcagagttcccgactcattgaccaccagagaacccatactggggagaaaccttatgaatgcaatgagtgtggagaggcattcattcgaagcaaaagtcttgctcgacatcaggtcctgcacactggtaagaaaccttacaaatgcaatgagtgtgggagagcattctgttccaatagaaatctcattgaccatcagagaatccacactggggagaagccttatgagtgtagtgaatgtggcaaagccttcagtcggagtaaatgtcttattcgacatcagagcctccatactggggaaaagccatacaaatgtagtgaatgtgggaaagccttcaatcagaactctcaactcattgagcatgagcgaattcatactggagaaaaaccttttgaatgtagcgagtgtggtaaggcatttggtctgagtaaatgtcttattcggcaccagagacttcacacgggtgaaaagccctataaatgcaatgagtgtggaaaatccttcaatcaaaactcacaccttattatacaccagagaattcacactggtgagaaaccctatgaatataatgagtgtgggaaggtattcagttatagctccagccttatggtacatcagagaacccatactggggaaaaaccctataaatgcaatgattgtgggaaagcttttagtgacagctcacagcttattgtacaccagagagtccacaccggagagaaaccttatgaatgtagtgaatgtgggaaagcctttagtcagcgttccacttttaatcaccaccagcgaactcacactggagagaagtcctcaggtctggcttggtcagtttcttaaggtatggttctctgagacagagagcaacgacctttgagttaagctgtctttataagcaggatgctcatagtggtttcccggagccagtagtcacggtggaccattccctacttgctttttccttggatcactaaggtgggagagtaggagtaacttattccagttcttacccattattaggaaggtaaggactacacatgtcattgaattgtaggtttcctttttttttctttacttttaaattttaacttttaaaatctatttcatttcttagttatgcatctcataatcagactccatgctttttaaagacagagataatatcttctctattctattctacttcctccatttcaccatttatacaaagtcattcaaaaaggctgattcatgccttcctgcctcttggctatggccctccccatctactctttaaactttaatctataacttttcatcagttttgttccctatctagaaaacattttcttctgtttgctaatctttgtccctcacaatttttgaaatccatctcatcactgaaatactttcttcttcaagtacttttttatttttcttcaacttctcttgatttgacctcagtgctttgaattcactggtgctacaatatgtaactgtggttaattgccttgtaaattttgcgtgtctgtatacttttataccaacttattgtaggctctttgaggtcaggtatgtatttctttcccatatagatagtattttgtacataccagttgttaaataaataatttttaaaatctcaaaaaaaaaaaaaaaaaaaa

SEQ ID NO: 23181 - DNA, 3067 bp, Homo Sapiens
cggatgcggggaggctgcgtgtgtgcgcagggagagaacgccggccaccttcccgcttccgagctgggtgcgcgccgagcacaggagattgcctgcgtttaggaggtggctgcgttgtgggaaaagctatcaaggaagaaattgccaaaccatgtctttttttctgtttcagagtagttcacaacagatctgagtgttttaattaagcatggaatacagaaaacaacaaaaaacttaagctttaatttcatctggaattccacagttttcttagctccctggacccggttgacctgttggtctcttcccgctggctgctctatcacgtggtgctctccgactactcaccccgagtgtaaagaaccttcggctcgcgtgcttctgagctgctgtggatggcctcggctctctggactgtccttccgagtaggatgtcactgagatccctcaaatggagcctcctgctgctgtcactcctgagtttctttgtgatgtggtacctcagccttccccactacaatgtgatagaacgcgtgaactggatgtacttctatgagtatgagccgatttacagacaagactttcacttcacacttcgagagcattcaaactgctctcatcaaaatccatttctggtcattctggtgacctcccacccttcagatgtgaaagccaggcaggccattagagttacttggggtgaaaaaaagtcttggtggggatatgaggttcttacatttttcttattaggccaagaggctgaaaaggaagacaaaatgttggcattgtccttagaggatgaacaccttctttatggtgacataatccgacaagattttttagacacatataataacctgaccttgaaaaccattatggcattcaggtgggtaactgagttttgccccaatgccaagtacgtaatgaagacagacactgatgttttcatcaatactggcaatttagtgaagtatcttttaaacctaaaccactcagagaagtttttcacaggttatcctctaattgataattattcctatagaggattttaccaaaaaacccatatttcttaccaggagtatcctttcaaggtgttccctccatactgcagtgggttgggttatataatgtccagagatttggtgccaaggatctatgaaatgatgggtcacgtaaaacccatcaagtttgaagatgtttatgtcgggatctgtttgaatttattaaaagtgaacattcatattccagaagacacaaatcttttctttctatatagaatccatttggatgtctgtcaactgagacgtgtgattgcagcccatggcttttcttccaaggagatcatcactttttggcaggtcatgctaaggaacaccacatgccattattaacttcacattctacaaaaagcctagaaggacaggatactttgtggaaagtgttaaataaagtaggtactgtggaaaattcatggggaggtcagtgtgctggcttacactgaactgaaactcatgaaaaacccagactggagactggagggttacacttgtgatttattagtcaggcccttcaaagatgatatgtggaggaattaaatataaaggaattggaggtttttgctaaagaaattaataggaccaaacaatttggacatgtcattctgtagactagaatttcttaaaagggtgttactgagttataagctcactaggctgtaaaaacaaaacaatgtagagttttatttattgaacaatgtagtcacttgaaggttttgtgtatatcttatgtggattaccaatttaaaaatatatgtagttctgtgtcaaaaaacttcttcactgaagttatactgaacaaaatattatttaaaattacttcaactttgtgtttttaaatgttttgacgatttcaatacaagataaaaaggatagtgaatcattctttacatgcaaacattttccagttacttaactgatcagtttattattgatacatcactccattaatgtaaagtcataggtcattattgcatatcagtaatctcttggactttgttaaatattttactgtggtaatatagagaagaattaaagcaagaaaatctgaagtattgtcttgtttttaaaaaatacagttcctagtgtttatagaagtcacttaatttgtctcatttttccacctggaaattaggaataatgtagaatgcaaggcagtaatttccttttggaaaggactctgaaggcagaaaagaagggagagaacctcatgggcagaatattataaaaagagtgtcatattccagcatttgaattggaaagagaagagtgaagatccaagttgcattattaatctgccctgtgttttttccttttaacaatcagtttgagctgctgctgttatgagtttctcatcaagatgaaagccctaatatgtaaagtcaaatccgatttaaattttgtgcttttatagaaagaaatttcttcatagacgtggtgatatatcatttcttggacctgctaatagtaggtcaaaggggagcactccttgccccctgttcctgggtttatgcagttttctttttagagtttatatagggcaagtggttctttttctctgaattacaggatggaaaaaggtcatatcctttgtcaggaaatataaacttgaaagtatgtagtcagctcttgtaatactcatatttatgattgtcctatatgaaaaacaacttcagttaaaactataatgtgtgattctgtataacaaggtgatgtctgtttcccagggctcagacctaatccagttataataaaatcaattaaatgaaatattctatagaatcgatctatgcccttgttaatctccatccatataggagtcacgttctttaagacagatggtggtagttatttttgtggcatggttagatttgactggttttgcagaagattacagttatgtactgcataatgacatatacaatagtggtcccataaaattataatggagcagaaaatctattgcctcatgatgttttagccgttttaatgtcatagcctagtgcattact

SEQ ID NO: 23182 - DNA, 1959 bp, Homo Sapiens
aggcggagacagagtgaagaaactgtgttccccccttgggttgctatcgatcaagggtaaaattccattctgatatcaaaatgcagtattcgcaccattgtgagcaccttttagagagactgaacaaacagcgggaagcaggttttctctgtgactgtaccatagtgattggggaattccagtttaaagctcataggaatgtgctggcctcctttagtgagtattttggtgcgatctacagaagcacttctgagaacaatgtctttcttgatcagagtcaggtgaaggctgatggatttcagaaactgttggagtttatatacacaggaactttaaatcttgacagagatatctagtattactggaaacattgaattgaatcaacagacttgtcttcttactctgcgagattataataatcgagagaaatcagaagtatctacagatttgattcaggcaaatcctaaacaaggcgcgttagcgaaaaagtcatctcaaacgaaaaagaagaagaaggctttcaactccccgaaaacagggcagaataaaacagtgcaatatcccagtgacatcttagagaatgcatctgttgaattattcctagatgcaaataaactgcccacacctgtagtagaacaagttgcacaaataaatgataattcagaactcgagttgacatcagttgtggaaaatacttttccagcacaagatattgtgcacactgttacagtgaaacggaaacgtggaaaatcacagccaaactgtgctctgaaagaacactctatgtctaatatagccagcgtcaagagtccttatgaggcggagaactccggggaagagctggatcagaggtattccaaggccaagccaatgtgtaacacatgtgggaaagtgttttcagaagccagcagtttgagaaggcacatgagaatacataaaggagtcaaaccttacgtctgccacttatgtggaaaggcatttacccaatgtaaccagctgaaaacgcatgtaagaactcatacaggtgagaagccatacaaatgtgaattgtgtgataaaggatttgctcagaaatgtcagctagtcttccatagtcgcatgcatcatggtgaagaaaaaccctataaatgtgatgtatgcaacttacagtttgcaacttctagcaatctcaagattcatgcaaggaagcatagtggagagaagccatatgtctgtgataggtgtggacagagatttgctcaagccagcacactgacctatcatgtccgtaggcatactggagaaaagccttatgtatgtgatacctgtgggaaggcatttgctgtctctagttctcttatcactcattctcgaaaacatacaggtgaaaaaccatacatatgtggtatttgtgggaaaagttttatttcctcaggagagctcaacaaacactttcggtcccatacaggagaaagaccatttatctgcgaattatgtggaaattcttacacagatattaaaaatttaaagaagcacaaaacaaaagtccattctggtgcagataaaactctagactccagtgcagaggatcatactttgagtgaacaggattccatacaaaaaagtcctttatcagaaactatggatgtgaagccttctgatatgactttaccattagctcttccacttgggactgaggaccatcacatgcttctgcctgtcacggatactcagtctcctacatcagatacattgttgaggtcaactgtgaatgggtattcagaaccacagttgatttttttacaacaattatactgactttgtaaggaatatggaattgctaagatatcattggtagcaaacatctctggtaaggtgcatatattcatattaaattcccattcatttgagttgtgaccattatttttcattcactgaagtaaaagcacctgatgctgcatcacaaaaaaaaaaaaaaaa

SEQ ID NO: 23183 - DNA, 3726 bp, Homo Sapiens
cagcgctgctccccgggcgctcctccccgggcgctcctccccaggcctcccgggcgcttggatcccggccatctccgcacccttcaagtgggtgtgggtgatttcctggcggggggagcagccaggtgagcccaagatgctgctgcgctcgaagcctgcgctgccgccgccgctgatgctgctgctcctggggccgctgggtcccctctcccctggcgccctgccccgacctgcgcaagcacaggacgtcgtggacctggacttcttcacccaggagccgctgcacctggtgagcccctcgttcctgtccgtcaccattgacgccaacctggccacggacccgcggttcctcatcctcctgggttctccaaagcttcgtaccttggccagaggcttgtctcctgcgtacctgaggtttggtggcaccaagacagacttcctaattttcgatcccaagaaggaatcaacctttgaagagagaagttactggcaatctcaagtcaaccaggatatttgcaaatatggatccatccctcctgatgtggaggagaagttacggttggaatggccctaccaggagcaattgctactccgagaacactaccagaaaaagttcaagaacagcacctactcaagaagctctgtagatgtgctatacacttttgcaaactgctcaggactggacttgatctttggcctaaatgcgttattaagaacagcagatttgcagtggaacagttctaatgctcagttgctcctggactactgctcttccaaggggtataacatttcttgggaactaggcaatgaacctaacagtttccttaagaaggctgatattttcatcaatgggtcgcagttaggagaagattttattcaattgcataaacttctaagaaagtccaccttcaaaaatgcaaaactctatggtcctgatgttggtcagcctcgaagaaagacggctaagatgctgaagagcttcctgaaggctggtggagaagtgattgattcagttacatggcatcactactatttgaatggacggactgctaccagggaagattttctaaaccctgatgtattggacatttttatttcatctgtgcaaaaagttttccaggtggttgagagcaccaggcctggcaagaaggtctggttaggagaaacaagctctgcatatggaggcggagcgcccttgctatccgacacctttgcagctggctttatgtggctggataaattgggcctgtcagcccgaatgggaatagaagtggtgatgaggcaagtattctttggagcaggaaactaccatttagtggatgaaaacttcgatcctttacctgattattggctatctcttctgttcaagaaattggtgggcaccaaggtgttaatggcaagcgtgcaaggttcaaagagaaggaagcttcgagtataccttcattgcacaaacactgacaatccaaggtataaagaaggagatttaactctgtatgccataaacctccataatgtcaccaagtacttgcggttaccctatcctttttctaacaagcaagtggataaataccttctaagacctttgggacctcatggattactttccaaatctgtccaactcaatggtctaactctaaagatggtggatgatcaaaccttgccacctttaatggaaaaacctctccggccaggaagttcactgggcttgccagctttctcatatagtttttttgtgataagaaatgccaaagttgctgcttgcatctgaaaataaaatatactagtcctgacactgaatttttcaagtatactaagagtaaagcaactcaagttataggaaaggaagcagataccttgcaaagcaactagtgggtgcttgagagacactgggacactgtcagtgctagatttagcacagtattttgatctcgctaggtagaacactgctaataataatagctaataataccttgttccaaatactgcttagcattttgcatgttttacttttatctaaagttttgttttgttttattatttatttatttatttattttgtgacggagagagattccatctcaaaaaaacaagttattaaaaatgtatatgaatgctcctaatatggtcaggaagcaaggaagcgaaggatatattatgagttttaagaaggtgcttagctgtatatttatctttcaaaatgtattagaagattttagaattctttccttcatgtgccatctctacaggcacccatcagaaaaagcatactgccgttaccgtgaaactggttgtaaaagagaaactatctatttgcaccttaaaagacagctagattttgctgattttcttctttcggttttctttgtcagcaataatatgtgagaggacagattgttagatatgatagtataaaaaatggttaatgacaattcagaggcgaggagattctgtaaacttaaaattactataaatgaaattgatttgtcaagaggataaattttagaaaacacccaataccttataactgtctgttaatgcttgctttttctctacctttcttccttgtttcagttgggaagcttttggctgcaagtaacagaaactcctaattcaaatggcttaagcaataaggaaatgtatattcccacataactagacgttcaaacaggccaggctccagcacttcagtacgtcaccaggggatctgggttcttcccagctctctgctctgccatctttagcgctggcttcattctcagactctggtagcatgatggctgtagctgtttcatgggccccttcaaacctcatagcaaccagaggaagaaaatgagccattttttgagtctccttcatagacttgaataactctttttcagagcttctcacagcaaacctctcctcatgtctcctcatgtcttattgttcagaaatgggtaatgtggccatttcaccagtcactgccaacaacaacgaggttcctataattgtctctgagtaaccctttggaatggagagggtgttggtcagtctacaaactgaacactgcagttctgcgctttttaccagtgaaaaaatgtaattattttcccctcttaaggattaatattcttcaaatgtatgcctgttatggatatagtatctttaaaattttttattttaatagctttaggggtacacactttttgcttacaggggtgaattgtgtagtggtgaagactcggcttttaatgtacttgtcacctgagtgatgtacattgtacccaataggtaatttttcatccattaccctccttccgccctcttcccttctgagtctccaacatcccttataccactgtgtatgttcttgtgtacctacagctaagcttccacttataagtgagaacatgcagtatttggttttccattcctgagttacttcccttaggataacagcccccagttccgtccaagttgctgcaaaatacattattcttctttatggctgagtaatagtccatggtacatatataccacattttctttatccacttatcagttgatggacacttaggttaattccattcaatttcattcaatttaagtatatttgtaaggagctaaagctgaaaattaaattttagatctttcaatactcttaaattttatatgtaagtggtttttatattttcacatttgaaataaagtaatttttataaccttgaaaaaaaaaaaaaaaaaaaa

SEQ ID NO: 23184 - DNA, 3165 bp, Homo Sapiens
ggggatttggctagaaggctgggccggcagcggttgtgaggagttagctcgcggcattgcaggctctgagaggaggggacccggttcccgggtgagtgtccaggcatgccagcggaacggcccgcgggcagcggcggctcggaggctccagcaatggttgaacaactggacactgctgtgattaccccggccatgctagaagaggaagaacagcttgaagctgctggactagagagagagcggaagatgctggaaaaggctcgcatgtcttgggatagagagtcgacagaaattcggtaccgtagacttcaacatttgcttgaaaaaagcaatatctactccaaatttttattgacgaaaatggaacagcaacaattagaggaacagaagaagaaagaaaaattggagagaaaaaaggagtctttaaaagttaaaaagggtaaaaattcaattgatgcaagtgaagagaagccagttatgaggaaaaaaagaggaagagaagatgaatcatacaatatttcagaggtcatgtcaaaagaggaaattttgtctgtggctaaaaaaaataaaaaggagaatgaggatgaaaactcctcctctactaatctctgtgtggaagatcttcagaaaaataaagattcgaatagtataattaaagatagattgtctgaaacggttaggcagaatactaaattcttttttgacccagtccggaagtgtaatggtcagccagtaccttttcaacaaccaaagcacttcactggaggagtgatgcgatggtaccaagtagaaggcatggaatggcttaggatgctttgggaaaatggaattaatggcattttagcagatgaaatgggattgggtaagacagttcagtgcattgctactattgcattgatgattcagagaggagtaccaggaccttttcttgtctgtggccctttgtctacacttcctaactggatggctgaattcaaaagatttacaccagatatccctacaatgttatatcatggaacccaggaggaacgtcaaaaattggtaagaaatatttacaaacggaaagggactttgcagattcatcctgtggtaatcacgtcatttgaaatagccatgagagaccgaaatgcgttacagcattgctattggaaatacttaatagtagatgaaggacacaggattaagaatatgaagtgccgtctaatcagggagttaaaacgattcaatgctgataacaaacttcttttgactggtactcccttgcaaaacaatttatcagaactttggtcattgctaaactttttgttgccagatgtatttgatgacttgaaaagctttgagtcttggtttgacatcactagtctttctgaaactgctgaagatattattgctaaagaaagagaacagaatgtattgcatatgctgcaccagattttaacacctttcttattgagaagactgaagtctgatgttgctcttgaagttcctcctaaacgagaagtagtcgtttatgctccactttcaaagaagcaggagatcttttatacagccattgtgaaccgtacaattgcaaacatgtttggatccagtgagaaagaaacaattgagttaagtcctactggtcgaccaaaacgacgaactagaaaatcaataaattacagcaaaatagatgatttccctaatgaattggaaaaactgatcagtcaaatacagccagaggtggaccgagaaagagctgttgtggaagtgaatatccctgtagaatctgaagttaatctgaagctgcagaatataatgatgctacttcgtaaatgttgtaatcatccatatttgattgaatatcctatagaccctgttacacaagaatttaagatcgatgaagaattggtaacaaattctgggaagttcttgattttggatcgaatgctgccagaactaaaaaaaagaggtcacaaggtgctgcttttttcacaaatgacaagcatgttggacattttgatggattactgccatctcagagatttcaacttcagcaggcttgatgggtccatgtcttactcagagagagaaaaaaacatgcacagcttcaacacggatccagaggtgtttatcttcttagtgagtacacgagctggtggcctgggcattaatctgactgcagcagatacagttatcatttatgatagtgattggaacccccagtcggatcttcaggcccaggatagatgtcatagaattggtcagacaaagccagttgttgtttatcgccttgttacagcaaatactatcgatcagaaaattgtggaaagagcagctgctaaaaggaaactggaaaagttgatcatccataaaaatcatttcaaaggtggtcagtctggattaaatctgtctaagaatttcttagatcctaaggaattaatggaattattaaaatctagagattatgaaagggaaataaaaggatcaagagagaaggtcattagtgataaagatctagagttgttgttagatcgaagtgatcttattgatcaaatgaatgcttcaggaccaattaaagagaagatggggatattcaagatattagaaaattctgaagattccagtcctgaatgtttgttttaaagtggagctcaagaatagcttttaaaagttcttatttacatctagtgatttccctgtattgggtttgaaatactgattgtccacttcaccttttttattatatcagttgacatgtaactagtaccatgcgtacttaaatagatggtaattttctgagccttaccaagaacaaagaagtatccatattaagtttagattttcagttaatttttgagactgagtagtattcttggatacaggctgatgtgtacttaaccacttccagatttatacagtcttcctgtggaagtttagtaaatgtctttttccctcctttcttctagtaatgcagttcatgggctttaggtacttcagttatgaagtaggcttttcatggggagagattgggattatgctttctgttgtttaagaaactgtttgattttagagtctatttctatgagatagtttaccaaataaatgttccttataagatgaaaaaaaaaaaaaaaaaaaaaaaaaaaaaaaaaaaaaaaaaaaaaaaaaaaaaaaaaaaaaaaaaaa

SEQ ID NO: 23185 - DNA, 722 bp, Homo Sapiens
gagactgcatagggctcggcgtggatcttgttaatgctgattctggtacagtaggtctagggcggggcctgagattctgcatttctaacaagaacccaggtgatgctgacgctgctgggccaaaaaagacactttgagtagcaagggttaggcaacctttaaagggcccttcaagagtctaagattccatgaaggatactatttcctctacaagcttgtgaaagtcttccagtgctactgggaatggggtacagggataaatctcactgttttgacctcacagaagtaaacccctagaatcatgttctcaaaatgaaacactggattgctgaactgatggcattgagaattaaggctccaaaatcctgggagtttcatacctaactccactgcctttgccttatgatgcacactgctccctctatccctccctcccagggtctgcagagatgaactatgctgttttaggtctcattggtccttataccttccctaaaccaggaggactttggagcctgctgacacagggagttctacatgtctaagcacgcagctgctagagtcctcagccatctgagctaaatagctgctcagagacaattagtacacctccgtatyttacagataaaggaactgaagtccaaacaagccaagctacccaaccaaggctcacagcaggcaagaggataaaaaccatgtcctttgactcccaggttagtttt

SEQ ID NO: 23186 - DNA, 4145 bp, Homo Sapiens
ggccgcgaattcggcacgagccctgcacggccgccagccggcctcccgccagccagccccgacccgcggctccgccgcccagccgcgccccagccagccctgcggcaggaaagcatgaagggagacaccaggcatctcaatggagaggaggacgccggcgggagggaagactcgatcctcgtcaacggggcctgcagcgaccagtcctccgactcgcccccaatcctggaggctatccgcaccccggagatcagaggccgaagatcaagctcgcgactctccaagagggaggtgtccagtctgctaagctacacacaggacttgacaggcgatggcgacggggaagatggggatggctctgacaccccagtcatgccaaagctcttccgggaaaccaggactcgttcagaaagcccagctgtccgaactcgaaataacaacagtgtctccagccgggagaggcacaggccttccccacgttccacccgaggccggcagggccgcaaccatgtggacgagtcccccgtggagttcccggctaccaggtccctgagacggcgggcaacagcatcggcaggaacgccatggccgtcccctcccagctcttaccttaccatcgacctcacagacgacacagaggacacacatgggacgccccagagcagcagtaccccctacgcccgcctagcccaggacagccagcaggggggcatggagtccccgcaggtggaggcagacagtggagatggagacagttcagagtatcaggatgggaaggagtttggaataggggacctcgtgtggggaaagatcaagggcttctcctggtggcccgccatggtggtgtcttggaaggccacctccaagcgacaggctatgtctggcatgcggtgggtccagtggtttggcgatggcaagttctccgaggtctctgcagacaaactggtggcactggggctgttcagccagcactttaatttggccaccttcaataagctcgtctcctatcgaaaagccatgtaccatgctctggagaaagctagggtgcgagctggcaagaccttccccagcagccctggagactcattggaggaccagctgaagcccatgttggagtgggcccacgggggcttcaagcccactgggatcgagggcctcaaacccaacaacacgcaaccagtggttaataagtcgaaggtgcgtcgtgcaggcagtaggaaattagaatcaaggaaatacgagaacaagactcgaagacgcacagctgacgactcagccacctctgactactgccccgcacccaagcgcctcaagacaaattgctataacaacggcaaagaccgaggggatgaagatcagagccgagaacaaatggcttcagatgttgccaacaacaagagcagcctggaagatggctgtttgtcttgtggcaggaaaaaccccgtgtccttccaccctctctttgagggggggctctgtcagacatgccgggatcgcttccttgagctgttttacatgtatgatgacgatggctatcagtcttactgcactgtgtgctgcgagggccgagagctgctgctttgcagcaacacgagctgctgccggtgtttctgtgtggagtgcctggaggtgctggtgggcacaggcacagcggccgaggccaagcttcaggagccctggagctgctacatgtgtctcccgcagcgctgtcatggcgtcctgcggcgccggaaggactggaacgtgcgcctgcaggccttcttcaccagtgacacggggcttgaatacgaagcccccaagctgtaccctgccattcccgcagcccgaaggcggcccattcgagtcctgtcattgtttgatggcatcgcgacaggctacctagtcctcaaagagttgggcataaaggtaggaaagtacgtcgcttctgaagtgtgtgaggagtccattgctgttggaaccgtgaagcacgaggggaatatcaaatacgtgaacgacgtgaggaacatcacaaagaaaaatattgaagaatggggcccatttgacttggtgattggcggaagcccatgcaacgatctctcaaatgtgaatccagccaggaaaggcctgtatgagggtacaggccggctcttcttcgaattttaccacctgctgaattactcacgccccaaggagggtgatgaccggccgttcttctggatgtttgagaatgttgtagccatgaaggttggcgacaagagggacatctcacggttcctggagtgtaatccagtgatgattgatgccatcaaagtttctgctgctcacagggcccgatacttctggggcaacctacccgggatgaacaggcccgtgatagcatcaaagaatgataaactcgagctgcaggactgcttggaatacaataggatagccaagttaaagaaagtacagacaataaccaccaagtcgaactcgatcaaacaggggaaaaaccaacttttccctgttgtcatgaatggcaaagaagatgttttgtggtgcactgagctcgaaaggatctttggctttcctgtgcactacacagacgtgtccaacatgggccgtggtgcccgccagaagctgctgggaaggtcctggagcgtgcctgtcatccgacacctcttcgcccctctgaaggactactttgcatgtgaatagttccagccaggccccaagcccactggggtgtgtggcagagccaggacccaggaggtgtgattcctgaaggcatccccaggccctgctcttcctcagctgtgtgggtcataccgtgtacctcagttccctcttgctcagtgggggcagagccacctgactcttgcaggggtagcctgaggtgccgcctccttgtgcacaaatcagacctggctgcttggagcagcctaacacggtgctcattttttcttctcctaaaactttaaaacttgaagtaggtagcaacgtggctttttttttttcccttcctgggtctaccactcagagaaacaatggctaagataccaaaaccacagtgccgacagctctccaatactcaggttaatgctgaaaaatcatccaagacagttattgcaagagtttaatttttgaaaactgggtactgctatgtgtttacagacgtgtgcagttgtaggcatgtagctacaggacatttttaagggcccaggatcgttttttcccagggcaagcagaagagaaaatgttgtatatgtcttttacccggcacattccccttgcctaaatacaagggctggagtctgcacgggacctattagagtattttccacaatgatgatgatttcagcagggatgacgtcatcatcacattcagggctattttttcccccacaaacccaagggcaggggccactcttagctaaatccctccccgtgactgcaatagaaccctctggggagctcaggaaggggtgtgctgagttctataatataagctgccatatattttgtagacaagtatggctcctccatatctccctcttccctaggagaggagtgtgaagcaaggagcttagataagacaccccctcaaacccattccctctccaggagacctaccctccacaggcacaggtccccagatgagaagtctgctaccctcatttctcatctttttactaaactcagaggcagtgacagcagtcagggacagacatacatttctcataccttccccacatctgagagatgacagggaaaactgcaaagctcggtgctccctttggagattttttaatccttttttattccataagaagtcgtttttagggagaacgggaattcagacaagctgcatttcagaaatgctgtcataatggtttttaacaccttttactcttcttactggtgctattttgtagaataaggaacaacgttgacaagttttgtggggctttttatacactttttaaaatctcaaacttctatttttatgtttaacgttttcattaaaatttttttgtaactggagccacgacgtaacaaatatggggaaaaaactgtgccttgtttcaacagtttttgctaatttttaggctgaaagatgacggatgcctagagtttaccttatgtttaattaaaatcagtatttgtctaaaaaaaaaaaaaaaaaa

SEQ ID NO: 23187 - DNA, 3989 bp, Homo Sapiens
gggatttggcccaaatgattatgtttctcctttttgggaagatttctctgggtattttgatatttgtactgatagaaggagactttccatcattaacagcacaaacctacttatctatagaggagatccaagaacccaagagtgcagtttcttttctcctgcctgaagaatcaacagacctttctctagctaccaaaaagaaacagcctctggaccgcagagaaactgaaagacagtggttaaccagaaggcggagatctattctgtttcctaatggagtgaaaatctgcccagatgaaagtgttgcagaggctgtggcaaatcatgtgaagtattttaaagtccgagtgtgtcaggaagctgtctgggaagccttcaggactttttgggatcgacttcctgggcgtgaggaatatcattactggatgaatttgtgtgaggatggagtcacaagtatatttgaaatgggcacaaattttagtgaatctgtggaacatagaagcttaatcatgaagaaactgacttatgcaaaggaaactgtaagcagctctgaactgtcttctccagttcctgttggtgatacttcaacattgggagacactactctcagtgttccacatccagaggtggacgcctatgaaggtgcctcagagagcagcttggaaaggccagaggagagtattagcaatgaaattgagaatgtgatagaagaagccacaaaaccagcaggtgaacagattgcagaattcagtatccaccttttggggaagcagtacagggaagaactacaggattcctccagctttcaccaccagcaccttgaagaagaatttatttcagaggttgaaaatgcatttactgggttaccaggctacaaggaaattcgtgtacttgaatttaggtcccccaaggaaaatgacagtggcgtagatgtttactatgcagttaccttcaatggtgaggccatcagcaataccacctgggacctcattagccttcactccaacaaggtggaaaaccatggccttgtggaactggatgataaacccactgttgtttatacaatcagtaacttcagagattatattgctgagacattgcagcagaattttttgctggggaactcttccttgaatccagatcctgattccctgcagcttatcaatgtgagaggagttttgcgtcaccaaactgaagatctagtttggaacacccaaagttcaagtcttcaggcaacgccgtcatctattctggataatacctttcaagctgcatggccctcagcagatgaatccatcaccagcagtattccaccacttgatttcagctctggtcctccctcagccactggcagggaactctggtcagaaagtcctttgggtgatttagtgtctacacacaaattagcctttccctcgaagatgggcctcagctcttccccagaggttttagaggttagcagcttgactcttcattctgtcaccccggcagtgcttcagactggcttgcctgtggcttctgaggaaaggacttctggatctcacttggtagaagatggattagccaatgttgaagagtcagaagattttctttctattgattcattgccttcaagttcattcactcaacctgtgccaaaagaaacaataccatccatggaagactctgatgtgtccttaacatcttcaccatatctgacctcttctataccttttggcttggactccttgacctccaaagtcaaagaccaattaaaagtgagccctttcctgccagatgcatccatggaaaaagagttaatatttgacggtggtttaggttcagggtctgggcaaaaggtagatctgattacttggccatggagtgagacttcatcagagaagagcgctgaaccactgtccaagccgtggcttgaagatgatgattcacttttgccagctgagattgaagacaagaaactagttttagttgacaaaatggattccacagaccaaattagtaagcactcaaaatatgtacatgatgacagatccatacactttccagaggaagagcctcttagtgggcctgctgtgcccatcttcgcagatactgcagctgaatctgcgtctctaaccctccccaagcacatatcagaagtacctggtgttgatgattactcagttaccaaagcacctcttatactgacatctgtagcaatctctgcctctactgataaatcagatcaggcagatgccatcctaagggaggatatggaacaaattactgagtcatccaactatgaatggtttgacagtgaggtttcaatggtaaagccagatatgcaaactttgtggactatattgccagaatcagagagagtttggacaagaacttcttccctagagaaattgtccagagacatattggcaagtacaccacagagtgctgacaggctctggttatctgtgacacagtctaccaaattgcctccaaccacaatctccaccctgctagaggatgaagtaattatgggtgtacaggatatttcgttagaactggaccggataggcacagattactatcagcctgagcaagtccaagagcaaaatggcaaggttggtagttatgtggaaatgtcaacaagtgttcactccacagagatggttagtgtggcttggcccacagaaggaggagatgacttgagttatacccagacttcaggagctttggtggttttcttcagcctccgagtgactaacatgatgttttcagaagatctgtttaataaaaactccttggagtataaagccctggagcaaagattcttagaattgctggttccctatctccagtcaaatctcacggggttccagaacttagaaatcctcaacttcagaaatggcagcattgtggtgaacagtcgaatgaagtttgccaattctgtccctcctaacgtcaacaatgcggtgtacatgattctggaagacttttgtaccactgcctacaataccatgaacttggctattgataaatactctcttgatgtggaatcaggtgatgaagccaacccttgcaagtttcaggcctgtaatgaattttcagagtgtctggtcaacccctggagtggagaagcaaagtgcagatgcttccctggatacctgagtgtggaagaacggccctgtcagagtctctgtgacctacagcctgacttctgcttgaatgatggaaagtgtgacattatgcctgggcacggggccatttgtaggtgccgggtgggtgagaactggtggtaccgaggcaagcactgtgaggaatttgtgtctgagcccgtgatcataggcatcactattgcctccgtggttggacttcttgtcatcttttctgctatcatctacttcttcatcaggactcttcaagcacaccatgacaggagtgaaagagagagtcccttcagtggctccagcaggcagcctgacagcctctcatctattgagaatgctgtgaagtacaaccccgtgtatgaaagtcacagggctggatgtgagaagtatgagggaccctatcctcagcatcccttctacagctctgctagcggagacgtgattggtgggctgagcagagaagaaatcagacagatgtatgagagcagtgagctttccagagaggaaattcaagagagaatgagagttttggaactgtatgccaatgatcctgagtttgcagcttttgtgagagagcaacaagtggaagaggtttaaccaaaactcctgttctgaaactgattagaagcctggagaagatggagattacttgttacttatgtcatataattaacctggattttaaacactgttggaagaagagttttctatgaaaaaattaaatatagggcacactgtttttttttcagcttaagttttcagaatgtagtaagagatgttaccatttttatttctataaagactgaatgctgtgtttaaataaattgaaaactacctaaaaaaacg

SEQ ID NO: 23188 - DNA, 10182 bp, Homo Sapiens
ccggaaaatggccgccgccgccgccgccgcgccgagcggaggaggaggaggaggcgaggaggagagactgctccataaaaatacagactcaccagttcctgctttgatgtgacatgtgactccccagaatacaccttgcttctgtagaccagctccaacaggattccatggtagctgggatgttagggctcagggaagaaaagtcagaagaccaggacctccagggcctcaaggacaaacccctcaagtttaaaaaggtgaagaaagataagaaagaagagaaagagggcaagcatgagcccgtgcagccatcagcccaccactctgctgagcccgcagaggcaggcaaagcagagacatcagaagggtcaggctccgccccggctgtgccggaagcttctgcctcccccaaacagcggcgctccatcatccgtgaccggggacccatgtatgatgaccccaccctgcctgaaggctggacacggaagcttaagcaaaggaaatctggccgctctgctgggaagtatgatgtgtatttgatcaatccccagggaaaagcctttcgctctaaagtggagttgattgcgtacttcgaaaaggtaggcgacacatccctggaccctaatgattttgacttcacggtaactgggagagggagcccctcccggcgagagcagaaaccacctaagaagcccaaatctcccaaagctccaggaactggcagaggccggggacgccccaaagggagcggcaccacgagacccaaggcggccacgtcagagggtgtgcaggtgaaaagggtcctggagaaaagtcctgggaagctccttgtcaagatgccttttcaaacttcgccagggggcaaggctgaggggggtggggccaccacatccacccaggtcatggtgatcaaacgccccggcaggaagcgaaaagctgaggccgaccctcaggccattcccaagaaacggggccgaaagccggggagtgtggtggcagccgctgccgccgaggccaaaaagaaagccgtgaaggagtcttctatccgatctgtgcaggagaccgtactccccatcaagaagcgcaagacccgggagacggtcagcatcgaggtcaaggaagtggtgaagcccctgctggtgtccaccctcggtgagaagagcgggaaaggactgaagacctgtaagagccctgggcggaaaagcaaggagagcagccccaaggggcgcagcagcagcgcctcctcaccccccaagaaggagcaccaccaccatcaccaccactcagagtccccaaaggcccccgtgccactgctcccacccctgcccccacctccacctgagcccgagagctccgaggaccccaccagcccccctgagccccaggacttgagcagcagcgtctgcaaagaggagaagatgcccagaggaggctcactggagagcgacggctgccccaaggagccagctaagactcagcccgcggttgccaccgccgccacggccgcagaaaagtacaaacaccgaggggagggagagcgcaaagacattgtttcatcctccatgccaaggccaaacagagaggagcctgtggacagccggacgcccgtgaccgagagagttagctgactttacacggagcggattgcaaagcaaaccaacaagaataaaggcagctgttgtctcttctccttatgggtagggctctgacaaagcttcccgattaactgaaataaaaaatatttttttttctttcagtaaacttagagtttcgtggcttcagggtgggagtagttggagcattggggatgtttttcttaccgacaagcacagtcaggttgaagacctaaccagggccagaagtagctttgcacttttctaaactaggctccttcaacaaggcttgctgcagatactactgaccagacaagctgttgaccaggcacctcccctcccgcccaaacctttcccccatgtggtcgttagagacagagcgacagagcagttgagaggacactcccgttttcggtgccatcagtgccccgtctacagctcccccagctccccccacctcccccactcccaaccacgttgggacagggaggtgtgaggcaggagagacagttggattctttagagaagatggatatgaccagtggctatggcctgtgcgatcccacccgtggtggctcaagtctggccccacaccagccccaatccaaaactggcaaggacgcttcacaggacaggaaagtggcacctgtctgctccagctctggcatggctaggaggggggagtcccttgaactactgggtgtagactggcctgaaccacaggagaggatggcccagggtgaggtggcatggtccattctcaagggacgtcctccaacgggtggcgctagaggccatggaggcagtaggacaaggtgcaggcaggctggcctggggtcaggccgggcagagcacagcggggtgagagggattcctaatcactcagagcagtctgtgacttagtggacaggggagggggcaaagggggaggagaagaaaatgttcttccagttactttccaattctcctttagggacagcttagaattatttgcactattgagtcttcatgttcccacttcaaaacaaacagatgctctgagagcaaactggcttgaattggtgacatttagtccctcaagccaccagatgtgacagtgttgagaactacctggatttgtatatatacctgcgcttgttttaaagtgggctcagcacatagggttcccacgaagctccgaaactctaagtgtttgctgcaattttataaggacttcctgattggtttctcttctccccttccatttctgccttttgttcatttcatcctttcacttctttcccttcctccgtcctcctccttcctagttcatcccttctcttccaggcagccgcggtgcccaaccacacttgtcggctccagtccccagaactctgcctgccctttgtcctcctgctgccagtaccagccccaccctgttttgagccctgaggaggccttgggctctgctgagtccgacctggcctgtctgtgaagagcaagagagcagcaaggtcttgctctcctaggtagccccctcttccctggtaagaaaaagcaaaaggcatttcccaccctgaacaacgagccttttcacccttctactctagagaagtggactggaggagctgggcccgatttggtagttgaggaaagcacagaggcctcctgtggcctgccagtcatcgagtggcccaacaggggctccatgccagccgaccttgacctcactcagaagtccagagtctagcgtagtgcagcagggcagtagcggtaccaatgcagaactcccaagacccgagctgggaccagtacctgggtccccagcccttcctctgctcccccttttccctcggagttcttcttgaatggcaatgttttgcttttgctcgatgcagacagggggccagaacaccacacatttcactgtctgtctggtccatagctgtggtgtaggggcttagaggcatgggcttgctgtgggtttttaattgatcagttttcatgtgggatcccatctttttaacctctgttcaggaagtccttatctagctgcatatcttcatcatattggtatatccttttctgtgtttacagagatgtctcttatatctaaatctgtccaactgagaagtaccttatcaaagtagcaaatgagacagcagtcttatgcttccagaaacacccacaggcatgtcccatgtgagctgctgccatgaactgtcaagtgtgtgttgtcttgtgtatttcagttattgtccctggcttccttactatggtgtaatcatgaaggagtgaaacatcatagaaactgtctagcacttccttgccagtctttagtgatcaggaaccatagttgacagttccaatcagtagcttaagaaaaaaccgtgtttgtctcttctggaatggttagaagtgagggagtttgccccgttctgtttgtagagtctcatagttggactttctagcatatatgtgtccatttccttatgctgtaaaagcaagtcctgcaaccaaactcccatcagcccaatccctgatccctgatcccttccacctgctctgctgatgacccccccagcttcacttctgactcttccccaggaagggaaggggggtcagaagagagggtgagtcctccagaactcttcctccaaggacagaaggctcctgcccccatagtggcctcgaactcctggcactaccaaaggacacttatccacgagagcgcagcatccgaccaggttgtcactgagaagatgtttattttggtcagttgggtttttatgtattatacttagtcaaatgtaatgtggcttctggaatcattgtccagagctgcttccccgtcacctgggcgtcatctggtcctggtaagaggagtgcgtggcccaccaggcccccctgtcacccatgacagttcattcagggccgatggggcagtcgtggttgggaacacagcatttcaagcgtcactttatttcattcgggccccacctgcagctccctcaaagaggcagttgcccagcctctttcccttccagtttattccagagctgccagtggggcctgaggctccttagggttttctctctatttccccctttcttcctcattccctcgtctttcccaaaggcatcacgagtcagtcgcctttcagcaggcagccttggcggtttatcgccctggcaggcaggggccctgcagctctcatgctgcccctgccttggggtcaggttgacaggaggttggagggaaagccttaagctgcaggattctcaccagctgtgtccggcccagttttggggtgtgacctcaatttcaattttgtctgtacttgaacattatgaagatgggggcctctttcagtgaatttgtgaacagcagaattgaccgacagctttccagtacccatggggctaggtcattaaggccacatccacagtctcccccacccttgttccagttgttagttactacctcctctcctgacaatactgtatgtcgtcgagctccccccaggtctacccctcccggccctgcctgctggtgggcttgtcatagccagtgggattgccggtcttgacagctcagtgagctggagatacttggtcacagccaggcgctagcacagctcccttctgttgatgctgtattcccatatcaaaagacacaggggacacccagaaacgccacatcccccaatccatcagtgccaaactagccaacggccccagcttctcagctcgctggatggcggaagctgctactcgtgagcgccagtgcgggtgcagacaatcttctgttgggtggcatcattccaggcccgaagcatgaacagtgcacctgggacagggagcagccccaaattgtcacctgcttctctgcccagcttttcattgctgtgacagtgatggcgaaagagggtaataaccagacacaaactgccaagttgggtggagaaaggagtttctttagctgacagaatctctgaattttaaatcacttagtaagcggctcaagcccaggagggagcagagggatacgagcggagtcccctgcgcgggaccatctggaattggtttagcccaagtggagcctgacagccagaactctgtgtcccccgtctaaccacagctccttttccagagcattccagtcaggctctctgggctgactgggccaggggaggttacaggtaccagttctttaagaagatctttgggcatatacatttttagcctgtgtcattgccccaaatggattcctgtttcaagttcacacctgcagattctaggacctgtgtcctagacttcagggagtcagctgtttctagagttcctaccatggagtgggtctggaggacctgcccggtgggggggcagagccctgctccctccgggtcttcctactcttctctctgctctgacgggatttgttgattctctccattttggtgtctttctcttttagatattgtatcaatctttagaaaaggcatagtctacttgttataaatcgttaggatactgcctcccccagggtctaaaattacatattagaggggaaaagctgaacactgaagtcagttctcaacaatttagaaggaaaacctagaaaacatttggcagaaaattacatttcgatgtttttgaatgaatacgagcaagcttttacaacagtgctgatctaaaaatacttagcacttggcctgagatgcctggtgagcattacaggcaaggggaatctggaggtagccgacctgaggacatggcttctgaacctgtcttttgggagtggtatggaaggtggagcgttcaccagtgacctggaaggcccagcaccaccctccttcccactcttctcatcttgacagagcctgccccagcgctgacgtgtcaggaaaacacccagggaactaggaaggcacttctgcctgaggggcagcctgccttgcccactcctgctctgctcgcctcggatcagctgagccttctgagctggcctctcactgcctccccaaggccccctgcctgccctgtcaggaggcagaaggaagcaggtgtgagggcagtgcaaggagggagcacaacccccagctcccgctccgggctccgacttgtgcacaggcagagcccagaccctggaggaaatcctacctttgaattcaagaacatttggggaatttggaaatctctttgcccccaaacccccattctgtcctacctttaatcaggtcctgctcagcagtgagagcagatgaggtgaaaaggccaagaggtttggctcctgcccactgatagcccctctccccgcagtgtttgtgtgtcaagtggcaaagctgttcttcctggtgaccctgattatatccagtaacacatagactgtgcgcataggcctgctttgtctcctctatcctgggcttttgttttgctttttagttttgcttttagtttttctgtcccttttatttaacgcaccgactagacacacaaagcagttgaatttttatatatatatctgtatattgcacaattataaactcattttgcttgtggctccacacacacaaaaaaagacctgttaaaattatacctgttgcttaattacaatatttctgataaccatagcataggacaagggaaaataaaaaaagaaaaaaaagaaaaaaaaacgacaaatctgtctgctggtcacttcttctgtccaagcagattcgtggtcttttcctcgcttctttcaagggctttcctgtgccaggtgaaggaggctccaggcagcacccaggttttgcactcttgtttctcccgtgcttgtgaaagaggtcccaaggttctgggtgcaggagcgctcccttgacctgctgaagtccggaacgtagtcggcacagcctggtcgccttccacctctgggagctggagtccactggggtggcctgactcccccagtccccttcccgtgacctggtcagggtgagcccatgtggagtcagcctcgcaggcctccctgccagtagggtccgagtgtgtttcatccttcccactctgtcgagcctgggggctggagcggagacgggaggcctggcctgtctcggaacctgtgagctgcaccaggtagaacgccagggaccccagaatcatgtgcgtcagtccaaggggtcccctccaggagtagtgaagactccagaaatgtccctttcttctcccccatcctacgagtaattgcatttgcttttgtaattcttaatgagcaatatctgctagagagtttagctgtaacagttctttttgatcatctttttttaataattagaaacaccaaaaaaatccagaaacttgttcttccaaagcagagagcattataatcaccagggccaaaagcttccctccctgctgtcattgcttcttctgaggcctgaatccaaaagaaaaacagccataggccctttcagtggccgggctacccgtgagcccttcggaggaccagggctggggcagcctctgggcccacatccggggccagctccggcgtgtgttcagtgttagcagtgggtcatgatgctctttcccacccagcctgggataggggcagaggaggcgaggaggccgttgccgctgatgtttggccgtgaacaggtgggtgtctgcgtgcgtccacgtgcgtgttttctgactgacatgaaatcgacgcccgagttagcctcacccggtgacctctagccctgcccggatggagcggggcccacccggttcagtgtttctggggagctggacagtggagtgcaaaaggcttgcagaacttgaagcctgctccttcccttgctaccacggcctcctttccgtttgatttgtcactgcttcaatcaataacagccgctccagagtcagtagtcaatgaatatatgaccaaatatcaccaggactgttactcaatgtgtgccgagcccttgcccatgctgggctcccgtgtatctggacactgtaacgtgtgctgtgtttgctccccttccccttccttctttgccctttacttgtctttctggggtttttctgtttgggtttggtttggtttttatttctccttttgtgttccaaacatgaggttctctctactggtcctcttaactgtggtgttgaggcttatatttgtgtaatttttggtgggtgaaaggaattttgctaagtaaatctcttctgtgtttgaactgaagtctgtattgtaactatgtttaaagtaattgttccagagacaaatatttctagacactttttctttacaaacaaaagcattcggagggagggggatggtgactgagatgagaggggagagctgaacagatgacccctgcccagatcagccagaagccacccaaagcagtggagcccaggagtcccactccaagccagcaagccgaatagctgatgtgttgccactttccaagtcactgcaaaaccaggttttgttccgcccagtggattcttgttttgcttcccctccccccgagattattaccaccatcccgtgcttttaaggaaaggcaagattgatgtttccttgaggggagccaggaggggatgtgtgtgtgcagagctgaagagctggggagaatggggctgggcccacccaagcaggaggctgggacgctctgctgtgggcacaggtcaggctaatgttggcagatgcagctcttcctggacaggccaggtggtgggcattctctctccaaggtgtgccccgtgggcattactgtttaagacacttccgtcacatcccaccccatcctccagggctcaacactgtgacatctctattccccaccctccccttcccagggcaataaaatgaccatggagggggcttgcactctcttggctgtcacccgatcgccagcaaaacttagatgtgagaaaaccccttcccattccatggcgaaaacatctccttagaaaagccattaccctcattaggcatggttttgggctcccaaaacacctgacagcccctccctcctctgagaggcggagagtgctgactgtagtgaccattgcatgccgggtgcagcatctggaagagctaggcagggtgtctgccccctcctgagttgaagtcatgctcccctgtgccagcccagaggccgagagctatggacagcattgccagtaacacaggccaccctgtgcagaagggagctggctccagcctggaaacctgtctgaggttgggagaggtgcacttggggcacagggagaggccgggacacacttagctggagatgtctctaaaagccctgtatcgtattcaccttcagtttttgtgttttgggacaattactttagaaaataagtaggtcgttttaaaaacaaaaattattgattgcttttttgtagtgttcagaaaaaaggttctttgtgtatagccaaatgactgaaagcactgatatatttaaaaacaaaaggcaatttattaaggaaatttgtaccatttcagtaaacctgtctgaatgtacctgtatacgtttcaaaaacaccccccccccactgaatccctgtaacctatttattatataaagagtttgccttataaattt

SEQ ID NO: 23189 - DNA, 2432 bp, Homo Sapiens
ctccgtcgtcacagggaataaatctcgctcgaaactcactggaccgctcctagaaaggcgaaaagatattcaggagcccttccattttccttccagtaggcaccgaacccagcattttcggcaaccgctgctggcagttttgccaggtgtttgttaccttgaaaaatggctactggacaggatcgagtggttgctctcgtggacatggactgtttttttgttcaagtggagcagcggcaaaatcctcatttgaggaataaaccttgtgcagttgtacagtacaaatcatggaagggtggtggaataattgcagtgagttatgaagctcgtgcatttggagtcactagaagtatgtgggcagatgatgctaagaagttatgtccagatcttctactggcacaagttcgtgagtcccgtgggaaagctaacctcaccaagtaccgggaagccagtgttgaagtgatggagataatgtctcgttttgctgtgattgaacgtgccagcattgatgaggcttacgtagatctgaccagtgctgtacaagagagactacaaaagctacaaggtcagcctatctcggcagacttgttgccaagcacttacattgaagggttgccccaaggccctacaacggcagaagagactgttcagaaagaggggatgcgaaaacaaggcttatttcaatggctcgattctcttcagattgataacctcacctctccagacctgcagctcaccgtgggagcagtgattgtggaggaaatgagagcagccatagagagggagactggttttcagtgttcagctggaatttcacacaataaggtcctggcaaaactggcctgtggactaaacaagcccaaccgccaaaccctggtttcacatgggtcagtcccacagctcttcagccaaatgcccattcgcaaaatccgtagtcttggaggaaagctaggggcctctgtcattgagatcctagggatagaatacatgggtgaactgacccagttcactgaatcccagctccagagtcattttggggagaagaatgggtcttggctatatgccatgtgccgagggattgaacatgatccagttaaacccaggcaactacccaaaaccattggctgtagtaagaacttcccaggaaaaacagctcttgctactcgggaacaggtacaatggtggctgttgcaattagcccaggaactagaggagagactgactaaagaccgaaatgataatgacagggtagccacccagctggttgtgagcattcgtgtacaaggagacaaacgcctcagcagcctgcgccgctgctgtgcccttacccgctatgatgctcacaagatgagccatgatgcatttactgtcatcaagaactgtaatacttctggaatccagacagaatggtctcctcctctcacaatgcttttcctctgtgctacaaaattttctgcctctgccccttcatcttctacagacatcaccagcttcttgagcagtgacccaagttctctgccaaaggtgccagttaccagctcagaagctaagacccagggaagtggcccagcggtgacagccactaagaaagcaaccacgtctctggaatcattcttccaaaaagctgcagaaaggcagaaagttaaagaagcttcgctttcatctcttactgctcccactcaggctcccatgagcaattcaccatccaagccctcattaccttttcaaaccagtcaaagtacaggaactgagcccttctttaagcagaaaagtctgcttctaaagcagaaacagcttaataattcttcagtttcttccccccaacaaaacccatggtccaactgtaaagcattaccaaactctttaccaacagagtatccagggtgtgtccctgtttgtgaaggggtgtcgaagctagaagaatcctctaaagcaactcctgcagagatggatttggcccacaacagccaaagcatgcacgcctcttcagcttccaaatctgtgctggaggtgactcagaaagcaaccccaaatccaagtcttctagctgctgaggaccaagtgccctgtgagaagtgtggctccctggtaccggtatgggatatgccagaacacatggactatcattttgcattggagttgcagaaatcctttttgcagccccactcttcaaacccccaggttgtttctgccgtatctcatcaaggcaaaagaaatcccaagagccctttggcctgcactaataaacgccccaggcctgagggcatgcaaacattggaatcattttttaagccattaacacattagtgctgccctcaggcttgcctgtaggatttaatattttttatctttacagatctttatctttaatattttatctttacagatttccctgagaaagggaattatgaaatttttaatacaaaaaataa

SEQ ID NO: 23190 - DNA, 2005 bp, Homo Sapiens
ttgcaggctgctgggctggggctaagggctgctcagtttccttcagcggggcactgggaagcgccatggcactgcagggcatctcggtcgtggagctgtccggcctggccccgggcccgttctgtgctatggtcctggctgacttcggggcgcgtgtggtacgcgtggaccggcccggctcccgctacgacgtgagccgcttgggccggggcaagcgctcgctagtgctggacctgaagcagccgcggggagccgccgtgctgcggcgtctgtgcaagcggtcggatgtgctgctggagcccttccgccgcggtgtcatggagaaactccagctgggcccagagattctgcagcgggaaaatccaaggcttatttatgccaggctgagtggatttggccagtcaggaagcttctgccggttagctggccacgatatcaactatttggctttgtcaggtgttctctcaaaaattggcagaagtggtgagaatccgtatgccccgctgaatctcctggctgactttgctggtggtggccttatgtgtgcactgggcattataatggctctttttgaccgcacacgcactggcaagggtcaggtcattgatgcaaatatggtggaaggaacagcatatttaagttcttttctgtggaaaactcagaaatcgagtctgtgggaagcacctcgaggacagaacatgttggatggtggagcacctttctatacgacttacaggacagcagatggggaattcatggctgttggagcaatagaaccccagttctacgagctgctgatcaaaggacttggactaaagtctgatgaacttcccaatcagatgagcatggatgattggccagaaatgaagaagaagtttgcagatgtatttgcaaagaagacgaaggcagagtggtgtcaaatctttgacggcacagatgcctgtgtgactccggttctgacttttgaggaggttgttcatcatgatcacaacaaggaacggggctcgtttatcaccagtgaggagcaggacgtgagcccccgccctgcacctctgctgttaaacaccccagccatcccttctttcaaaagggatcctttcataggagaacacactgaggagatacttgaagaatttggattcagccgcgaagagatttatcagcttaactcagataaaatcattgaaagtaataaggtaaaagctagtctctaacttccaggcccacggctcaagtgaatttgaatactgcatttacagtgtagagtaacacataacattgtatgcatggaaacatggaggaacagtattacagtgtcctaccactctaatcaagaaaagaattacagactctgattctacagtgatgattgaattctaaaaatggttatcattagggcttttgatttataaaactttgggtacttatactaaattatggtagttattctgccttccagtttgcttgatatatttgttgatattaagattcttgacttatattttgaatgggttctagtgaaaaaggaatgatatattcttgaagacatcgatatacatttatttacactcttgattctacaatgtagaaaatgaggaaatgccacaaattgtatggtgataaaagtcacgtgaaacagagtgattggttgcatccaggccttttgtcttggtgttcatgatctccctctaagcacattccaaactttagcaacagttatcacactttgtaatttgcaaagaaaagtttcacctgtattgaatcagaatgccttcaactgaaaaaaacatatccaaaataatgaggaaatgtgttggctcactacgtagagtccagagggacagtcagttttagggttgcctgtatccagtaactcggggcctgtttccccgtgggtctctgggctgtcagctttcctttctccatgtgtttgatttctcctcaggctggtagcaagttctggatcttatacccaacacacagcaacatccagaaataaagttct

SEQ ID NO: 23191 - DNA, 3895 bp, Homo Sapiens
ctgcaggaattccgatccttccgcaggttcacctacggaaaccttgttacgacttttacttcctctagatagtcaagttcgaccgtcttctcagcgctccgccagggccgtgggccgaccccggcggggccgatccgagggcctcactaaaccatccaatcggtagtagcgacgggcggtgtgtacaaagggcagggacttaatcaacgcaagcttatgacccgcacttactgggaattcctcgttcatggggaataattgcaatccccgatccccatcacgaatggggttcaacgggttacccgcgcctgccggcgtagggtaggcacacgctgagccagtcagtgtagcgcgcgtgcagccccggacatctaagggcatcacagacctgttattgctcaatctcgggtggctgaacgccacttgtccctctaagaagttgggggacgccgaccgctcgggggtcgcgtaactagttagcatgccagagtctcgttcgttatcggaattaaccagacaaatcgctccaccaactaagaacggccatgcaccaccacccacggaatcgagaaagagctatcaatctgtcaatcctgtccgtgtccgggccgggtgaggtttcccgtgttgagtcaaattaagccgcaggctccactcctggtggtgcccttccgtcaattcctttaagtttcagctttgcaaccatactccccccggaacccaaagactttggtttcccggaagctgcccggcgggtcatgggaataacgccgccgcatcgccggtcggcatcgtttatggtcggaactacgacggtatctgatcgtcttcgaacctccgactttcgttcttgattaatgaaaacattcttggcaaatgctttcgctctggtccgtcttgcgccggtccaagaatttcggaattccgcagcggcggccagcagggcggaggctgaggcagcaagctcgctagagagggagaagcagtcgggcgcaggcgcctcctccgcagcccgctccatggtcggcgcccacagcccgcggcggcctgtcttgcgctccacttccttcacatcctcctccgcctcctcgttttcaggcgccgccggcggcgctgtgtggaggcccgcgagctgaaattcgcggtgcgacgggagggagtggagaaggaggtgagggggcccaggatcgcggggcgccctgaggcaaggggacgccggcgggccgaagcgcagcccgccgcccgcaggctcggctccgccactgccgccctcccggtctcctcgcctcggccgccgaggcagggagagaatgagccccgggacccgccgggggacggcccgggccaggcccgggatctagacggccgtagggggaagggagccgccctccccacggcgccttttcggaactgccgtggactcgaggacgctggtcgccggcctcctagggctgtgctgttttgttttgaccctcgcattgtgcagaattaaagtgcagtaaaatgtccactaggaccccattgccaacggtgaatgaacgagacactgaaaaccacacgtcacatggagatgggcgtcaagaagttacctctcgtaccagccgctcaggagctcggtgtagaaactctatagcctcctgtgcagatgaacaacctcacatcggaaactacagactgttgaaaacaatcggcaaggggaattttgcaaaagtaaaattggcaagacatatccttacaggcagagaggttgcaataaaaataattgacaaaactcagttgaatccaacaagtctacaaaagctcttcagagaagtaagaataatgaagattttaaatcatcccaatatagtgaagttattcgaagtcattgaaactgaaaaaacactctacctaatcatggaatatgcaagtggaggtgaagtatttgactatttggttgcacatggcaagatgaaggaaaaagaagcaagatctaaatttagacagggttgtcaagctggacagactattaaagttcaagtctcctttgatttgcttagtctgatgtttacatttattgtgtctgcagttcaatactgccatcagaaacggatcgtacatcgagacctcaaggctgaaaatctattgttagatgccgatatgaacattaaaatagcagatttcggttttagcaatgaatttactgttggcggtaaactcgacacgttttgtggcagtcctccatacgcagcacctgagctcttccagggcaagaaatatgacgggccagaagtggatgtgtggagtctgggggtcattttatacacactagtcagtggctcacttccctttgatgggcaaaacctaaaggaactgagagagagagtattaagagggaaatacagaattcccttctacatgtctacagactgtgaaaaccttctcaaacgtttcctggtgctaaatccaattaaacgcggcactctagagcaaatcatgaaggacaggtggatcaatgcagggcatgaagaagatgaactcaaaccatttgttgaaccagagctagacatctcagaccaaaaaagaatagatattatggtgggaatgggatattcacaagaagaaattcaagaatctcttagtaagatgaaatacgatgaaatcacagctacatatttgttattggggagaaaatcttcagagctggatgctagtgattccagttctagcagcaatctttcacttgctaaggttaggccgagcagtgatctcaacaacagtactggccagtctcctcaccacaaagtgcagagaagtgtttcttcaagccaaaagcaaagacgctacagtgaccatgctggaccagctattccttctgttgtggcgtatccgaaaaggagtcagacaagcactgcagatggtgacctcaaagaagatggaatttcctcccggaaatcaagtggcagtgctgttggaggaaagggaattgctccagccagtcccatgcttgggaatgcaagtaatcctaataaggcggatattcctgaacgcaagaaaagctccactgtccctagtagtaacacagcatctggtggaatgacacgacgaaatacttatgtttgcagtgagagaactacagctgatagacactcagtgattcagaatggcaaagaaaacagcactattcctgatcagagaactccagttgcttcaacacacagtatcagtagtgcagccaccccagatcgaatccgcttcccaagaggcactgccagtcgtagcactttccacggccagccccgggaacggcgaaccgcaacatataatggccctcctgcctctcccagcctgtcccatgaagccacaccattgtcccagactcgaagccgaggctccactaatctctttagtaaattaacttcaaaactcacaaggagtcgcaatgtatctgctgagcaaaaagatgaaaacaaagaagcaaagcctcgatccctacgcttcacctggagcatgaaaaccactagttcaatggatcccggggacatgatgcgggaaatccgcaaagtgttggacgccaataactgcgactatgagcagagggagcgcttcttgctcttctgcgtccacggagatgggcacgcggagaacctcgtgcagtgggaaatggaagtgtgcaagctgccaagactgtctctgaacggggtccggtttaagcggatatcggggacatccatagccttcaaaaatattgcttccaaaattgccaatgagctaaagctgtaacccagtgattatgatgtaaattaagtagcaagtaaagtgttttcctgaacactgatggaaatgtatagaataatatttaggcaataacgtctgcatcttctaaatcatgaaattaaagtctgaggacgagagc

SEQ ID NO: 23192 - DNA, 1034 bp, Homo Sapiens
tgtcggcctctgggcggatgttgacattgtgttgttgttattgctgatggtaatggcggcggcggtggcggcgacggtccagaccccatcccctctgtagccggagccgagacagccgacagcgaactccgcggcctcggagccggcggcagcggcgactcccctcagcctccgccgcctcgcccgccggtaccccggcgccaaccccgggagtcaggccctttgggcaggggagctcggaggctcaggatggcggatttcgacgaaatctatgaggaagaggaggacgaggagcgggccctggaggagcagctgctcaagtactcgccggacccggtggtcgtccgcggctccggtcacgtcaccgtatttggactgagcaacaaatttgaatctgaattcccttcttcattaactggaaaagtagctcctgaagaatttaaagccagcatcaacagagttaacagttgtcttaagaagaaccttcctgttaatgtacgttggctactttgtggctgcctttgttgctgctgcacattaggttgcagtatgtggccagttatttgcctcagtaaaagaacacgaagatcgattgagaagttattagaatgggaaaacaataggttataccacaagctgtgcttgcattggagactgagcaaaaggaaatgtgaaacgaataacatgatggaatatgtcatcctcatagaatttttaccaaagacaccgatttttcgaccagattagcatttactttatttatagagactttccaagtatgttgtctttccaatggtgccttgcttggtgctctcctggtggtgacataacattggttctacagaatcgtgtggtgttttttttgtttttgttttttttttttttttaaataaccgcatgttctaagtgtgcatttttgtcaatctttgcaacagttatttcatacagatgtttaatacttaagttattgtgctcttttctgttatgtattctgattttcaaggattactttttttgtattatcaaaaaaatac

SEQ ID NO: 23193 - DNA, 4898 bp, Homo Sapiens
cgccgtgcgcaggcgcggagctagacctcgctgcagcccccatcgcctcggggagtctcacccaccgagtccgcccgctggcccgtcagtgctctccccgtcgtttgccctctccagttcccccagtgcctgccctacgcaccccgatggcggagctgcggcctagcggcgcccccggccccaccgcgcccccggcccctggcccgactgcccccccggccttcgcttcgctctttcccccgggactgcacgccatctacggagagtgccgccgcctttaccctgaccagccgaacccgctccaggttaccgctatcgtcaagtactggttgggtggcccagaccccttggactatgttagcatgtacaggaatgtggggagcccttctgctaacatccccgagcactggcactacatcagcttcggcctgagtgatctctatggtgacaacagagtccatgagtttacaggaacagatggacctagtggttttggctttgagttgacctttcgtctgaagagagaaactggggagtctgccccaccaacatggcccgcagagttaatgcagggcttggcacgatacgtgttccagtcagagaacaccttctgcagtggggaccatgtgtcctggcacagccctttggataacagtgagtcaagaattcagcacatgctgctgacagaggacccacagatgcagcccgtgcagacaccctttggggtagttaccttcctccagatcgttggtgtctgcactgaagagctacactcagcccagcagtggaacgggcagggcatcctggagctgctgcggacagtgcctattgctggcggcccctggctgataactgacatgcggaggggagagaccatatttgagatcgatccacacctgcaagagagagttgacaaaggcatcgagacagatggctccaacctgagtggtgtcagtgccaagtgtgcctgggatgacctgagccggccccccgaggatgacgaggacagccggagcatctgcatcggcacacagccccggcgactctctggcaaagacacagagcagatccgggagaccctgaggagaggactcgagatcaacagcaaacctgtccttccaccaatcaaccctcagcggcagaatggcctcgcccacgaccgggccccgagccgcaaagacagcctggaaagtgacagctccacggccatcattccccatgagctgattcgcacgcggcagcttgagagcgtacatctgaaattcaaccaggagtccggagccctcattcctctctgcctaaggggcaggctcctgcatggacggcactttacatataaaagtatcacaggtgacatggccatcacgtttgtctccacgggagtggaaggcgcctttgccactgaggagcatccttacgcggctcatggaccctggttacaaattctgttgaccgaagagtttgtagagaaaatgttggaggatttagaagatttgacttctccagaggaattcaaacttcccaaagagtacagctggcctgaaaagaagctgaaggtctccatcctgcctgacgtggtgttcgacagtccgctacactagcctgggctgggccctgcaggggccagcagggagcccagctgctccccagtgacttccagtgtaacagttgtgtcaacgagatctccacaaataaaaggacaagtgtgaggaagactgcgcagtgccaccccgcagcccagtggggtgccatgcacaggccacaggccctccacctcacctccagctcaggggccgcaccccgccgctggctaagccttgtgacccatcaggccagtgagtgggcaaatgcggaccctccctgcctgcagcctgcacagattctggtttgaggtttgactctggaccctggctgtgcccctaggtggagacagccctctttctcacctaccccctgccgcacagcccagcaggagggaggcggacagccagatgcagagcgagtggatgcacttcccagctcatctctggaagcctttgctactcaagctcctctggccgcggaacaattcctctgatcatgtttggttttcttcttccttattttattttgtagaaaccgggtggtattttattgctctgcaaagatgtccagaagccatgtatataatgttttttaaacagaacttcattccccgttgaactttcgcattctctgacagaggcctagggctgtatctctccctgggctgccaccagagaaggtgcttggtgttcgcctgccagcccagagccctggaggagccggctgcacagagaggcttttcttcccagctgggcctgatggagcccggggcagggggagagtagagacactcccttgtgcagctttgagcctagtttagctggggccagggaggggtgctactgttttccaagtgaatgggtctcaaagacttggtgaccccagcctcatcttctaggccttttccatccaaccaggcctacctgggagagggtgaggttcagcacatcacacaccatccccactgtcattcagggcctgggtctccagctctgtaaccagtcctgtcccatttcctcagtccctgggcctcccagccttcaggctgtagggctgccttactaaaattgaaaaatccacctcttaacatctctttcactttggttttgctaacactgctctctgctgccctcccatcctccctgtatccattcatgccctatctttcattctccactcctaatccctctcctttctggcatcctggcctctcgtggtcctcagcccctcacccccagtactgcagatctcacagtttgccttccagaagccagcctatctctagcccatggttttggagttcctctcgggttatctcccacgcctgacctggaaccagcaagcccctttcctgccttcttacccccaactctagggatgggactgttacaatacttcaagatcactctttacacctcttcaaagcaaagtcatgacaatgcagggctcctcattgctcccatctgcctctgctgcacacacaggcaccagcagggatgccacaggagtgcccacagggtgcaggactccactgatgagagatccagccaaagagctgcccccaggggtatgagggcaccagctgggttctccagggagcaggagttggacctccatggagccactaggcctggcctcctctacacatccccagggctatctggttaattccatcaagctcagagttaaaaggcatatcagcctggagtatttgggagagactggctgcagatccccgccagccaagatgcaagccactcgggacctgatgtcggcagctgtgcctctactgccctgaggacttaccagagggagccctactggccttcccccaccacagcagccctgcctgtgaagctcttgtttctgacatttcacaggcagagaggtgccatcagttcgcctccattccttgccaccatgaccagcctctccctgaactctctcttgctcgggacctgcctgagggctccctgctgcagttcgccgtacttccatctgctgggtgcctccatcgttggttgggtggggatggggcattttctgagctaagctttgtcattagtttgtgaagcacctggtcagcaacctgccccagacctggagggtctttgtggactgaaggtagacaccagccagcatggtggccctgttctgggggagcagggtaaggcaggaggaagtgggtgagctccgagatgatgagcacatgaagcctgtggccccttcgtacctgcaatatgtcaggagcctcacgctcacccaagatcctgcaggggccaggctccatctcactggctctgagggcaggacagggtatcacacatttctcaccaggcctcctttcctatgggcattggtgcctcccagaggtttcttgggctgctggctggtgagagaggacccttaaagaagatcaagccaagctgaccttggaccctgtccagcacagcttctggcacaggatgcttggtgaatgtaccctttctttccctccctgcagctctgagggagcccctgaccttgtagtgggtggaggaggtaaggggcctccctccctaaatctgcctcttctgcaagctacttggagacttgcctagttgtacccacccctccaggtccctggtgctagagcttctgagaagggcctttccctttcctctttgcctgctatataaggcaggctcctgtggctctgctggctcagtgtgggctgcaggaggactgcagactcagctgcaattctgaggggggtttgggaggcttgtgcgaggtctcaggcctgtgtggggagctggtgcctcttcctgcccgtatctttctcttccaagggcagtgctccaaggcagggactggagaagccaaggggagagtctaaaagggctagagcatttttaaaaatagacacagggtcttgggactggggtttcggattgagttgcaagcagggagaaaacctgaaggtcggtgcccctatggggctgaccagtagagaatttcctttactgtatttttgtgtctggtcttccctttctggcttctaggacatccatgccaggtgaggtgcctgggtccctgttacaagtcaggagccctgtagggagacccctccttttgtacaagtacctgaatgctgcgacaagcagatttttgtaaaattttatattagtttttaatgtcagtggcgactcggttcctggggctgcagccagcctgggacttttgtaagaatttttgggtgactcacttagatgtcgtttccttcttgccccctcttcctctctgtaatctaagtgcattaaacatctttgcag

SEQ ID NO: 23194 - DNA, 3463 bp, Homo Sapiens
atggctgagccgactagtgatttcgagactcctatcgggtggcatgcgtctcccgagctgactcccacgttagggcccctgagcgacactgccccgccgcgggacaggtggatgttctgggcaatgctgccgccaccgccaccaccacttacgtcctcgcttcccgcagccgggtcaaagccttcctctgagtcgcagccccccatggaggcccagtctctccccggggctccgccccccttcgacgcccagattcttcccggggcgcaaccccccttcgacgcccagtctccccttgattctcagcctcaacccagcggccagccttggaatttccatgcttccacatcgtggtattggagacagtcttctgataggtttcctcggcatcagaagtccttcaaccctgcagttaaaaattcttattatccacgaaagtatgatgcaaaattcacagacttcagcttacctcccagtagaaaacagaaaaaaaagaaaagaaaggaaccagtttttcactttttttgtgatacctgtgatcgtggttttaaaaatcaagaaaagtatgacaaacacatgtctgaacatacaaaatgccctgaattagattgctcttttactgcacacgagaagattgtccagttccattggagaaatatgcatgctcctggcatgaagaagatcaagttagacactccagaggaaattgcacggtggagggaagaaagaaggaaaaactatccaactctggccaatattgaaaggaagaagaagttaaaacttgaaaaggagaagagaggagcagtattgacaacaacacaatatggcaagatgaaggggatgtccagacattcacaaatggcaaagatcagaagtcctggcaagaatcacaaatggaaaaacgacaattctagacagagagcagtcactggatcaggcagtcacttgtgtgatttgaagctagaaggtccaccggaggcaaatgcagatcctcttggtgttttgataaacagtgattctgagtctgataaggaggagaaaccacaacattctgtgatacccaaggaagtgacaccagccctatgctcactaatgagtagctatggcagtctttcagggtcagagagtgagccagaagaaactcccatcaagactgaagcagacgttttggcagaaaaccaggttcttgatagcagtgctcctaagagtccaagtcaagatgttaaagcaactgttagaaatttttcagaagccaagagtgagaaccgaaagaaaagctttgaaaaaacaaaccctaagaggaaaaaagattatcacaactatcaaacgttattcgaaccaagaacacaccatccatatctcttggaaatgcttctagctccggacattcgacatgaaagaaatgtgattttgcagtgtgttcggtacatcattaaaaaagacttttttggactggatactaattctgcgaaaagtaaagatgtataggcatctggtgtttcagcatacataactgaagcatgtgaaacagtatcatcctcgttagtagaggaaaaccaaaacccttttttccgtcaaaattggatttgtaattaaattgtaagcctcgtaggatgtatgttggaattttaagtctttcctttggttctatgcaaataaaaaaataactgattttttaagactgtgtctgtattgttgggattgaatctagtatttgctgggagaattttttctttgtatttattttaatgtattgttctcatgtaagaatgactgatgttgtgttagttaagaattgaagataggtttagcagtaaagaagaaagcttttaaaaggattgattcagctaagcaaagttgggcagagaaatacagccattttgtttttaatgcagaaaaggaagatgttctgtagcaagggggaatattttaaaaataaaccagatcaaattaatacaatcagaaggtttcgaaatgtaaatattccttatttaagacatgtttaaattcacctactagcacgacttacatagctcaaatattgaatgtttaaaatattaatacagatggggcctctttatgtttagataaaattgaagtacttaattgaagctttttaaaaattgtaaagtaaatgaaagctattgagatctttttgtctcctataataccagggaatttgagcttgtgttctagtcattgtactagctgtagctattggtctgtccttttgacatacagctaaaagggactaaatttgtaaaaaattagtttgttatagttgaagattaacttttcctaacattgtgattattgaagttcatgaatcttgctgtcaaggaagaaaggtaagaaagctgatagctcctccatgttggtaaaatcctctccagaatcttggaacacctggcatgtgaccctagtgacgtcacagacctgagatgaagattcatgtttagccagtgttttccagccttgtacccaccatacagatctgtttattctgtttcaccctactcctccagtgagccccatattttgggaaattatctgccttatacattaactaattcaattcatgtaacactgttgagtgcttactctttgtacctctattgtgcctatattaaaggtatacaaataaataaggccatgtctgacttcaaggaactcagtttaattttgatatattcaaagatgtgattcccaaccaactcaggatgaagtaactagtgttacaactgagttgatattctaaaatataacccagtttgtacttttattactagttagcatacacattttatggcttatgggttaataaatgaattcatggactcctggactactttcattgatgaccatatctccagggatgttgttgatccccacactgccttaaggtatattatagaaacagttttattttccatttttcttgtttcctgataataaatgtatttaggactgaaaatactcctgagtactcccctggctgtatgtctgacagtctttagctatggtgactattgtttatttttaatgggtatttcagattccaagtgtatttaaaatttctaaggagatataatatagcctgtatggtttctactttatggaattatatggtcaatatttgtaaatattctatgagttttgggtgggtagaggggtgctttgcctgttttgggtacaggtttttttggatttagcttgttaattgttcaaactttctgccttctacattcctatcttattgttcgtttaatcagtttctgaaatgtaagcattacatgactattggtgagttgtgccttttataactgaaatactttactttttctcatatcctctataattgacttctattttccttaatcaaaccagctctgggaaatttaatacatttatattaattgagattattaaaacatttggactattaaaaaaaaaaaaaaaaaaa

SEQ ID NO: 23195 - DNA, 1384 bp, Homo Sapiens
gctcgacgaggacgtcaacctgcgggtcatctcggaatatcagaagctctttcctgacattcccatagggtattctgggcatgaaacaggcatagcgatatctgtggccgcagtggctctgggggccaaggtgttggaacgtcacataactttggacaagacctggaagggagtgaccactcggcctcgctggagcctggagaactggccgagctggtgcggtcagtgcgtcttgtggagcgtgccctgggctccccaaccaagcagctgctgccctgtgagatggcctgcaatgagaaggtgtgtcctgccggactctactcggttctgctgccgtgtgtggaaaaaggatgggctggcctgagaggatggtcaggaccagccctccctgagccaggctgatgaaatgatcagtgaatgtgctcccaaccgtgtcagcttcttcaggcttctcttcagtaatgcatgtcactctggcctgtagcagcagcaggagacacatgttatctaactttagcagtttctctggccacctagggtcacattagagtcttccactaattctctgaagcccatggccccagtactcctagactccagaatatgtaacaggagtgaggtcctggaataagtcaagtctgggctcccttggagcaggtaagccctgagaaacatttaggcacggtgttccctgaggtaccagaagagccttgtggcatttcctaagccagggtggcactggtgggaagggcagtgagtcgttgcagaggtgggtgggtgatgatgcagctattccttgtgcaacagtgaccttcagacagaggaactggtgggcctagaagcactgcctggcatgctgactatcagggcttcctgaaagccgtggcctggaccttcttgccttctgagtcatagagccaggcaggcatcctggggctgccaggcacacacacacctaacctgtaggctgtcggggtcaaggcaaagaccaaacaccaggcatgcctgggactgttgtcaccttttattctagtggggcctacctgcttccccaaatcaaagatgcatctataccaggaaattaaaataaagtaaaaagaaatagtttctttatagaggaaacaggagagaatcagaccagaaaccagagtaagatttataacagctgagcacttaatttggctctctgagcagacagtaaaacataacaggatgcatgattatcacttgacattttttcctggcaccacattccaagcagaattgattccttgtactcttacgtggaggatatagagtaataaaacacgtaatttatttgaaagcatttatagagaagacaaacactggtcatgagcttcaggtacccttcattccctcatct

SEQ ID NO: 23196 - DNA, 731 bp, Homo Sapiens
agccagcctgtggaccagctactggatcctgccaccgacagctcatctggaggactccgcagtccagacaactcatgatgctggactggaccgctcaggccagcgacagcctggcccaggcggagcaggtactcagctctgcgggccccacctcttccttcgtcttctgaactgtgctatggcccaggacagcctggcaggtggcctcgctgcccccagttcccctctctgcccccacactcgtcttagttgcttcacactggtcactggccctgcacactgggctattgctttatccctatcctgagagcagcccctccccaccatccctccacatgctgcaaggacagactgaagggctgtgagcaggtgtaagggctcccacatccgtgagcctgtgtccgcagctgctgccactctgggctgctccagcctgcaacttagtggaaggaattacttcctcctgaggctacaggcgagaaaggtagggatgggccagcctcccgtctcagctgttgggagacagtaggcaggctgagtggcccagagcactcctggaagtgggactcccctgccttgcaaatgtgcctctccagactgctcctgcacttaccccctccctgcagcaccttctctgcccgttcttgtccacacatctattaaatgcttctgttttcatttgcaaaaaaaaaaaaaaaaaaaaaaaaaaaaaaaaaaaaaaaaaaaaaaaa

SEQ ID NO: 23197 - DNA, 1706 bp, Homo Sapiens
gggttgaggtgcgtgacagtgggagctgctctcggcacaagcatgtacggcaaaggcaagagtaacagcagcgccgtcccgtccgacagccaggcccgggagaagttagcactctacgtatatgaatatctgctccatgtaggagctcagaaatcagctcaaacatttttatcagagataagatgggaaaaaacatcacattgggggaaccaccaggattcttacattcttggtggtgtgtattttgggatctctactgtgcagctccagagagacgtgaaacatgtgaacactcaagtgaagcaaaagccttccatgattacagtgctgcagcagctcccagtccagtgctaggaaacattcccccaggagatggcatgccagtaagtcctgtaccaccagggttctttcagccttttatgtcacctcggtaccctggaggtccaaggcccccattgaggatacctaatcaggcacttggaggtgtcccaggaagtcagccattactccccagtggaatggatccaactcgacaacaaggacatccaaatatgggtgggccaatgcagagaatgactcctccaagaggaatggtgcccttaggaccacagaactatggaggtgcaatgagacccccactgaatgctttaggtggccctggaatgcctggaatgaacatgggtccaggtggtggtagaccttggccaaacccaacaaatgccaattcaataccatactcctcagcatctcctgggaattatgtaggtcctccaggaggtggagggccaccaggaacacccatcatgcctagtccagcagattcaaccaactctggtgataacatgtatactttaatgaatgcagtacctcctggacctaacagacctaattttccaatgggtcctgggtcagatggtcccatgggtggattaggaggaatggagtcacatcacatgaatggctctttaggctcaggagatatggacagtatttccaagaattctcccaataatatgagcctgagtaatcaaccgggcactccaagggatgatggcgaaatggggggaaatttcttaaatccttttcagagtgagagttactcccctagcatgacaatgagcgtgtgatccattaccaagtctcctcatgaaaaccacagtgagtcagcccttcacagaactactacggaagaaaattattcatcacagtgtacagttaaacaaaggaatctcagtcacaccaaaccaacctttttatttcctgctctctcccctcttttgtgaagaaagcgggtccaaatgtgattcaaacaactgtacggagtggcatattagaattgccctaaactgaactgcaaataattatgtgtgtatgtatatgtgtgggaaagagaatgtactgtatatgtgtatgttatacagacatatacacatacatacattgacccacaggacattgtaaaatattatcacatgacatcttaagtagaaataagtagggacttttattccatcctttttttcacgtttacattttaattattacaagttgctcctgccccctccctgaactattttgtgctgtgtatatcactgctttatataagttattttttaaggtgaactcagatgttatggttttgtaaatgtctgcaatcatggataggaataaaatcgcttatttgagagctttcattaaaaaaaaaa

SEQ ID NO: 23198 - DNA, 1066 bp, Homo Sapiens
ggcagttagtcggctgcaatggcgccggtgaggcggtccgcgaagtggcggcctggtggtattgaggcgcgtggtgaaggggtttccactgtcgggtacaggaataagaatgtgagacagaagacatggcggcctaaccacccgcaagccttcgtggggagcgttcgcgagggacaaggctttgcttttcgaagaaaactgaaaatacagcaaagttacaagaaattgctacggaaggaaaagaaggctcaaacgtcactggaatctcaattcacagatcgatacccagataatctgaaacatctctatttagctgaagaggaaagacataggaagcaagcaagaaaagtcgaccatcctttgtcagaacaagttcaccagccgttgcttgaagaacagtgtagcattgacgagcctttatttgaagatcagtgtagctttgaccagcctcagccagaagaacaatgtattaaaacagtaaactcctttacaatttcaaagaaaaataaaaagaaaacatcaaatcaaaaagcacaagaagaatatgaacagatacaagccaaacgtgctgctaagaaacaagaattcgagaggagaaaacaggagagagaagaagcccaaaggcagtacaaaaagaagaaaatggaagtgtttaaaatactgaacaaaaagactaaaaagggccaaccaaacttgaatgtacaaatggagtaccttcttcaaaaaatacaagaaaaatgttaaacattttgttcctacaggttaaaatatctgctgcctattaggttcttctgtgacatgtgcctcccagcagtgaactaaatttgtcgacataaactggattgctaaactatgctaaatataagatgttcacatatttttattatggtaaaaaattttctaaatatgttctacatgtttcttatttatttgcctctgaaggaaggttggcctgaagaactgaaagaacctcttattttgcaagacaggcccaagcatgtaatacttttgtaccatatgagatttatatgaaataaattttttaaaaataaggaaaaaaaaaaaa

SEQ ID NO: 23199 - DNA, 3041 bp, Homo Sapiens
ggcagcaggtcggtaggcgggaaatggcgactggctgaaggagctggttctgttgctgctgcggggtaagcgggaaagacaccacacattgcgcagtcgggaccatcgccggagcctgaggacacttctctgtcgtcacagttagttttacatgtggcacccataaaagatgaggctgagaacacggaaagcttctcagcagtcaaatcaaatccaaacacaacgcactgccagagcaaagaggaaatattcagaggttgatgatagtctgccttcaggaggagaaaaaccatcgaagaatgaaaccggcttgttgtcttcaattaaaaaatttattaaaggaagcacacctaaggaagagagagaaaatccttcaaaacggagtagaattgaacgtgatatagataacaatttgatcacgtcaacaccaagagcaggagaaaaacctaacaaacagatatctcgagtaagacggaaaagtcaagtaatggagaagcttggtagttatgaaatgacaaatcaacatgtaaaacaaaatggaaaattagaagataatccttcctctggcagtcctccaaggactactttgttggggaccatattttcacctgtcttcaactttttttcaccagcaaataaaaatggaacgtcaggatcagattctccaggacaggctgtggaagctgaagaaatagtaaaacaacttgatatggaacaggtggatgagatcactaccagtactactacatcaactaatggagcagcttactcaaatcaagcagttcaagtgagaccatcactaaacaatggtttagaagaagcagaagaaacagttaatcgtgatatcccaccccttacagcaccagtaactccagatagtggttattcatcagcccacgcggaggccacctatgaagaagactgggaagtatttgacccctattatttcatcaaacatgtcccgccactgacagaagaacaactaaataggaaacctgctcttccgttgaaaacaagaagcacaccggaattctccctagttttagacttggatgaaacactagtgcattgtagtctaaatgagctagaagatgcagcacttacttttccagtccttttccaagatgtcatttatcaggtttatgtgagattaagaccatttttcagggaattcctggaacgaatgtctcagatgtatgagatcattctttttactgcttctaagaaggtgtatgcagacaagttactgaacatactagaccctaaaaagcaactggtcaggcaccggcttttccgtgaacattgtgtttgtgtacaaggaaactatataaaggacttaaatattcttggaagagatctttcaaaaactataataattgacaactcaccacaagcctttgcatatcagctttctaatggaatccctatagaaagttggtttatggataaaaatgacaatgaactcctaaaattgattccattcctggagaagcttgtagaactgaatgaagatgttcgaccacacatcagagacagatttcgcttgcatgatttgctgcccccagattaagtaccaagacttgtcaaatcactgaagggggagagaatgctggacccttttgactaagacaaaacattgccatactggtgaaatttgcattttgtaccccgtcttgctttttcttatcttttggtgcccattattaattaagggtacagaaaggagactttatctatctcagatcgaatacatatagtaggtaggcttaaacagaagagtctttagaactaggcaactccagtgaaattttttatgacaggacatctgcagtttataaagaattctgtttctgccaccagcagtttgacctgtagtcacacaggattttatgataataacagagatgaaaatggacttttattttctctctgtttggtgctctaagtgggtttgtagccacttttctgttactttatgattctcatttcaacaggaatggccagtaaaagttgttttatttttcctgttaaggtttataacctttttacatttttgacctgtattagattagaatttcattatgcattccttttagttgaggcgcttcatagttttctggagatagtcaatttttagttttttattatacatttgaatggccgttttcctgctttgtctgcctgcacattgtatatttgtttaaaaatattctctacttttagtctatgtaagtttcatttagaaagacatgcatttatattttgtttctgtaatattctactgtaggtgaaatcttttcaaaaatcaagagactgggtagataagaatatatgaatgactaatatacaaaagatttaaaccattgtgatggcgtatatctcaaatggtaatatcttgcaatggcacacagatttaatggataaaggtatacctcagacttcactgtgctcacaatctttgaggagaaagtttggtcacctgtttggcttgatttagttactgctgcctttggttttctccaggaatgaagtattcagcacagtgactcagtattttctagttattttgcatgggctggtagtacctctgttatgctctcagttacaatcaatttaaaactgtataacagtcttggtacctaacagtagctatgcataatcctgtggcgcagtacactcccaagccaccaatgcagttaatatgctctcatagtggtttttctatgctatatgaaaatagtcttcaagccttggttctctaatgcagctaccacaagaggttgatatttttatagtggcgtgtaatctccttttcgggaggctttttatggaaggtagaatttgtaaaagttcgtatgctttgcctctcaactgcattaaccagtcacaggctcagactgtttttgtgtaaaggatgtcaaagaacggcactttttctaaagagaagtttgatattttgtatgcttgttaagaaagtacagtattggaaattaaaggtggacaactgataaaaaaaaaaaaaaaaaaaaaaaaaaaaaaaa

SEQ ID NO: 23200 - DNA, 624 bp, Homo Sapiens
ctggcgccgagcctcccaagatggcggtgtgcatcgcggtgattgccaaggagaattaccccctctacattcgcagcacccctacggagaacgagctgaagttccactacatggtgcacacatctctggacgtggtggatgagaagatctccgcaatggggaaggccctggtcgaccagagggagctgtacctgggcctgctctaccccacggaggactacaaggtatacggctacgtcaccaactccaaggtgaagtttgtcatggtggtagattcctccaacacagcccttcgagacaacgaaattcgcagcatgttccggaagctacacaactcctacacagacgtgatgtgcaaccccttctacaacccgggggaccgcatccagtccagggcctttgataacatggtgacgtcgatgatgatacaggtgtgctgagtgagctgtgctgccagccatcgcagaggagcccgcgcacgactgtggtggggccgtcggtctgttctggttgcctcttcctgaatgggacgcctggggctttcagggcaggcagctgtgcatgttctctcaactaaaggtcttgtgagaggaaaaaaaaaaaaaaaaaaaaaaaaaaaaaaaa

SEQ ID NO: 23201 - DNA, 2610 bp, Homo Sapiens
ggctgcgatggcggaggccgtggagcgcactgacgagctggtccgggagtacctgctcttccgcgggttcacgcacacactgcggcagctggacgccgagatcaaggcggacaaggagaaggggttccgggtggataagattgtggaccagctgcagcagttaatgcaggtgtatgacttggctgcccttcgggattattggagctacttggagcgtcggctcttcagccgcttggaggatatatacagacccacaatccacaagctgaaaaccagcctgtttcgattttatcttgtctacacaatccagacaaacagaaatgacaaggctcaggagttctttgcaaagcaggccacggaactccagaaccaggctgagtggaaggattggtttgtcctgcccttcctgccatcccggacaccaaccccacctttgctacctacttttctcgacagtgggctgacaccttcattgtgtccctgcacacttcctgagcgtctgtttcagtgcatgccagtccctgtgatcctgaactttgatgcggagtgtcagaggactaaccaggttcaagaagaaaatgaagttctgcgtcagaagctttttgcattgcaagctgaaatccaccgactgaagaaagaggagcaacagccagaagaggaagaggccttggtccaacacaaattgcctccttatgtctccaacatggaccgcctgggggactcggaacttgccatggtgtgcagccaaaggaatgcctccctctcccagtcacttcgtgtgggcttcctgtcctcgctgctgcctcagagtaagaagagcccctcaaggttgtcgcctgctcagggccctcctcaacctcagagctcggccaagaaagagtccttcggtggtcagggcaccaagggaaaggacccgacgtccggagccaaggatgggaagagcctcctcagcgggctggccactggggagtccggttggtcacagcaccggcagcggcgcctgcaggaccatggcaaggagaggaaggagcttttctccacaaccacttcccagtgtgcagagaagaaaccagaagccagtggcccagaggctgagccctgcccagagcttcacacggagccagtggagccactgactcgggcatctcggcaggccctgagggtggaggagtccgcccgagcagccctttattgtgctggacaggaggagtacgggaacaccactcatccatcatgcactgcagagtggattgctctgggaggagagtcgcagcttagacgtagatggggtcatcaaagtgtggtccttcaaccccatcatgcaagaccaaagcatcttcatttcaaatcaccgctgctgtctttgaatggccaccaaacggacagactgctcttgctgggcagtggtgtgggaacagtgcgtctctatgacacggaagccaagaagaatctctgtgaaatcaatatcaacgacaacatgcccaggatcctgtctctgcgtgcagcccaacggggctctttagtctgttcggcagcagctccgagcctcacttcccaggtggacttctcagcaccagacatcggcagcaagggcatgaaccaggttcctggcaggctgctgctgtgggacacgaaaaccatgaagcagcagctccagttctccctggatccagaacccattgctatcaactgtacagccttcaatcacaacgggaacctgctggtcacaggggcagctgatggcgtcatccggctgtttgacatgcagcagcatgagtgcgcgatgagctggagggcccactacgggaggtctactctgtggagttcagctatgatgagaacaccgtgtacagcatcggcgaggacggaagttcatccagtggaacatccacaagagtggcctcaaggtatccgagtacagcctccctcagatgccacgggcccctttgtgctgtctggatacagcggctacaagcaggttcaagtccccaggggccgactcttcgcttttgactcagagggaaattacatgctgacatgttctgccacaggcggcgtcatctacaagctgggtggcgatgagaaggttctggagagctgcttgaagctaggtggccaccgagccctgtggtcaccgtggactggagcactgccatggactgtgggacctgcctcaccgcctccatggatggcaaagatcaagctgaccaccctcctggcccataaagcctgatgacttgccccaagggccacccgaggaagcagtattatctgcggtggggggaggagatataggacaggaaaaccacgtgctccactccagctccctgccagtgcagtgactctgcagggaaagactggcaaggaggctcaggtgcttccatctgtggtgactggaatgggacccacgtggagtaggtgacatatgcttcccagagactggtattgtggctgtgccaggagtacatgtgagactatgggaggaaagctccggaagaaggagaaacattgcagtggctactgtgttggcccagtagaaattgacagtattttgtatatatgtgcccatttatctttttcttttttaaaaaaagagaatactcttgtggc

SEQ ID NO: 23202 - DNA, 893 bp, Homo Sapiens
ggggcacacgcattggcaggggccgcttcggcagagtgatggctgatgatgagtccgagagcgtcctctccgactcccatgaagggtcggagctggagctgcctgttatccagctgtgcgggctggtggaggagctcagctatgtaaactctgctctcaaaactgagactgagatgtttgagaaatattacgctaaactggagcccagggatcagcgacctccacgattatcagaaattaaaatatcagcagcagattatgcacagtttcgaggcaggcgtagatccaaatcccggacaggtatggaccgtggggtaggcctgactgccgaccaaaaacttgagctggtacaaaaagaggttgcggacatgaaggatgacttacgacacacaagggcaaatgcggaacgcgacctgcagcatcacgaggcgatcattgaggaggctgaaattcgatggagtgaagtttcgagagaagtgcatgagtttgaaaaagatattctaaaagccatatccaagaagaaagggagtattttggccactcagaaagtgatgaaatacattgaggacatgaaccgccggagggataatatgaaggagaattacgtttgaaaaatgtttctctcaaagttcagaggaaaaaaatgcttttacaattgaggcagaaggaagaggtgagtgaggcccttcacgatgttgattttcagcagttgaagatagagaacgctcaatttcttgagacaattgacgcaaggaatcaagaattgacccagctaaagctgtcatctggaaacactctgcaggttctcaatgcctacaaaagcaagcttcacaaggcaatggaaatatacctcaatctggacaaggagatcttgctgagaaaagagctactgt

SEQ ID NO: 23203 - DNA, 1038 bp, Homo Sapiens
ggcaccagctgagctgcccgggcagcgggggagcagcgagcgggcttccgcgagccggagaaggcacaggcctgtcccgggtcccggcaggtcagtgtgaaggtctgcgcgtctgttcccagcgctctgcgaggcctaaaaaggaggagcaacctgtccagaatccctgcaggacaggaaaaggaggggaaatctcgacatggaaaaaccctacaataaaaatgaaggaaacctggaaaacgagggaaagccagaagatgaagtagagcctgatgatgaaggaaagtcagacgaggaagaaaagccagacgtggaggggaagacagaatgcgagggaaagagagaggatgagggagagccaggtgatgagggacaactggaagatgagggaagccaggaaaagcagggcaggtccgaaggtgagggcaagccacaaggcgagggcaagccagcctcccaggcaaagccagagagccagccgcgggccgccgaaaagcgcccggctgaagattatgtgccccggaaagcaaaaagaaaaacggacagggggacggacgattcccccaaggactctcaggaggacttacaggaaaggcatctgagcagtgaggagatgatgagagaatgtggagatgtgtcaagggctcaagaggagctaaggaaaaaacagaaaatgggtggttttcattggatgcaaagagatgtacaggatccattcgccccaaggggacaacggggtgtcaggggagtgaggggtggaggtaggggccagaggggcttacacgatatcccatacctttaatgcctttggccttccattctgatttctctgatgagaatattgctggccctgctttccctggtaggtatttgccaggcccaatgctttaaccttaagctgatactttgctttagatgtcagtctcgttaccagcagccttttgacccaactacggcgctctatattttagtagaggattttcacccatgtgcatggaaaagatgttcatggtacattgtaaaaaaaaaaaaaaaaaa

SEQ ID NO: 23204 - DNA, 5589 bp, Homo Sapiens
ggccttcgtccctactgcctgggcgcggggcgggaggcggtgaccagcagcaggaggagaaagaacatggcgggcgcatcagagctcgggaccggcccaggagcagcgggtggagatggagatgattcgctatacccgatcgcggttttaatcgacgagctccgcaatgaagacgtgcagctccgactcaacagtattaagaagttatcaacaattgccctagcacttggagtagaaaggacccgaagtgaattgttgccatttcttacagatacaatttatgatgaagatgaggtactattagctcttgctgagcagctgggaaatttcactggcctagtgggaggtcctgactttgcccactgtctgctgcctcctttggaaaatctggcaactgtggaagagactgttgttcgtgacaaggctgtggagtccctgagacagatctcccaggagcatactcctgttgctctggaagcttattttgtacctctggtgaaacgcttagcaagtggggattggttcacctctcgcacatctgcatgtggtttgttcagcgtttgctatcccagggcatcaaatgctgttaaagcagaaaccagacagcaattccgttccttgtgctcagatgacacaccaatggtacgacgtgctgctgcttccaaattgggtgaatttgcaaaagttttggaattagacagtgtgaaaagtgaaattgttccactgttcactagtctagcttcagatgaacaggattcagtgcgcctccttgctgtggaagcttgtgtcagtattgcccagttattgtctcaggatgaccttgagactttggtgatgcctacacttcgacaagcagcagaagataaatcttggcgcgttcgctatatggtggctgacagattttcagagctccagaaagccatgggtcctaaaatcaccctaaatgacctcatccccgcctttcagaacctacttaaagactgtgaagctgaagtccgggcagctgctgcccacaaagtaaaagaacttggtgagaacttgcccattgaagatagagagaccataattatgaatcaaattctgccttatataaaggaattagtatccgataccaatcaacatgtcaaatcggctctagcttctgtaattatgggattgtctactattttgggcaaagaaaataccattgaacatcttctacctcttttcttagctcagttaaaggatgagtgtcctgacgttcgtttgaatatcatctccaatttggattgtgtaaatgaagtgattggaatccgtcagctctctcagtctctccttcctgccatagtggagctggcagaagatgccaaatggagggtccgcctggccatcattgagtatatgccgctgctggcaggccagctgggtgtggaattctttgatgaaaagctgaattctttatgtatggcttggctcgtggaccatgtatacgccatccgagaagctgccaccaacaacctcatgaaactagttcagaagtttggtacagagtgggcccaaaatactattgttcccaaagtgttagtaatggcaaatgatcctaattacttgcatagaatgaccactttattctgcattaatgcactgtctgaggcctgtggtcaggaaataactactaagcaaatgctgcccatcgtattaaaaatggcaggagaccaagtagcaaatgttcgcttcaatgtggccaaatctctacaaaagattggaccaattctagataccaatgctttacagggagaagtgaagccagtactacagaagttaggtcaagatgaagacatggatgtcaaatactttgcacaggaagctataagtgttcttgcattggcataatgaggagcaggagggaaaaggcctttactagattcttgtcacaaatttctagtcaatgtgttcttaactgggtggagaaagaatggaaaaccttcaagatctcatccaagcaaatggcaacaacttagaagaaatcatttagtgacttaattctttctaaagatgaaatgggattgttttttactcgtattccttgttaaatcattatttaagccgttcttattgaccaattcctgacacttgattgtctcctaatgctttatccatcaccacctgggctcctgcatcctcactgtggaatcaggcaccagccacataatgttccagacaaagcctggaagggtgtggacccagacgtggagtggagtgattctcttgacgtttacatatatctctgtgtctctccatcattccaaagctaaatgtacatgtttagaataacttattttataaactcttcgggagacatgttgagatttgaccgtaatgaaagccacattttcctgaattatgatggtctgcattagtctcatgtgaaaggggaatgtggaagctcagggttaatgtagtggttgttttggtttttatttgctcaattttgtctgtactcatgtcattcagaaacctgaagtgtggctgcatcttgctgctaatgtgtgatgttgacgcctaactgaatttgaacagctcaccactgtgcctacatttaaaaatacttctctctcttttctaaaaagctttaactgtagtgcctcctaataagcagtatgtttgtttcattgtgagattgcagttctgtatttcgaatgagtctaagaaccacagggataatactgtgcagatttcctgttctttacctggctctgcttccagcagtattgacacctagtccttgctgcattgtacagtagcttttcaaactgcagttttattgctaagtttttagtatgggtgatactggagtcttatcatttgaagtgtttgcttttctacttttacagtaaaacctcattaattctgaaatttaagataatgagttaagctgaagagtttactgaagcaaattaatagtgaggaagcctatttgaactacttaaacagtattaaagccctttttaaaaagcacctatttgggatcatttgaggtcaagaattcgagatcagcctgaccaacatggtgaaaccccatctctactaaaaatacaaaaaagttagctgggcgtggtggcacacacctgtagtcccagctactcaggaggctgaggcaggagaattgcttgaacctgggaggtagaggttgcactgagccgagatcgcgccactgcactctagcctgggccatagagcgagagtccatctcaaaaaaaaacaactatttttcacataatcaaactcaccttgtctcatgacttttggttaagggggttttcccatagtttatttctctctcagtgcatcttgctatgaggtttgcttgtaacccttttggtttttgaattgttgattttgttcacaacctcttttaaatctaacaactcctgttctgtttagtgaaggcccaaagactcctctaagactttgtatatttgttacataaaaccaatttttactaaatactttaaaatttgtcctacattcgaaaaatagaaattgtaaatcagaggttatctgtctgcattttaaactgccaaattaccttatagtaagtttctattttatgactttgggccaagaattaagtattttcctaagcacaaatctttttctatattctcattttaatatcttatgctattattctgtaaacattttaattttagtttcatgagtctttattttttgttacctgcaagttatgttcttcttcattgaatttcatatttgagagacatttgtcttcatgaagcagatttgcactggaaccattgctttactctggttggaaatgccattgttttggggacagacttttaaaatgcccttgtgtctcccagtgaggagccctaagcattgacttctctaccctaaaactgtttgagagagggagagtgggccctggctttctcaagcatgggtcgggggttcagcggggcctctgtcttttgtggtgacccctcaggggtttcattgtttccttctgacttaagcaatagagagagaatttgttttggtactcttcagaggaattgtgctttggctcataacttggccatgttctccatgaattagttctcctattttttttttaactaccttaaacttaagggaaaagttctcctatcttgatttcactggaatataggctttaggagctctgtaaggctggtatttttgtctgttttatcttctactgtatcgccagtgcctggaacagtgtctggtgcacataataggtgctcaataaaaatgtgttcaatggatgaatttctaaaatatcctccaatgtgtgcatggaacaaataatcaaaagaaccagactgtgtcttattctcccactgacagaaagattttcctgctttcaggaaacaagctttatgtggcccttttctggtcccctggcttagactacagttctgtgtggatttgtctgattgcttcagacatgtaatgttgtttttcatccttggcagcttacatcagttgtttgtttgattagaaaaatgaagcagacacacacacacacacacacacacacacacacacacacacacacaaacatataacctatgccaataaaaatgtctcagcaacagtggaattcaccttggtgtttctctctgtaatttgtgtggggtttacccctcacaggtttaagagaccaggtcttgtttctctctctgtgctaccaaaaacatgtgaacctgaggatgcatcttgtttcataagaaggaaggcaggtgaatatgtggtttctaacgaggtcttgttgaaataacgggctgccctcagctcacagaaataccacagctcagccactgtgatgcagagccccaggggtctttgccagacaacttgtcctgactcaacagagacggcagcctgacctttgagctggcttgtccaggcattcaggttgcttgcgtagacttccaggggaagcaagcctgtccttcctgacccggcggttaacctggtgcacttttgttcctttgttaactgttgtgttgtcactaaactgaaaggctggggcttgcccttagacgtcacattggctctgtccctgtggcgatggcagggcagggtggccaaacaggtcaggtgcttgttctgtcctcttgccttttacttaaattcctctgacttttaaaaatggtgacactcttatcgtaaagcttcttatttttctccactgcttggatatgaaactgtagagggagaggccctgttgcccagtgttctcctggtttagcagctgaggtgactgcagtctgatgtgatgtaactgtttccctttgattctccagtattcctgtttccatccagttccttactctcctctttcctcttccctcgcatgtctccctccagtcctctgtacctagaatagtctcactgtcccccgtttgcctccacgagcctgctgtttccaggaaattacataacgttcagttgggatggaaatcttccggaggacgaatagagtttaattactcattgcgtcggaaagccaagccatttctgtctccagagttgttctcttaaactgatatgagttct

SEQ ID NO: 23205 - DNA, 3838 bp, Homo Sapiens
gattggcaggcgactccccgcccctgccccgcccccctgggcgaagagcgcggacttgtggggccgctggctgcagactggagctgcgcgggtcagggagataatggctgcgcggccgatcaccctcggcattgacctgggcaccacatctgtgaaggcagctctgctgagggccgcgcccgacgacccatccgggttcgcagtgctggcgagctgtgcccgtgctgcgcgggcagaggcggcggtcgagagcgcggtggccgggccccaggggcgggagcaggatgtgagtagaatcctccaagccctacacgagtgccttgctgcccttccccgaccccagctccggagcgtcgtgggcatcggggtgtcgggccagatgcatggagtcgtgttttggaaaacaggccaaggctgtgaatggacagagggagggattaccccggtgttcgagccccgagctgttagccacctggtcacgtggcaggatggccgatgtagcagcgaattcctggcctctctgccccagccgaagtctcatctcagtgtggccacgggcttcggctgtgcaaccatcttctggcttttgaaatatcgcccagagttcctgaagtcctacgacgcagccggtaccatccacgactatgtggttgccatgctgtgtggcttgccaagacctctgatgtccgaccagaatgctgccagctggggctatttcaacacgcagagccaaagctggaacgtaaagacactgaggagctcgggttttcctgtccacctgctcccagacatcgccgagcctggcagtgtggcgggcagaacttcccacatgtggtttgaaatcccaaaggggacgcaggtgggagtggccttgggtgatttacaggcctctgtctattcctgcatggcccagaggacagatgcagttctcaacatcagcacctcggttcagctggcagcctccatgccttcaggattccagcctgcacagactccagaccctacggccccagtcgcctacttcccatacttcaacaggacctacctgggggtggccgcgtcactcaacgggggcaatgtgctggccacgttcgtccacatgctggttcagtggatggcagatctaggcctggaggttgaagaatccactgtgtattcacgcatgattcaggcagctgtgcagcagagagatacccacctgaccatcaccccgacagtgctgggggagaggcacctgccggaccagctggcctcagtgaccagaatctcctcctccgacctctccctggggcacgtgacccgggctctgtgccgaggcattgttcagaacctgcactccatgcttccgattcagcagctccaggagtggggcgtggagagggtgatgggcagtgggagtgcgctgtccaggaatgacgtgctgaagcaggaggtgcagagggctttccctttgcccatgtcctttgggcaggatgtggatgcagctgtcggggcagctctggtcatgctccggagacacctcaaccagaaggaatcttagacagcaaactctttcgccaaacgactgctgtgaattttacctgattaacattcctgacaccatctgtgggtcatcctttccctggaccgttcagtggacagctttcaagcagtgcttgttgtgaggtcccatctcggccaagaacttaccttcagaacatactctaataatgcagccaggagccgtcagccagatcccaaatgagtgccttccgaaattgacccacctgggagctatttacaaatgtccatgtgggagagagagagcatgagagcacagtagcccagcctgctggtcagcaggctcatctgtggttcacctgtagacagagagcagatcaatgtgtacttcagacaccagaaagtctggtggctttggtcccaagtgggaaaagagaactgccccatgcccagcttgtgattatcgtttttggagacctgaagcccacactcgggtcgtatggacttctggaaaagttcttgtctcctggactgaaccatgtgaccggaggcccctttcctagtctcatcctcccctggctgcagatgcttagctgggccagggattgacccaagcgcgatgcagcaggcaggctcagaagacgatgcggggctgtgtgccggccttcttgctgcatgtactcagcctcaggagagcttgctgcacccaggccgcccaggtcttcacagcacaactgcctggaaggcaggttgcgagaaggagaggtggatggcatgagcagcaagggggaccgatgctgtgcagctcacaccactccagaacctgacaaggcaccagcaggaccccttgccaggagcatgtctgtgcagcagtgtttttgcccctgcacattccagaagccctcatgggaagggatgcagccaggcagactcctgccagatggggcaggtagtttattcaaagagaactctgtatcccataggcccaggctctcctttcgcttggcgtgggctttgctggcccagtgtgtgctcctggctcagcagaaacatccatttgagttggcatccctgtagggatcccagagcgttgtaagccttcttgtgattggtagggatggctgtggggtggcttccaggagggggccaccattgccgcatctacttctagactcccaaaggagcccaggctcaggcaggcctggcccagagtcacgctggcaaccacgagtttgggaagcagtcgtattctctctctctctctctctctctctctcagtatccatgacaggtatgaaacatattgtctctttataaatgtcattttacaaattatgtgattatctggaagctctaagatgagagcaaatgcctgatcactctggccaaatgtcagatactaaagcccattcttggccgggcatgttggctcccgcctgtaatcccagcactttgggaagcccaagtgggtgaatcacctgaggtcaggagttcaagaccagcctgaccaacatggggataccccgtctctactaaaaatacaagccgggcgtggtggcgcatgcctgtaatcccagctactcaggaggctgaggcaggaaaatcacttgaactcgggaggcagaggttgcagtgagctgagatcgcgccattgcactccagcctgggtgacagagcaagactctgtctcataaataaatacaaagcccattcttccagagtcttgtgccttaaataaaacacacctctctgctgtgggaagactgtgcaatggcacagccgcagagcttggtttgggaggttgaagtgctctggggagaattcgtagatcatcctcagaaaagccttgccctggtgttctaccagaaaaacgtctcccaatcacccaggaaagctgtccacagtagtccccccttatccacggtgtcactttccatgggttcagttatctgcggtcaaccacggtctgacaatattaaatggaaaattcttcaaacagttcccaagttttcccttgtgcattgttctgagcagtgtgatggagagtctctgccgtgccatctgggatgcaaaccgtccctgtgttccccacgtccaggccgtagatgctccccgccggtcagtcacttagtcgtcagatcgcccgtcctggtatcacagtgcttctgttcaggtcagtctttttttacttcattagggccccaaagcaccagagtagtgatgctggtagtgatgctggctgttcggatatgccaaagagaaaccgtaaggtgcttcctttaagtgaaaagatgggaagaaaacagtcatatgctgaatcttctatctgtgaaattct

SEQ ID NO: 23206 - DNA, 4455 bp, Homo Sapiens
atgagtcagacaagcggtggtgaggcaggctcgcctcctccagctgttgttgctgctgatgcttcttcagctccctcctcttcctccatgggcggtgcttgcagctcctttaccacctcttccagccctaccatttattctacctcagtcaccgacagcaaggctatgcaagtggagagctgctcctcagccgtgggggtaagtaacagaggggtaagtgaaaagcagttaaccagtaacacagttcagcagcatccatcaacaccgaagaggcacacagtcttgtacatctcaccaccacctgaggacttgctggataacagtcggatgtcctgccaggatgaggggtgtggattggaatctgagcagagctgcagtatgtggatggaggattccccctccaacttcagtaacatgagcaccagttcctacaatgataacactgaggtacctcgtaaatcacgaaaacgaaatccaaagcagaggccgggggtcaaacgacgagattgtgaagaatctaatatggatatatttgatgccgacagtgccaaagcacctcactatgtgctttctcagcttaccacggacaacaaaggcaactcaaaagcgggaaatggaacattggaaaaccaaaaaggaactggagtaaagaagagccctatgttgtgtggacaatatcctgttaaaagtgagggaaaggagctgaagatagttgtacaacctgagacacagcaccgagctcggtacctgactgagggcagccgtggctcagtgaaagatagaacacagcaaggctttcctacagtaaagctggaaggccataatgaacctgtagtgttgcaagtgtttgtgggcaacgactctggacgagtgaaaccacatggattttatcaggcctgcagagtaactggacgaaatacaactccttgcaaagaagtggacattgaaggcactactgttatagaagtcggccttgatcctagcaacaacatgacactggcggtggactgcgtagggatattgaaattgaggaatgctgatgtcgaagccagaataggaattgctggttccaagaagaaaagcactcgtgccagattggtttttcgagttaatatcatgaggaaagatggctccactttgacactgcaaacaccctcttctccaattttgtgtactcagccagcaggagtgccagaaatcttaaagaaaagcttgcatagctgttcagtgaaaggagaagaagaagtgtttttaatcggcaagaactttctgaaaggaactaaagttattttccaagaaaatgtttctgatgaaaactcttggaagtcagaagctgaaattgatatggaactatttcatcagaatcatcttattgtgaaggttcctccctatcatgaccaacatataactttgcctgtgtcagtgggaatatatgtagtgacaaatgctggaagatctcatgatgttcaaccattcacttacactccagacccagcagcagctggtgctttgaatgtaaatgtgaagaaggaaatatctagtccagcaagaccttgctcttttgaagaggccatgaaagcaatgaaaactactggatgtaatttagataaggtaaatattatccctaatgccctgatgactccactcataccaagcagtatgattaagagtgaagatgttactccaatggaagtaacagcagaaaaaagatcttccactatttttaagactacaaagtctgttggatcaactcagcaaacattagaaaacatctcaaacatagcaggaaatggctctttttcatcaccatcatcttcccacctaccttctgaaaatgaaaaacagcagcagattcagcccaaggcatacaacccagagaccctgacaactattcaaacccaggacatctcacagcctggtacttttccagcagtttctgcttctagtcagctgcccaacagcgatgcactattgcagcaggctacacagtttcagacaagagaaactcagtctagagagatattacagtcagatggtacagtggttaatttgtcacaactgactgaggcatcacaacaacagcagcagtcaccactacaagaacaagcacagactttacagcagcagatttcatcaaatatttttccatcaccaaatagtgtgagtcagcttcagaatactattcagcagctgcaagcagggagtttcacaggcagtactgctagtggcagcagtggaagtgttgacttggtccaacaagttttagaggcacagcagcagttatcttcagttttattttctgctccagatggtaatgagaatgttcaagagcagcttagtgcagatatttttcaacaagtcagtcaaattcagagtggtgtaagccctggaatgttttcctcaacagagccaacagtccataccagaccagataatttattacctggaagagctgaaagtgttcatccacagtctgaaaacacgttatctaatcaacagcagcagcagcagcagcaacagcaagtgatggaatcttcagccgcaatggtgatggagatgcaacagagtatctgccaggcagctgcccagattcagtcagagttattcccttcaactgcttcagcaaatggaaaccttcagcaatcgccagtttaccagcagacttctcacatgatgagtgcattgtctaccaatgaggatatgcaaatgcagtgtgaattgttttcttctcctcctgcagtttctggaaatgaaacttctacaactaccacacagcaggttgcaacccctggcactaccatgtttcagacatcaagttcaggagatggagaagaaactggaacacaagcaaaacagattcagaacagtgtctttcagaccatggtccaaatgcaacatagtggggacaatcaacctcaagttaaccttttttcatccacaaaaagtatgatgagtgttcagaatagtggtacccaacaacaaggtaatggtttattccagcaagggaatgagatgatgtcacttcaatctggaaattttttgcagcagtcttctcattcacaggcccaactttttcatcctcaaaatcctattgccgatgctcagaacctttcccaggaaactcaaggttctctctttcatagtccaaatcctattgtccacagtcagacttctacaacctcctctgaacaaatgcagcctccaatgtttcactctcaaagtaccattgctgtgttacagggctcttcagttcctcaagaccagcagtcaaccaacatatttctttcccagagtcccatgaataatcttcagactaacacagtagcccaagaagcattttttgcagcaccgaactcaatttctccacttcagtcaacatcaaacagtgaacaacaagctgctttccaacagcaagctccaatatcacacatccagactcctatgctttcccaagaacaggcacaacccccgcagcagggtttatttcagcctcaggtggccctgggctcccttccacctaatccaatgcctcaaagccaacaaggaaccatgttccagtcacagcactcaatagttgccatgcagagtaactctccatcccaggaacagcagcagcagcagcaacagcagcagcaacagcagcagcaacaacaacagagcattttattcagtaatcagaataccatggctacaatggcgtctccaaagcaaccaccaccaaacatgatattcaacccaaatcaaaatccaatggctaatcaggagcaacagaaccagtcaatttttcaccaacaaagtaacatggccccaatgaatcaagagcaacagcccatgcaatttcagagtcagtccacagtttcctcacttcagaacccaggtcctacccagtcggaatcatcacagacccccttgttccatagctctcctcagattcagttggtacaagggtcacctagttctcaagagcagcaagtaactctcttcttatctccagcatccatgtctgccttgcagaccagtataaatcaacaagatatgcaacagtctcctctttattcccctcagaacaacatgcctggaattcaaggagccacatcttcgcctcaaccacaggctactttatttcacaacacagcaggaggcacaatgaaccaactgcagaattctcctggctcatctcagcagacatcaggaatgttcttatttggcattcaaaataactgtagtcagcttttaacctctggaccagctacattgcctgatcagttgatggccataagtcagccaggccaaccacaaaacgagggccagccacctgtgacaacacttctttctcagcaaatgccagagaattctccactggcatcctctataaacaccaaccagaacatcgaaaagattgatttgcttgtttcattgcaaaaccaagggaacaacttgactggctccttttaa

SEQ ID NO: 23207 - DNA, 1118 bp, Homo Sapiens
acattctcaaattccaaaatgccagccaagaccccaatttacctgaaagcagccaataacaagaaaggaaagaaatttaaactgagggacattctgtctcctgatatgatcagtcccccgcttggagactttcgccacaccatccacattggcaaagagggccagcacgatgtctttggagatatttcctttcttcaagggaactacgagcttttacctggaaaccaggagaaagcacacctgggccagttccctgggcataatgagttcttccgggccaacagcacctcggactctgtgttcacagaaacgccctccccggtgctcaaaaatgccatctccctcccgaccattggaggatcccaagctctcatgttgcccttattgtcaccagtgacatttaattccaaacaggagtccttcgggccagcaaagctgcccaggcttagctgcgagcccgtcatggaggaaaaagctcaggagaaaagcagtctgttggagaatgggacagtccaccagggagacacctcgtggggctccagcggttctgcatctcagtccagccaaggcagagacagccactcctccagcctgtccgaacagtaccccgactggccagccgaggacatgtttgaccatcccaccccatgcgagctcatcaagggaaagactaagtcagaggagtccctctctgaccttacaggttccctcctctccctgcagcttgatcttgggccctcacttttggatgaggtgctgaatgtaatggataaaaataagtaacaagatgccaacttttttcctttggggtaaaaggtacaaaaacaaactaaccacagttgaagagaagggcttccggagctgtatttgcagttttgtgttgggttttctaaaataatattcttacaaagtattttttacctgttatgccctgtttgcaaaaacaatttagaaaaaacaaccaaagcaaaacctatctggcaaaaaaaggaagtgagtcagaagcccattttcaggaggcattggtgatgttcggctcacatattgttgcagacacacaagaaatctggcttggccaggattggcacttagctatgaaggcttgaccgagtcacatt

SEQ ID NO: 23208 - DNA, 1920 bp, Homo Sapiens
atggttgactatattgtggagtatgactatgatgctgtacatgatgatgaattaactattcgagttggagaaatcatcaggaatgtgaaaaagctacaggaggaagggtggctggaaggagaactaaatgggagaagaggaatgttccctgacaatttcgttaaggaaattaaaagagagacggaattcaaggatgacagtttgcccatcaaacgggaaaggcatgggaatgtagcaagtcttgtacaacgaataagcacctatggacttccagctggaggaattcagccacatccacaaaccaaaaacattaagaagaagaccaagaagcgtcagtgtaaagttctttttgagtacattccacaaaatgaggatgaactggagctgaaagtgggagatattattgatattaatgaagaggtagaagaaggctggtggagtggaaccctgaataacaagttgggactgtttccctcaaattttgtgaaagaattagaggtaacagatgatggtgaaactcatgaagcccaggacgattcagaaactgttttggctgggcctacttcacctataccttctctgggaaatgtgagtgaaactgcatctggatcagttacacagccaaagaaaattcgaggaattggatttggagacatttttaaagaaggctctgtgaaacttcggacaagaacatccagtagtgaaacagaagagaaaaaaccagaaaagcccttaatcctacagtcactgggacccaaaactcagagtgtggagataacaaaaacagataccgaaggtaaaattaaagctaaagaatattgtagaacattatttgcctatgaaggtactaatgaagatgaacttacttttaaagagggggagataatccatttgataagtaaggagactggagaagctggctggtggaggggcgaacttaatggtaaagaaggagtatttccagacaattttgctgtccagataaatgaacttgataaagactttccaaaaccaaagaaaccaccacctcctgctaaggctccagctccaaagcctgaactgatagctgcagagaagaaatatttttctttaaagcctgaagaaaaggatgaaaaatcaacactggaacagaaaccttctaaaccagcagctccacaagtcccacccaagaaacctactccacctaccaaagccagtaatttattgagatcttctggaacagtgtacccaaagcgacctgaaaaaccagttcctccaccacctcctatagccaagattaatggggaagtttctagcatttcatcaaaatttgaaactgagccagtatcaaaactaaagctagattctgaacagctgccccttagaccaaaatcagtagactttgattcacttacagtaaggacctccaaagaaacagatgttgtaaattttgatgacatagcttcctcagaaaacttgcttcatctcactgcaaatagaccaaagatgcctggaagaaggttgccgggccgtttcaatggtggacattctccaactcacagccccgaaaaaatcttgaagttaccaaaagaagaagacagtgccaacctgaagccatctgaattaaaaaaagatacatgctactctccaaagccatctgtgtacctttcaacaccttccagtgcttctaaagcaaatacaactgctttcctgactccattagaaatcaaagctaaagtggaaacagatgatgtgaaaaaaaattccctggatgaacttagagcccagattattgaattgttgtgcattgtagaagcactgaaaaaggatcacgggaaagaactggaaaaactgcgaaaagatttggaagaagagaagacaatgagaagtaatctagagatggaaatagagaagctgaaaaaagctgtcctgtcttcttga

SEQ ID NO: 23209 - DNA, 6599 bp, Homo Sapiens
atggcagcagatgatgacaatggtgatggaacaagtttatttgatgtcttttctgcttctcctcttaagaacaatgatgaaggctcactggacatatacgctgggttggacagtgctgtttctgacagcgcttccaaatcctgtgtaccatcaagaaattgtttggacttatatgaagagatcctgactgaagaaggaactgcaaaggaggcaacatataatgatttgcaagtagaatatggaaaatgtcaactacaaatgaaagagctgatgaaaaagtttaaagaaatacagacacagaatttcagcttaataaacgaaaaccagtctcttaagaagaatatttcagcacttatcaaaactgccagagtggaaataaaccgcaaggatgaagaaataagtaatcttcaccaaagattgtctgagtttccacattttcgaaataatcataaaactgcaaggacatttgatacagttaaaacaaaagatcttaaatctagatctccacatttggatgattgttcaaagactgatcacagagctaaaagtgatgtttctaaagatgtacatcatagcacttcactgccaaatctggaaaaggaaggaaaaccacattctgataaaaggagtacttcacatttacctacatctgttgagaaacactgcactaatggtgtttggtcacgttctcattatcaggttggcgagggtagctcaaatgaggatagtagaagaggaagaaaagatattagacatagccagtttaacagaggaactgaaagagtacgaaaagacttaagtactggctgtggtgatggtgaaccaaggatatcggaggctagtcaaaggctacaaggacatcctgagaaatatggtaaaggtgaaccaaagactgaaagcaaaagttcgaagtttaaaagtaactcagattctgactataaaggtgaacgcattaactcttcttgggagaaagagacccctggagaaaggtcacacagtcgagtagactctcaaagtgacaaaaaactagaaagacaaagtgaaagatcacaaaatataaataggaaagaagttaaatcacaagacaaagaagaaagaaaagttgatcaaaaacctaaatcagtagtaaaggaccaagatcactggagaagatctgaacgagcatcacttcctcattccaagaatgaaataacattttctcataattcaagtaaataccatctagaagagagaagaggatgggaagattgtaaaagagacaagagtgtaaacagtcatagttttcaagatggaagatgtccatcttctctttcaaacagtagaactcacaaaaacattgactctaaggaagttgatgccatgcatcagtgggaaaatacacctttaaaagcagaaagacatagaactgaagataagaggaaaagagaacaagaaagcaaagaagaaaataggcatattagaaatgaaaaaagagtacctacagaacatttgcagaagactaataaggaaactaagaaaaccactactgatttaaagaaacagaatgaaccaaagactgataagggagaagtccttgataatggtgtttctgaaggagcagataataaagagcttgcaatgaaagctgagagtggtccaaatgaaacaaaaaacaaggacctaaaattgagttttatgaaaaaattgaacttaactctttctcctgctaaaaagcaacctgtttcccaggataatcagcataaaataactgatattcccaagtccagtggtgtatgtgattcagagtcttcaatgcaagttaaaacagtggcatatgttccctccataagtgaacatatcttgggggaagcagctgtcagtgaacataccatgggggaaaccaagtcaacgttattggaaccaaaggttgctcctctagcagtgactgaacccaggatcggtatctcagaaaccaacaaggaagacgaaaatagtttgttagttaggtctgttgacaatactacgcattgtgaagagcccatttgtggtacagagacttccttcccatctcctatggaaatacaacagacagaatccttgtttccatcaacaggaatgaaacaaaccattaataatggaagggcagcagctcctgtggtaatggatgtattacaaacagatgtgtctcaaaactttggcttggaattggataccaaaagaaatgataattcagattattgtggtatttctgaaggtatggagatgaaggtggcactttcaacaacagtgagtgaaaccactgaaagcattttgcagccttcaattgaggaagctgatattttgccaataatgctttcagaagataataacccaaaatttgagccttctgttatagttacaccactggttgagagtaagtcgtgtcatctggagccttgcttacctaaagagactctagattcttcacttcagcagactgagttaatggaccacagaatggcaactggtgaaacaaactcagtatatcatgatgatgataactcggttttgagcattgaccttaatcacctgagacctattccagaagccatcagtcctctgagtagtccagtgagacctgtagcaaaagttcttagaaatgaaagcccacctcaagttccagtgtataataacagtcataaagatgtgtttttaccaaattcagctcattctacctctaagagtcagtctgatctcaataaggaaaatcaaaagccaatttacaaatctgacaaatgtacagaagcagacacatgtaagaattcaccattagatgaattagaagaaggagaaattagaagtgatagtgaaacatctaaaccacaagaaagttttgaaaaaaattccaaacgtagagtgtcagctgatgtgcggaagtcaaagactatcccacgacgtgggaaaagtactgtgtgtttagataaagacagtaggaaaacacatgtaagaatccatcagaccaataacaaatggaataaaagacctgataaatctagcagatcttcaaaaacagagaagaaagataaagtgatgagcacttccagcttggaaaaaatagttccaattattgctgtaccctcttctgaacaagagatcatgcacatgttacgaatgataagaaaacatgtaagaaaaaattatatgaaattcaaggcaaaattttcattaatacaatttcacagaattattgagtcagcaattttgagttttacatctttaattaaacatctcaacttacacaaaatctctaagtcagtgactaccttacagaagaatctctgtgatattatagagtctaaacttaagcaagttaaaaagaatggcatagttgatcgtttatttgaacagcaactaccagatatgaaaaaaaaattgtggaagtttgtagatgaccaacttgattatttgtttgcaaagcttaagaaaatcttagtatgtgattccaaaagctttggaagagatagtgatgaaggcaaacttgaaaaaacaagtaaacagaatgcacagtattcaaatagtcagaaaaggagtgtggacaactccaacagagaattgctgaaagaaaaattatcaaaatcagaagaccctgttcattataagtctttagtgggatgtaaaaaatctgaggaaaattatcaagaccaaaataactccagtattaacactgtaaagcatgacattaaaaaaaattttaacatctgctttgataatataaagaactctcaatccgaagagcgctccttggaagtacactgtccaagcaccccaaagtcagaaaaaaacgaaggaagcagcatagaggatgcacagacatcccagcatgcaactttgaagccagaacgaagtttcgagattcttaccgaacagcaagcatcgagccttacttttaatttagtgagtgatgcacaaatgggtgaaatatttaaaagtttgttgcaaggttctgatcttttagacagcagtgttaactgtactgaaaaaagtgagtgggagttaaagactccagagaagcagctgctagagactcttaagtgcgagtctataccagcttgtacaacagaagagctagtttcaggggtggcttctccatgtcctaaaatgattagtgatgataattggtcattattatcatctgaaaaaggtccatctctgtcttcagggctttcattgccggttcatcctgatgtgttggatgaaagttgtatgtttgaagtgtctactaacctacctttaagtaaagataatgtgtgtagtgtagaaaagagcaagccctgcgtttcttccatacttcttgaagatctagcagtctctttaacagtaccatcgcctctgaagtcagatggtcatctcagttttttaaagcctgatatgtcgtccagttcaactcctgaagaagtcattagtgctcattttagtgaagatgccttacttgaggaagaggatgcatctgagcaagatattcatttagctctggagtctgataattcaagcagtaaatcaagttgttcttcttcctggacaagccgatctgttgctccaggctttcagtaccaccctaatctacctatgcatgccgtcataatggaaaagtccaatgatcatttcattgtgaaaatacgacgtgcaacaccatctacctcttctggccttaaacagagtatgatgcctgatgaattattgacatctttgcccagacatggaaaggaagctgatgaaggaccagagaaagaatatatttcatgtcagaacacagtttttaaatctgtggaggaattggaaaactccaacaaaaatgttgatggcagcaagtcaactcatgaagaacagagctctatgatacaaacacaggttcctgatatatatgaatttcttaaagatgcttcagataagatgggtcatagtgatgaagtggctgatgaatgtttcaaattgcatcaagtatgggaaacaaaagtgcctgaaagcattgaagaattgccttcaatggaagaaatctcacactctgttggggaacatcttccaaacacatacgtagatctaacgaaagatccagtcactgaaaccaaaaacttgggggaattcatagaagtaacagttttacatattgatcagttgggatattctggaggcaatttaaatcagagtgctcaaatattagacaattctttgcaggctgatactgtaggtgcttttattgatttgacacaagatgcttcaagtgaggctaaaagtgaaggtaatcatcctgcattagctgtggaagacttgggatgtggggtgatacaggtagatgaagataattgtaaggaagaaaaggcacaagtggcaaacaggcctttaaaatgcattgttgaggaaacctatatcgacttgaccacagaatctcccagttcatgtgaagtaaaaaaagatgagttaaaatcagagccaggatcaaattgtgataactcggagttgcctgggactttgcataattctcacaaaaagagaagaaacatttctgatctaaatcatcctcataaaaaacaaagaaaggaaacagacttaactaataaggaaaagaccaagaaacctacccaagattcttgtgagaatactgaagctcaccaaaagaaagccagtaagaagaaggcccctcctgtgactaaagatccctcatcattaaaggcaaccccagggattaaggattcatcagcagcacttgccacttctacaagtctttctgcaaaaaatgttattaaaaagaagggagaaattatcattttatggacaagaaatgatgaccgggaaattttattggagtgtcagaaaagagggccatcatttaaaacatttgcatatttagccgccaagttggataaaaatccaaatcaggtctcagaaagattccagcagctaatgaagctctttgaaaagtcaaaatgcagataagttgctgaattcctgggactcttaactgatattgcatactacacagaagcttcaaattcctcatgttttaaatgagcactagagggaggtttatcacctttttggttaccagatgataatctatatttgttattactcagtgactctctaatttcacatcagcatgttcagcttgtgctagtcatcattctgatttgcttatctgtttttggtcaaaatatttatttttaaacatgttagaacttaccaaaatgaaagcaacagtgatgtattgaaatcttagttttgatattttaaagaaatgactttctagattaaaaaaatagttttgtagcattttaaacttagtgactatttagttcaattgttcatccattttttatttgcttttataattgcctccttgttttggtatattgtaaaataatttaaataatgtatttataaatatgtataattatgatgtaaaataccgtgtgtatatgtatgtatgtgtgtttctgtatatgcacacacataaacggctttgcctagccaaggattttttttatctgtataaaactttttgtataaagtttgctttcaataacagtaatgtataataaaaccatgtaaagttttgttgtaaaaaaaaaaaaaaaaaaaaaaaa

SEQ ID NO: 23210 - DNA, 9497 bp, Homo Sapiens
  misc_feature (6765)..(6765): n is a, c, g, or t
caaacatgtcagctgttactggaagtggcctggcctctatttatcttcctgatcctgatctctgttcggctgagctacccaccctatgaacaacatgaatgccattttccaaataaagccatgccctctgcaggaacacttccttgggttcaggggattatctgtaatgccaacaacccctgtttccgttacccgactcctggggaggctcccggagttgttggaaactttaacaaatccattgtggctcgcctgttctcagatgctcggaggcttcttttatacagccagaaagacaccagcatgaaggacatgcgcaaagttctgagaacattacagcagatcaagaaatccagctcaaacttgaagcttcaagatttcctggtggacaatgaaaccttctctgggttcctgtatcacaacctctctctcccaaagtctactgtggacaagatgctgagggctgatgtcattctccacaaggtatttttgcaaggctaccagttacatttgacaagtctgtgcaatggatcaaaatcagaagagatgattcaacttggtgaccaagaagtttctgagctttgtggcctaccaagggagaaactggctgcagcagagcgagtacttcgttccaacatggacatcctgaagccaatcctgagaacactaaactctacatctcccttcccgagcaaggagctggccgaagccacaaaaacattgctgcatagtcttgggactctggcccaggagctgttcagcatgagaagctggagtgacatgcgacaggaggtgatgtttctgaccaatgtgaacagctccagctcctccacccaaatctaccaggctgtgtctcgtattgtctgcgggcatcccgagggaggggggctgaagatcaagtctctcaactggtatgaggacaacaactacaaagccctctttggaggcaatggcactgaggaagatgctgaaaccttctatgacaactctacaactccttactgcaatgatttgatgaagaatttggagtctagtcctctttcccgcattatctggaaagctctgaagccgctgctcgttgggaagatcctgtatacacctgacactccagccacaaggcaggtcatggctgaggtgaacaagaccttccaggaactggctgtgttccatgatctggaaggcatgtgggaggaactcagccccaagatctggaccttcatggagaacagccaagaaatggaccttgtccggatgctgttggacagcagggacaatgaccacttttgggaacagcagttggatggcttagattggacagcccaagacatcgtggcgtttttggccaagcacccagaggatgtccagtccagtaatggttctgtgtacacctggagagaagctttcaacgagactaaccaggcaatccggaccatatctcgcttcatggagtgtgtcaacctgaacaagctagaacccatagcaacagaagtctggctcatcaacaagtccatggagctgctggatgagaggaagttctgggctggtattgtgttcactggaattactccaggcagcattgagctgccccatcatgtcaagtacaagatccgaatggacattgacaatgtggagaggacaaataaaatcaaggatgggtactgggaccctggtcctcgagctgacccctttgaggacatgcggtacgtctgggggggcttcgcctacttgcaggatgtggtggagcaggcaatcatcagggtgctgacgggcaccgagaagaaaactggtgtctatatgcaacagatgccctatccctgttacgttgatgacatctttctgcgggtgatgagccggtcaatgcccctcttcatgacgctggcctggatttactcagtggctgtgatcatcaagggcatcgtgtatgagaaggaggcacggctgaaagagaccatgcggatcatgggcctggacaacagcatcctctggtttagctggttcattagtagcctcattcctcttcttgtgagcgctggcctgctagtggtcatcctgaagttaggaaacctgctgccctacagtgatcccagcgtggtgtttgtcttcctgtccgtgtttgctgtggtgacaatcctgcagtgcttcctgattagcacactcttctccagagccaacctggcagcagcctgtgggggcatcatctacttcacgctgtacctgccctacgtcctgtgtgtggcatggcaggactacgtgggcttcacactcaagatcttcgctagcctgctgtctcctgtggcttttgggtttggctgtgagtactttgccctttttgaggagcagggcattggagtgcagtgggacaacctgtttgagagtcctgtggaggaagatggcttcaatctcaccacttcggtctccatgatgctgtttgacaccttcctctatggggtgatgacctggtacattgaggctgtctttccaggccagtacggaattcccaggccctggtattttccttgcaccaagtcctactggtttggcgaggaaagtgatgagaagagccaccctggttccaaccagaagagaatatcagaaatctgcatggaggaggaacccacccacttgaagctgggcgtgtccattcagaacctggtaaaagtctaccgagatgggatgaaggtggctgtcgatggcctggcactgaatttttatgagggccagatcacctccttcctgggccacaatggagcggggaagacgaccaccatgtcaatcctgaccgggttgttccccccgacctcgggcaccgcctacatcctgggaaaagacattcgctctgagatgagcaccatccggcagaacctgggggtctgtccccagcataacgtgctgtttgacatgctgactgtcgaagaacacatctggttctatgcccgcttgaaagggctctctgagaagcacgtgaaggcggagatggagcagatggccctggatgttggtttgccatcaagcaagctgaaaagcaaaacaagccagctgtcaggtggaatgcagagaaagctatctgtggccttggcctttgtcgggggatctaaggttgtcattctggatgaacccacagctggtgtggacccttactcccgcaggggaatatgggagctgctgctgaaataccgacaaggccgcaccattattctctctacacaccacatggatgaagcggacgtcctgggggacaggattgccatcatctcccatgggaagctgtgctgtgtgggctcctccctgtttctgaagaaccagctgggaacaggctactacctgaccttggtcaagaaagatgtggaatcctccctcagttcctgcagaaacagtagtagcactgtgtcatacctgaaaaaggaggacagtgtttctcagagcagttctgatgctggcctgggcagcgaccatgagagtgacacgctgaccatcgatgtctctgctatctccaacctcatcaggaagcatgtgtctgaagcccggctggtggaagacatagggcatgagctgacctatgtgctgccatatgaagctgctaaggagggagcctttgtggaactctttcatgagattgatgaccggctctcagacctgggcatttctagttatggcatctcagagacgaccctggaagaaatattcctcaaggtggccgaagagagtggggtggatgctgagacctcagatggtaccttgccagcaagacgaaacaggcgggccttcggggacaagcagagctgtcttcgcccgttcactgaagatgatgctgctgatccaaatgattctgacatagacccagaatccagagagacagacttgctcagtgggatggatggcaaagggtcctaccaggtgaaaggctggaaacttacacagcaacagtttgtggcccttttgtggaagagactgctaattgccagacggagtcggaaaggattttttgctcagattgtcttgccagctgtgtttgtctgcattgcccttgtgttcagcctgatcgtgccaccctttggcaagtaccccagcctggaacttcagccctggatgtacaacgaacagtacacatttgtcagcaatgatgctcctgaggacacgggaaccctggaactcttaaacgccctcaccaaagaccctggcttcgggacccgctgtatggaaggaaacccaatcccagacacgccctgccaggcaggggaggaagagtggaccactgccccagttccccagaccatcatggacctcttccagaatgggaactggacaatgcagaacccttcacctgcatgccagtgtagcagcgacaaaatcaagaagatgctgcctgtgtgtcccccaggggcaggggggctgcctcctccacaaagaaaacaaaacactgcagatatccttcaggacctgacaggaagaaacatttcggattatctggtgaagacgtatgtgcagatcatagccaaaagcttaaagaacaagatctgggtgaatgagtttaggtatggcggcttttccctgggtgtcagtaatactcaagcacttcctccgagtcaagaagttaatgatgccaccaaacaaatgaagaaacacctaaagctggccaaggacagttctgcagatcgatttctcaacagcttgggaagatttatgacaggactggacaccagaaataatgtcaaggtgtggttcaataacaagggctggcatgcaatcagctctttcctgaatgtcatcaacaatgccattctccgggccaacctgcaaaagggagagaaccctagccattatggaattactgctttcaatcatcccctgaatctcaccaagcagcagctctcagaggtggctccgatgaccacatcagtggatgtccttgtgtccatctgtgtcatctttgcaatgtccttcgtcccagccagctttgtcgtattcctgatccaggagcgggtcagcaaagcaaaacacctgcagttcatcagtggagtgaagcctgtcatctactggctctctaattttgtctgggatatgtgcaattacgttgtccctgccacactggtcattatcatcttcatctgcttccagcagaagtcctatgtgtcctccaccaatctgcctgtgctagcccttctacttttgctgtatgggtggtcaatcacacctctcatgtacccagcctcctttgtgttcaagatccccagcacagcctatgtggtgctcaccagcgtgaacctcttcattggcattaatggcagcgtggccacctttgtgctggagctgttcaccgacaataagctgaataatatcaatgatatcctgaagtccgtgttcttgatcttcccacatttttgcctgggacgagggctcatcgacatggtgaaaaaccaggcaatggctgatgccctggaaaggtttggggagaatcgctttgtgtcaccattatcttgggacttggtgggacgaaacctcttcgccatggccgtggaaggggtggtgttcttcctcattactgttctgatccagtacagattcttcatcaggcccagacctgtaaatgcaaagctatctcctctgaatgatgaagatgaagatgtgaggcgggaaagacagagaattcttgatggtggaggccagaatgacatcttagaaatcaaggagttgacgaagatatatagaaggaagcggaagcctgctgttgacaggatttgcgtgggcattcctcctggtgagtgctttgggctcctgggagttaatggggctggaaaatcatcaactttcaagatgttaacaggagataccactgttaccagaggagatgctttccttaacagaaatagtatcttatcaaacatccatgaagtacatcagaacatgggctactgccctcagtttgatgccatcacagagctgttgactgggagagaacacgtggagttctttgcccttttgagaggagtcccagagaaagaagttggcaaggttggtgagtgggcgattcggaaactgggcctcgtgaagtatggagaaaaatatgctggtaactatagtggaggcaacaaacgcaagctctctacagccatggctttgatcggcgggcctcctgtggtgtttctggatgaacccaccacaggcatggatcccaaagcccggcggttcttgtggaattgtgccctaagtgttgtcaaggaggggagatcagtagtgcttacatctcatagtatggaagaatgtgaagctctttgcactaggatggcaatcatggtcaatggaaggttcaggtgccttggcagtgtccagcatctaaaaaataggtttggagatggttatacaatagttgtacgaatagcagggtccaacccggacctgaagcctgtccaggatttctttggacttgcatttcctggaagtgttccaaaagagaaacaccggaacatgctacaataccagcttccatcttcattatcttctctggccaggatattcagcatcctctcccagagcaaaaagcgactccacatagaagactactctgtttctcagacaacacttgaccaagtatttgtgaactttgccaaggaccaaagtgatgatgaccacttaaaagacctctcattacacaaaaaccagacagtagtggacgttgcagttctcacatcttttctacaggatgagaaagtgaaagaaagctatgtatgaagaatcctgttcatacggggtggctgaaagtaaagaggnactagactttcctttgcaccatgtgaagtgttgtggagaaaagagccagaagttgatgtgggaagaagtaaactggatactgtactgatactattcaatgcaatgcaattcaatgcaatgaaaacaaaattccattacaggggcagtgcctttgtagcctatgtcttgtatggctctcaagtgaaagacttgaatttagttttttacctatacctatgtgaaactctattatggaacccaatggacatatgggtttgaactcacactttttttttttttttgttcctgtgtattctcattggggttgcaacaataattcatcaagtaatcatggccagcgattattgatcaaaatcaaaaggtaatgcacatcctcattcactaagccatgccatgcccaggagactggtttcccggtgacacatccattgctggcaatgagtgtgccagagttattagtgccaagtttttcagaaagtttgaagcaccatggtgtgtcatgctcacttttgtgaaagctgctctgctcagagtctatcaacattgaatatcagttgacagaatggtgccatgcgtggctaacatcctgctttgattccctctgataagctgttctggtggcagtaacatgcaacaaaaatgtgggtgtctctaggcacgggaaacttggttccattgttatattgtcctatgcttcgagccatgggtctacagggtcatccttatgagactcttaaatatacttagatcctggtaagaggcaaagaatcaacagccaaactgctggggctgcaagctgctgaagccagggcatgggattaaagagattgtgcgttcaaacctagggaagcctgtgcccatttgtcctgactgtctgctaacatggtacactgcatctcaagatgtttatctgacacaagtgtattatttctggctttttgaattaatctagaaaatgaaaagatggagttgtattttgacaaaaatgtttgtactttttaatgttatttggaattttaagttctatcagtgacttctgaatccttagaatggcctctttgtagaaccctgtggtatagaggagtatggccactgccccactatttttattttcttatgtaagtttgcatatcagtcatgactagtgcctagaaagcaatgtgatggtcaggatctcatgacattatatttgagtttctttcagatcatttaggatactcttaatctcacttcatcaatcaaatattttttgagtgtatgctgtagctgaaagagtatgtacgtacgtataagactagagagatattaagtctcagtacacttcctgtgccatgttattcagctcactggtttacaaatataggttgtcttgtggttgtaggagcccactgtaacaatactgggcagcctttttttttttttttaattgcaacaatgcaaaagccaagaaagtataagggtcacaagtctaaacaatgaattcttcaacagggaaaacagctagcttgaaaacttgctgaaaaacacaacttgtgtttatggcatttagtaccttcaaataattggctttgcagatattggataccccattaaatctgacagtctcaaatttttcatctcttcaatcactagtcaagaaaaatataaaaacaacaaatacttccatatggagcatttttcagagttttctaacccagtcttatttttctagtcagtaaacatttgtaaaaatactgtttcactaatacttactgttaactgtcttgagagaaaagaaaaatatgagagaactattgtttggggaagttcaagtgatctttcaatatcattactaacttcttccactttttccaaaatttgaatattaacgctaaaggtgtaagacttcagatttcaaattaatctttctatattttttaaatttacagaatattatataacccactgctgaaaaagaaaaaaatgattgttttagaagttaaagtcaatattgattttaaatataagtaatgaaggcatatttccaataactagtgatatggcatcgttgcattttacagtatcttcaaaaatacagaatttatagaataatttctcctcatttaatatttttcaaaatcaaagttatggtttcctcattttactaaaatcgtattctaattcttcattatagtaaatctatgagcaactccttacttcggttcctctgatttcaaggccatattttaaaaaatcaaaaggcactgtgaactattttgaagaaaacacaacattttaatacagattgaaaggacctcttctgaagctagaaacaatctatagttatacatcttcattaatactgtgttaccttttaaaatagtaattttttacattttcctgtgtaaacctaattgtggtagaaatttttaccaactctatactcaatcaagcaaaatttctgtatattccctgtggaatgtacctatgtgagtttcagaaattctcaaaatacgtgttcaaaaatttctgcttttgcatctttgggacacctcagaaaacttattaacaactgtgaatatgagaaatacagaagaaaataataagccctctatacataaatgcccagcacaattcattgttaaaaaacaaccaaacctcacactactgtatttcattatctgtactgaaagcaaatgctttgtgactattaaatgttgcacatcattcattcaaaaaaaaaaaaaaaaaaa

SEQ ID NO: 23211 - DNA, 1266 bp, Homo Sapiens
gcgcgccgtccctgcgccccgctccgcccgcgcctctctcccagcgccgcgcctcgggcgtaaagagcgcgcccctcgcaccgcagccagtgccgaccgcagcagcccagccccagccttcctccgcctccgcctctctctcctcctcctcctccgccgccggacacgcagccgcagccgggaccgggacgcagctggggagtcagggacgcgcgcagccagcccttccccctccggctcccgcaccgccggccgcctcccctcgccctcctactctcccctccctgctccttcgctttttcctcctcctcctctcccggccccggctgccagcaccatgtccgcagggggagattttgggaatccactgagaaaattcaagttggtgttcttgggggagcagagcgtcgggaagacgtctctgattacgaggttcatgtacgacagcttcgacaacacataccaggcaaccattgggattgacttcttgtcaaaaaccatgtacttggaggaccgcacggtgcgactgcagctctgggacacagctggtcaggagaggttccgcagcctgatccccagctacatccgggactccacggtggctgtggtggtgtacgacatcacaaatctcaactccttccaacagacctctaagtggatcgacgacgtcaggacagagaggggcagtgatgttatcatcatgctggtgggcaacaagacggacctggctgataagaggcagataaccatcgaggagggggagcagcgcgccaaagaactgagcgtcatgttcattgagaccagtgcgaagactggctacaacgtgaagcagctttttcgacgtgtggcgtcggctctacccggaatggagaatgtccaggagaaaagcaaagaagggatgatcgacatcaagctggacaaaccccaggagcccccggccagcgagggcggctgctcctgctaatgcagagccgacctgtggcttcccatgacactccttgcttgttgtgttgcttcctattggctagcttcctaaggggggagggaaccgagttatcaagatgggaggatttttcttttctctctgtctttaggagtagggtgggatggggagggaggctgggcatcagggatcacatcactcttaacggctgttacttaaacaactattttttggtttggttgtaatatattgtactttattaagattgccaaaaactgttaaaatttaaaaaaaatttaaatcatgtgtatacaattttttgc

SEQ ID NO: 23212 - DNA, 2309 bp, Homo Sapiens
gcgggggcgggccggggcggggccaggccggctagaggggcgggtctagcggcggcccccggcgaagttcactgcgcttgcgctgacagacgcaagatggcggacagtgcggaactaaagcaaatggttatgagccttagagtttctgaactccaagtactgttgggctacgccgggagaaacaagcacggacgcaaacacgaacttctcacaaaagccctgcatttgctaaaggctggctgtagtcctgctgtgcaaatgaaaattaaggaactctataggcggcggttcccacagaaaatcatgacgcctgcagacttgtccatccccaacgtacattcaagtcctatgccagcaactttgtctccatctaccattccacaactcacttacgatggtcaccctgcatcatcgccattactccctgtttctcttctgggacctaaacatgaactggaactcccacatcttacatcagctcttcacccagtccatccggatataaaacttcaaaaattaccattttatgatttactggatgaactgataaaacccaccagtctagcatcagacaacagtcagcgctttcgagaaacctgttttgcatttgccttgacaccacaacaagtgcagcaaatcagtagttccatggatatttctgggaccaaatgtgacttcacagtacaggtccagttaaggttttgtttatcagaaaccagttgtccacaagaagatcacttcccacccaatctttgtgtgaaagtgaatacaaaaccttgcagccttccaggttaccttccacctacaaaaaatggcgtggaaccaaagcgacccagccgaccaattaatatcacctcacttgtccgactgtccacaacagtaccaaacacgattgttgtttcttggactgcagaaattggaagaaactattccatggcagtatatcttgtaaaacagttgtcctcaacagttcttcttcagaggttacgagcaaagggaataaggaatccggatcattctagagctttaattaaagagaagttgactgcggatccagacagtgaaatagctacaaccagcctaagggtttctctactatgtccacttggtaaaatgcggctgacaattccgtgtcgggcccttacatgttctcatctacaatgttttgacgcaactctttacattcagatgaatgagaaaaaaccaacctgggtttgtcctgtctgtgataagaaggctccatatgaacaccttattattgatggcttgtttatggaaatcctaaagtactgtacagactgtgatgaaatacaatttaaggaggatggcacttgggcaccgatgagatcaaaaaaggaagtacaggaagtttctgcctcttacaatggagtcgatggatgcttgagctccacattggagcatcaggtagcgtctcaccaccagtcctcaaataaaaacaagaaagtagaagtgattgacctaaccatagacagttcatctgatgaagaggaagaagagccatctgccaagaggacctgtccttccctatctcccacatcaccactaaataataaaggcattttaagtcttccacatcaagcatctccagtatcccgcaccccaagccttcctgctgtagacacaagctacattaatacctccctcatccaagactataggcatcctttccacatgacacccatgccttacgacttacaaggattagatttctttcctttcttatcaggagacaatcagcattacaacacctccttgcttgccgctgcagcagcagcagtttcagatgatcaagacctcctacactcgtctcggtttttcccgtatacctcctcacagatgtttcttgatcagttaagtgcaggaggcagtacttctctgccaaccaccaatggaagcagtagtggcagtaacagcagcctggtttcttccaacagcctaagggaaagccatagccacaccgtcacaaacaggagcagcacggacacggcatccatctttggcatcataccagacattatttcattggactgattcccaggccctgctgctcccatccccaccccagatcgaatgaacttggcagaaagaagagaactttgtgctctgttttaccttactctgtttagaaaagtatacaagcgtgttttttttcctttttttagggaaaaaattaaaagaaatgtacagagaacaaaactatattttcagttttacttttgtatataaatctaagactgcctgtgtgataaaacacttgtttaaaaaaaaaaaaaaaaaaaaaaaaaaaa

SEQ ID NO: 23213 - DNA, 787 bp, Homo Sapiens
cttcattccattttctgttgagtaataaactcaacgttgaaaatgtcctttgtgggggagaactcaggagtgaaaatgggctctgaggactgggaaaaagatgaaccccagtgctgcttagaagacccggctggaagccccctggaaccaggcccaagcctccccaccatgaattttgttcacacaagtccaaaggtgaagaacttaaacccgaagaaattcagcattcatgaccaggatcacaaagtactggtcctggactctgggaatctcatagcagttccagataaaaactacatacgcccagagatcttctttgcattagcctcatccttgagctcagcctctgcggagaaaggaagtccgattctcctgggggtctctaaaggggagttttgtctctactgtgacaaggataaaggacaaagtcatccatcccttcagctgaagaaggagaaactgatgaagctggctgcccaaaaggaatcagcacgccggcccttcatcttttatagggctcaggtgggctcctggaacatgctggagtcggcggctcaccccggatggttcatctgcacctcctgcaattgtaatgagcctgttggggtgacagataaatttgagaacaggaaacacattgaattttcatttcaaccagtttgcaaagctgaaatgagccccagtgaggtcagcgattaggaaactgccccattgaacgccttcctcgctaatttgaactaattgtataaaaacaccaaacctgctcactaaaaaaaaaaaaaaaaaa

SEQ ID NO: 23214 - DNA, 3464 bp, Homo Sapiens
ggcggggagagctgccggccgccccgctccgccgaacccagcaggaaggagggcgcgagcgggcgagcgcgggcagcacgggaggaaaaagcttccgcgcgggggagcgaaaagacggaaagaaagaaagaaaacgagcgcgagagggggaaaagcgagcgatcgagcgagcgcgcgcgcgaaaactccgggcagcactttcatttggacccgtggatacccattgaacagatgcttgaaacctgcaagtaatcttcagatcctagcagaaccataggcctttcctttgttttgggaggatatagcctgcctatatgctgtggaaatgaacggggagcagcagcttgatgcagatgccggctctggtatggaagaggtagaattaagctgggaagattatctagaagaaacagggtccacagcagttccctatgggtcttttaaacatgtggacacacgtttgcaaaatggatttgctcctgggatgaagctggaggtggctgtgagaacagatcctgagacctactgggttgccaccgttatcactacctgtgagcagttgctccttctccgctatgatggctatggggaggatcggagagcagatttctggtgtgacatcaggaaggctgatctctaccccattgggtggtgtgagcagaataagaagacccttgaagccccagaaggcatcagagataaagtatctgactgggatgagtttctgcggcagaccctgataggagcatgtagtcctcctgttccgctgctagagggcctccgtaatgggaggaatcctttagatctcattgctccaggatccagactagaatgtcaagctttccaggactctttaagcacttggattgttactgtagtagaaaacattggaggaaggctgaagctacgttatgaaggacttgaaagttctgacaattatgaacattggttgtattacttggatccatttcttcatcacgttggttgggctgctcaacagggatatgagcttcagcccccttcagccattagacatctaaaaaatgaagctgagtggcaagagattttggccaaagtgaaagaggaagaggaagagccattaccatcttacttatttaaggacaaacaagttattggcattcatacattctctgtaaacatgaaattggaagctgtagacccctggtctccttttgggatctctcctgctacagttgttaaggtttttgatgagaagtactttctggtggaaatggatgacttgcgtcctgagaaccacgcacggcgatcctttgtgtgccacgccgacagtcctggcatcttccctgtgcagtggagtctgaagaatggcctacacatcagcccccctccaggctacccaagccaggactttgactgggctgactacctcaaacagtgtggtgctgaagctgctccccagaggtgcttccctccgttaatttctgaacatgaatttaaggagaacatgaagctcgaggcggtgaaccccattctccctgaagaagtgtgtgttgctaccatcactgcagtgagaggctcctacctgtggctccagctggagggttctaagaagcctatacctgaatgtattgtgagtgtggaatccatggatatatttcctttgggctggtgtgaaaccaacggccaccccctcagcactcctcgccgagcacgagtatataaacagaggaaaattgcagtggttcagccagaaaaacaagtaccatcctcgaggactgtccacgagggcctgaggaatcaggagctgaactccacagagtcagttatgattaatggaaaatattgctgtccaaagatatacttcaaccaccgttgcttctcagggccatatcttaacaaaggaagaattgctgagctgcctcaatgtgtaggacctgggaactgtgttctggtccttagagaggtcctcactttacttatcaatgcagcctacaaacccagccgtgtccttcgggagctccagctggacaaagactctgtgtggcacggatgtggggaagtcctaaaagccaaatataaaggaaagagttatcgggctactgttgagatagtgaaaacagcagatcgggtgactgaattctgccggcaaacctgtatcaaactggaatgctgtcctaacctcttcggtccacggatggttctggataagtgttctgagaactgctctgtacttacaaagaccaaatacacacactattacggaaagaggaaaaataaaagaattgggaggccacctggtgggcatagtaacttagcttgtgccctgaaaaaagccagtaagaggagaaagaggcggaaaaatgtttttgttcataagaagaaacgctcctctgcatctgttgataataccccagcgggctctccccagggaagtgggggtgaagatgaggatgacccagatgaaggggatgatgattccctaagtgaaggcagtacatccgagcagcaggatgagctacaggaagaatcagaaatgtcagaaaaaaagtcatgctcctcttctcccacccaaagtgagatatccacatcgctgcctccagatagacaaaggagaaaaagggagcttcgcaccttttcattttttgacgatgaaaataaacctccttcaccaaaggaaataaggatcgaagttgctgaaaggcttcacctggacagtaaccccttgaagtggagtgtggcagacgttgtgcggttcatcagatccactgactgtgctccattagcaagaatattcctagaccaggaaattgatgggcaggccctgttgctccttacccttcccactgttcaagaatgcatggacttaaaattgggccctgccatcaaactttgccatcacatagagaggatcaagtttgctttttatgagcagtttgccaactgagaaggacaaccaaagtgagctggatctttgaagcacaaatgcagcaaatccttcaccctgctttataagtggagctggaatagtcctggggctctggggcctgcgggtatcagcttgctctctttgcactttcggggaaggaggactcacagtgaggaagcaaaaactgtgcacagaagtggatcacctgctggtggaaatgtggacatctcttgttcagcagatggcagtttttaaaaaataaaggttgtgaggaaaagacttatataagaagaaaagcatttccagtggtgtggcctgaaaacaaagaataacctaggctgctggaaagcacccttttggttgttttcattctgttccctctcattgtagattgaactttgttctctgctttctttttcttggaaagagaggacttagctttaagtcagcactgatttgggactgttcctaaggcatatcagtgcttcattgtcattgtgtttttaaactttttaaaattaaaacagttcattttggggaaaaaaaaaaaaaaaaa

SEQ ID NO: 23215 - DNA, 3415 bp, Homo Sapiens
cgcgagcgggcgagcgcgggcagcacgggaggaaaaagcttccgcgcgggggagcgaaaagacggaaagaaagaaagaaaacgagcgcgagagggggaaaagcgagcgatcgagcgagcgcgcgcgcgaaaactccgggcagcactttcatttggacccgtggatacccattgaacagatgcttgaaacctgcaagtaatcttcagatcctagcagaaccataggcctttcctttgttttgggaggatatagcctgcctatatgctgtggaaatgaacggggagcagcagcttgatgcagatgccggctctggtatggaagaggtagaattaagctgggaagattatctagaagaaacagggtccacagcagttccctatgggtcttttaaacatgtggacacacgtctgcaaaatggatttgctcctgggatgaagctggaggtggctgtgagaacagatcctgagacctactgggttgccaccgttatcactacctgtgagcagttgctccttctccgctatgatggctatggggaggatcggagagcagatttctggtgtgacatcaggaaggctgatctctaccccattgggtggtgtgagcagaataagaagacccttgaagccccagaaggcatcagagataaagtatctgactgggatgagtttctgcggcagaccctgataggagcatgtagtcctcctgttccgctgctagagggcctccgtaatgggaggaatcctttagatctcattgctccaggatccagactagaatgtcaagctttccaggactctttaagcacttggattgttactgtagtagaaaacattggaggaaggctgaagctacgttatgaaggacttgaaagttctgacaattatgaacattggttgtattacttggatccatttcttcatcacgttggttgggctgctcaacagggatatgagcttcagcccccttcagccattagacatctaaaaaatgaagctgagtggcaagagattttggccaaagtgaaagaggaagaggaagagccattaccatcttacttatttaaggacaaacaagttattggcattcatacattctctgtaaacatgaaattggaagctgtagacccctggtctccttttgggatctctcctgctacagttgttaaggtttttgatgagaagtactttctggtggaaatggatgacttgcgtcctgagaaccacgcacggcgatcctttgtgtgccacgccgacagtcctggcatcttccctgtgcagtggagtctgaagaatggcctacacatcagcccccctccaggctacccaagccaggactttgactgggctgactacctcaaacagtgtggtgctgaagctgctccccagaggtgcttccctccgttaatttctgaacatgaatttaaggagaacatgaagctcgaggcggtgaaccccattctccctgaagaagtgtgtgttgctaccatcactgcagtgagaggctcctacctgtggctccagctggagggttctaagaagcctatacctgaatgtattgtgagtgtggaatccatggatatatttcctttgggctggtgtgaaaccaacggccaccccctcagcactcctcgccgagcacgagtatataaacagaggaaaattgcagtggttcagccagaaaaacaagtaccatcctcgaggactgtccacgagggcctgaggaatcaggagctgaactccacagagtcagttatgattaatggaaaatattgctgtccaaagatatacttcaaccaccgttgcttctcagggccatatcttaacaaaggaagaattgctgagctgcctcaatgtgtaggacctgggaactgtgttctggtccttagagaggtcctcactttacttatcaatgcagcctacaaacccagccgtgtccttcgggagctccagctggacaaagactctgtgtggcacggatgtggggaagtcctaaaagccaaatataaaggaaagagttatcgggctactgttgagatagtgaaaacagcagatcgggtgactgaattctgccggcaaacctgtatcaaactggaatgctgtcctaacctcttcggtccacggatggttctggataagtgttctgagaactgttctgtacttacaaagaccaaatacacacactattacggaaagaagaaaaataaaagaattgggaggccacctggtgggcatagtaacttagcttgtgccctgaaaaaagccagtaagaggagaaagaggcggaaaaatgtttttgttcataagaagaaacgctcctctgcatctgttgataataccccagcgggctctccccagggaagtgggggtgaagatgaggatgacccagatgaaggggatgatgattccctaagtgaaggcagtacatccgagcagcaggatgagctacaggaagaatcagaaatgtcagaaaaaaagtcatgctcctcttctcccacccaaagtgagatatccacatcgctgcctccagatagacaaaggagaaaaagggagcttcgcaccttttcattttctgacgatgaaaataaacctccttcaccaaaggaaataaggatcgaagttgctgaaaggcttcacctggacagtaaccccttgaagtggagtgtggcagacgttgtgcggttcatcagatccactgactgtgctccattagcaagaatattcctagaccaggaaattgatgggcaggccctgttgctccttacccttcccactgttcaagaatgcatggacttaaaattgggccctgccatcaaactttgccatcacatagagaggatcaagtttgctttttatgagcagtttgccaactgagaaggacaaccaaagtgagctggatctttgaagcacaaatgcagcaaatccttcaccctgctttataagtggagctggaatagtcctggggctctggggcctgcaggtatcagcttgctctctttgcactttcggggaaggaggactcacagtgaggaagcaaaaactgtgcacagaagtggatcacctgctggtggaaatgtggacatctcttgttcagcagatggcagtttttaaaaaataaaggttgtgaggaaaagacttatataagaagaaaagcatttccagtggtgtggcctgaaaacaaagaataacctaggctgctggaaagcacccttttggttgttttcattctgttccctcccattgtagattgaactttgttctctgctttctttttcttggaaagagaggacttagctttaagtcagcactgatttgggactgttcctaaggcatatcagtgcttcattgtcattgtgtttttaaactttttaaaattaaaacagttcattttggggatgaaaaaaaaaaaaaaaaaa

SEQ ID NO: 23216 - DNA, 236303 bp, Homo Sapiens
gaattcagcagtcgtcgccgccccccccccccatgactatctttttataccttgtctaaatgatttctacaaagtttgtatattttgagtaatgttttaggtctgatattattttgcattgatttgtaggaattataaatgtaaccatttatctgtgaacaaataattaaaaatacttaatttggggaggaggcgggaacctagatgtgctataatcagcagtgtgcactttgcttcacattatcttctgggaggaaattttgctcctagctcctgagtgtgcacactgatgaccactgcaggatttggcctggcttgagcaaagaaacagctcgacgccatgggggctatggttccaacctgctgctgcagttggtataaactaggcaaaaccagaagtcagaggattatccattcctcttgttctttttctagctctacctgttcttctgccattcttctgcctgaaaatattcatgagcatcgcctatgggtcttgtctctgtgctttacagtagtgacatcacttgtgtaagccagtttttctgttagtcgtcggtacctcctaggttcgctgtgggggttaagtgagataaaactgtgcttctgaaattttagtgtgcacacaaatcacctaggtatttaaaattgcaagtctgattaagttagtctggggtgatgcctgtgattctacatttctaacaaatttctggctgatgccagtgtcacaggtgccaggaccacacttttaagtagcacaaagctagtacctatgtatacagcatgtatcacagagtatgcatattaaaagacctgataaatgttacctgctattatagtcattatttttcagccaaaataaataagatatggtccttgttttcacacaggccatgatctgatggtaaactggaaaagcagacaattcattacaatcagttcagtaagccatgagataacggaaatgccaagcatgtcaggagcaagtaagagggagtctaacccaaatctgaccaccaggaaaagtttagtggaggatgcagcaacaagaaagacctgagggtctcctctcctccctccttttttcctgcacttcttgtgcaggatgttttaggaaaaagaaaatagggcttggggctagacaaacctgcattgaaatcttaaatctgttatttttttaatcgtgagatcagcttgtttagtttctctgagcttcagttccctcatctgtgaaactggaatattaatagctttctattaagtaaatattgtagtgaggattagagatttatatatatgattacatagatgtatatataagattgtgtgtgtgtgtgtatagtatgtatgtgtatatgctagtttctggtaccaaatagattttttaaaataatattaattttaatttccattctattttctatcctttcccattttcctctttgttagctttctctgtaagtttaaaaatttaccttgtgggcacacatttcctccaaacttaactaaatctcttcaaaggggtgggagtttcgagggggaattcaaatgtcagatgtttgtcaaagagaaaagaaccgtgaagtaccgagaacagggggctgggaatacagggtctatgcaccaaggaaacatgcgttggtttgatccagtgcaactacagttcccagcgcctttggcatttcagcagaatgtgaacacttgcttgattttgtggtttgagcccctacatccaaagagctatttcaaattaatatttatttaaaaatggccttttaatattaatggcatatggttttatgacagtgaattaaatttccttttattgttagaactttttgaggatttctggacatcactggagacgttggagaccccaaggatatagccaggccaggttgatatatctcactgaggttacagaaggaagcagcggcaagcctagccgattcagagaccactgcgggcttgggaatgagcaggagagggtgtgagggccagaggccatctgtgttgcttttctctctcccagtcattctagccatctttgatgtggactaatagtcgaggttggccatgggtttgcactgtctctagggagtctttgtgatatagtgcggggtaggaagaacacctagaatcaaaatatctaatgttactagctgtttagttcttagtgtgggtatggtcccattttaggagaacagaactatgaactatgtttgtgttttttttttttttttgagacagagtctcactctgttgccaggctgaagtgcagtggcatgatctcagctcactgcaacctctgactccctggttcaagcgattctcctgcctcagcctcctgagtagctgggattacaggcatgtgccaccacgcccaactactttgtgtatttttagtggagaccacgtttcaccatgttggccaggatggtctctcgacctcgtgatctgcccaccttggcctcccaaagtgctgggattacaggcgtgagccaccgcgcccagcccagaactacatttgcttaactgtgactctttcctttgtacctgaaaataagtatcatttttatccagtaaatattggctgataattcataaggcagatgctttaaattggctattgtagaacaaggagaaagaacttgatgaagagaaaaatccttggaatcagtggtttacaactttttttttccttcctgatgatcaaaccgtattatcgcatagtagaaattggattttcttccagaaactactttagtacctctcatttgtagcacttctatcaagagtgctggtattcggacatgtaacctacaaacaaaatcagaaagatgtcaaaataacaccctaattcagactatcctgagaacatttgtcttctgaatatttaagaaaaaaaaataagtgttaattatattgtagggtgttaccattttgtatttcaagttcctgagaagagaatttgaacagtttgctatttggaaattttagcaaccagctaccttgcctatggaaagattaaaaaaaaaaggagagggagtagatggtggtccataggctgtaactggaaactatgcctgtcttatttagcatttcaaaacaaaaaccataaacaaacatctcagattcaaaacagaaaggaatttctggcagggcagaatgaaacctgagactgcagagtcccagtctacaagaggtaacttatttagcttcttatccaaaggccacagcaaaacgtttcacagctgtgattaaacaaaaggcatcttttgttggagaattgtgatacttctttttaagactgcgaaagacctgccaaaataaggcaaagctaccttgaggatgtttgacctgaactagactttatgaagtagttggaccacttcaggccttatggtgtgaggagtgtgggatgcataggcttggacctttctgtgtgtgtgtttataagtctgtagagacagaatattccatcatgttatcaaatgcagatctcgaaaaccttttctcacttcccatatttgggagctttgctttttttgaaaagtatgggcttttacagtctgagtgaggaaaagggatggattttagacagttttgtctgtggaagtcaaagtagaaggatttttaaacagttggagacagaatgggtatactgtgtgcttttcagaaccactgagttcctatatttcaggcagattttaagaaaacttattaccactacctatcacatcaaaatgaaagaccaaataaatttctgtgttttaatcaagactgtgactgtatttgtgtatatcctagcttgtttcagaaagggtttgaggctgcccagaaaggtgaatattacagaattcttgtatgtgataacatgataaaggagaaaaaaacagccatggcttttgaatcccccttcatctcttaatagcccagtgacttaaataaaacccttcaacttcccttggcatgactttgccttaatttgtcaaaagggaattaaatagttacctacctcaagacaggggaactgaatcagatgatatcttaaggttctactggtcataagatctatgcttttatgacctagaagtgatagacaggagtcgaatattaccttgtgtttgcagagccagggaaggaaaaagtgatagtgtctacatgactgccaggtgctgtagacagaagggcttagaggaaaagatcaagagttcctccatggttatgtttatcaagcggcagtggagacagtaaagcgtagtattgggaagttagtgacagcttttaaatgcctgaagtcttttaaatcatattcaccgtggctgagtctggattcagggtagaactcaaacctctcttatgtgtttgctgccttccctttctccattttcttatgtacttcattaattattaagactatgaggtaggtaggtgacagagactgcaaagggagaagctagagcgaagacaggccaaaacttgcccaaattcacatgctcatttctgcctctgacactaggagagagttgagtaattgctcttcttcctaatactgcaggcagcagccaaattctccacattcttttacctttgctgctgttttcacttgccagggagtttccttaaggagcagactgaatttaaagaaacatagcagtaatagtgcatgaaagggggtgtggggtcgctggccaaacgtggcatgttggtgcctcacgttgggaggatgaaaggatgattcctgcagagggacatgctgcacactgcgcaagctccctcacctctgtgtacagctgagccactgaccaggaagctctttgcttgtatgtgagacagcaaatattcactaaatatgtttcaagtacaagccaactgcgaagcttggaaagttgtccagaaacttcacccttcctttgcatgttgtccagcggcaggacgttgagcaaggttaggtagtatgaacctgcggctctaaaacttaaagtaataggcattattcgaaagaaaatgatgcccagcacggcttccagtgtatattagcaatcagcttgtttgccttgtggttattacattttttgccaagagcagccttccagaatgaggtactagttaattcccattgggcatttattcattaataagtctgctgaatgtgaaatattccatttgggagtatgtcatatgagaaaactcagtggctaattattacatagctctcttccatgattctcactttcagcgcagttacctaagccaccatttcctaggtatgtaaacttagataatttttagttttctgtaatactttttgctttttgctccagaaaattttttttcactccaatctgtgaaattgttaaaagtttactaataactggataaacattttatgttgtactatggcttgctctttctttccattttaaaaagataatatcaaaagttaaatcctgttccagatcttaccgtctctcttccaggctagatttctgggatggggtggtgttaatttactaacctgagcttttgcccaatctagggtctcctttactcttttctggtgtataaataggtctttatttgcttttcttccaggttggttggtgcatattagcttaagaacttttaaacctctgcggcagtaatgagaatctgcatgccaagggcccagcatttctctacaaagcagcccatgagtgcatgtgtgtttgctgtagtgaagggtctatgttagaaggtgagttagagaccccacttgcccacatctgtgtgctgtggtttggccctcctcctctggtgaatccctaccacagcccagtgcctgctggatctcaagtgtcctgaaagccattggaaagatgctttccagcagtcttaacatttgcctccatgttctttccagcaaggatgagtgcacacagctttccagctactgggcaacccagccattgacagaaggtggtgcaagagtcaattcctctgtgaggatcccttccaataacagtgtctgcattaacgacaaaaagttctgtaaaaatgtttgcagggggagcttttgacctgcaaacatttctacagaactttttgccatataggaacatatgaaatgttatatgtaatataggtcagaaatgttgccatataggaacattcgagaagatgataaatgtgaggaaagtgataaaagtttatacaacaaggatctgtacaagattgtggtagatttgctggcctaaaaagatgtactcagggtagtgaactatttctgtagcatcagccactgggcccctgagtgggaatactctttgagagacaggaagctaattccttctttgaatgtgtagttaactttgtgccattggatgtagggtgtgcacgtgcatgtgtattttttcagttgctgagggcacaacacagacaaagaataccgtgcattgtattatggatgtgctggaaacaacgccccagcttgaagcaagttgactgtagtatctactctgtagatcagcaaactgaaaatgacttcttaataaaaggtcgcacattgttttacttactgcatttgaaaaaacagttctaattaagatgctttgggttttaaactgcctgttaattgggatatctataagtgggcaagtagagcttctgaatattgctgacttatttcttagtgattgggacaaaagctttttttttttttttttaaatagtatgccatcattaaacagtttttgaccttacgcagaaactttaaatgtgacagcagaaagaagcagcagaaatttacagtgagaaatggaagacctctgtaggtaaataagtaaaatgaaagaagccagaggtgttttttgttggcagtagatgaaattattttcaaacactgccctgggaaaaggtgagccctcagcaaccaagtttattgactgtctattcaggaaattgtattagttgctttggaaagagaaaggaaaaagaaaagactttctgccaactgagggctggaaaacttgagggagataaagtatttacatgctttaataacataaagcatgtccaaaagaaatacataattacagctatgtttggcactgaaaataatccaggttattatatttttaaaattgtgtgtgaatatgtaagtgaatgcccttgagtcagaaatgcttgagtgataatatttcttgagagaatggaaaagtagatggtattaggagctaaaaagagagagaagggataaaggatgaccactagttaagaaggaacagtgaactttttttctttagaggggacatatttcatatgcatagttattccccctctacttctaatcttagtataataagcatttaacttcccataggaccttagcagtctgcatgttattactaaaagcccacaggtaagggaaaattagacccctaaattaaagacctgaccatcttgctcctgaagttttaggttttccaactttatttccagtgtatcttggacaaagaccctttgagagctcagaaaattaggagatgtggtcaacacattcttcttaatatctagtgcaaccaaagacttggccagcaactaaggccagcaactggaaaatgggtgtggtgtcaggtttcagacgcccccatagttgtcttcacgtcctttaatatgtgttggcatccctcaagccctgccagtttatgctctttcctttgtgaagccttcctgccctgcccaggaaaaagtaatgccatcccccatcccccatcccccagtgaccataaatagcactttctccttcccctgttatagcacttttcatactgtgttagagttcacatttctgtctctctgcctcattgtgatctatttgagtgccaggattgtgtgttattctagcgcttggcacacaggaagaactcaatgagcatttgttgactaaatctagactcaaggtcatccaagatattatacaaaaactttttcatcgaaccatttggtctgcattgtggaaactgaaacgaatggcactccccgttaagagaatcccagtgagaagccatagcattgcaggaggaagctcaaactggttaactttgctcatgccgatcagtcttagaattttttgtaatgtttccatgatgaattagtttcagctgtatttttttggcaaatatttaaagataatttttatttgtgtggacttttcttcttgtcagtttgtcataaaggtgtcatctttcattcactaaccccttatcagcttataggaattttcctcgtgggtggttgcttgtaaccttctcttgactgccagggatctgatatactaaacggttgagatactgtggtgatcagctgcttgtaaacaataactgataaatcggttataaattatcaacacacttcagatgaccatatcatcatgacttggtgatagcaaaatagacttctgaattctcagctaatccaggattgtgtcttaacaaacatttatgttgattaatcaggagggtgtttagtttaagaaacatgtactgaatgttcaatatgtgagtgccaagtgcagtgtggtgcaacctgtttactgcttcaggtgatctccagatatcctaaggaatttttaactgtacagcttctttggggaaggaaatcctaagccaacaacctgagggtggaagtgtgtgactgggaataattaaaatgcctcacaatggttcgagcaggaattccataggaatgcactttaaggcatttaggaaagcaaaattccgtttggatttactccaaaccctatgacttcagagacaggaatttttgatgattagtggctggagccccaacttgttatttagtaattccacattcagtgtggaattgttttttctgtagcactagttataagttctttgtttgtttttctaaaggttttaaggaggtttacaaattaagatggaataagacattagaaacttaaggatacatagcaaattaaaaccttgatacatttggtgctaagcttttcagctgctaaagatagagagttttggccaagataaagtatatagagtcaaagacacatgcagaattctcctggatataagttcaggtacctgtgccattttatcactttagtcaatgtgcccattttcttagggcaggtttaattttctgctgcggcatggcccttcagctttcccaagtttacgatgctcatctcatacctgatggaaattgttgataatgttagtgtatggttggtggctttcccagtagcccacttcagatccttttattggtcatcaccagttacaaaagttttaggaaagggaaggagagaagctggaactgatggctaagtaaagttatagctgtagagctctggttgtccataatgaacagtggcaatgaacagtgaagatttaagcaaggttattttttgagggtccactgatgattttcctataactcgttaaaaatatttttaaaacttttatatggcttcatataaaaaaagcttaaaaatctgttcccagacttcctaggcaggtatgttttcttttcagtgttgccttctctaagactttatcagcagaaggagtatttgagctgatggcaaatgctgccaaaatgagaagtgtgtgtgtttctcaaaactcatgatcccacagttaaatcgagggtgtgggtaaaggacccagaactgttcttgctgatggaatagcacacttttcctcagacattagtagagtaaatgaatggaggcagaggattgggaaacactcttgaaggagggagtgcccatcagcctgtaagccaaagtaaacagttcttgtaactgaaaaatagacttcctggaaggagagaaccagagaagtgggtgtgaagtgcaaccagcaagtaccattttcagtgatacagacagctggcttaacctgagtcctgacaagaacctctcagagctatttggggaaatcagttgcttgaaccagcctttgactggcctatcgttcctacagctgtacccaaagatggcacttggggagaaaaggtcacatttgtttgtgatagagaaagcaaaccgatggggcattttgagaggtagaaatgaagtcatcatttgcggagccggtggaccagcagaatggccgtgggaaggtatccctgaacctgtatgtgtggaaatgcaggcattctctgtcagtcttttgtcacagtgagaaaatgtcattacagtggacagctatgcacacgttggagattatgtgatgtgtgcatgtgcatccatgtgtacaacatacacccatgcaaaaattgctcacagggtcatgtgcgtgtcctggtagtctgttatgtccattcttctgtaataggagtatgtttttcaaactgaagctgttaggttctgttaattccaacagaacaaaaaaaaatctgcctctggccatcattcgttaatttacatagattagatacatgtagtctgtctcctaagtggcttacataaagccgtgggcgtcttttcctgtgtctcctcttcggcagttcctaaggcacctaccaggtttatagttgctgatgtcctacccatactatgtgtcaagaaaggtagactcaaaaaggattgatgcagatattccttagaagttttcatgcccaaagattcttggaccttagttgcatgagggaagaggccttgcctcgtgaaaggagaccgaagccccttattaaaggggtcactcagaaaaaggtgttatctaaattccctctttgtagttttatttcttcaatgtattccccatcactagctgtgtgtgctggagccaaatgttgggcccactgccatcttttaaagaatgctactgtaaagggataactttactagacagtttgggaaatagaagaaacaattatctaaaatgctcttgttccaaacacaaaaactagcttcatgtttttgtgtataaccctgcctagtcttactctgtagacatccttccccccacacccatcgtgtatgttttttatccccatctaacattatatcaaatacattgtcctatgttgctaccttgtcttcattattatgatttgtcaagcaattgggttgtactgactgcagtgttactcctcatttcctttccccctttcttttccatactacttaaaaagcaagaaaggaaaaaaaattctatttaagagaaaatcctatgtagtcgtaatggaatttattttcctgagtgcctgggcgtgctccaaacagatagctgtgattgtgtcatctcttcttactaagcatctgaccactcactacctgtgcatctgatccctaggctcatggcatgagggctgtggctcttgatgtttttttttttgatgtgcttagtatcaccagaactgtattgactctaagagtatggaagctttgtaaagttaactaacgatttgtaggttttgtgcaaatagccagctctccaggtagagacattttaattctgttgctttttttttttgtagcatattattatattgcagatgtttacttagtatgaaaaatggatataattaagttctaaatgggtactagatattaacttcaaaatgaatttgcaacttgtatgctttgcatatgccgtatgctttgcatatgccatatgctgttgtttccaaggatgtaaagcagttttccacttccaccatcttataaattaaaaccagagggctagacgttatccagcaagggacctacaaaattcgaaaaaaaacttcggatcattatcaggattaagtttgttgaaattgtatcaggaaaatagacttttccttgtattattattgactcatataatgcaactcatactggtttcatattcagaaggtatatagcacctgttgtaatatttcaggttgatttctgcaatctttatttaaaaatacaaatccgcaaagcaaattgcataaacggtatacaaaatgaaatcaccaggcttcaaatatattttatgtaaatgttaagtgctctttagattagcaaaaggaagacaaacattttgattacctctttaatactaaatttttgtttctgaattataaatctttgaagatataattagtgtaagatatataccaatcaacatagtccagaaaaccctgaacctggctgcttattagttggaaagagtacctatttagactttctaagccacagtatgtggctaagtgattaatatgcactattacactttcacaaatactttttggaccaacatattgacttaagggagcatactttgtactaaaaaactaatttgaaggtgaaatcacagcaaatttaacagttcaaccttgtgtatttgtagagttttagttggatcataggataatgacattagctaaagtcagcaagcatgtaaaataaacattttgaagtttaatagtcatttatgttctacaataataaatatttggcacccaccataaccaccactaccaaaatatgtatgctgaaattgtgtctccaggatgaataaagaggtgtaaggcaagctgacacccattagaaaaaaaggtttagaaagggagagagggcctggacttccctaagcttaaccccaacatagggcctgtagctcctgttggaaccaatttataaaacttcaaggtgggaatcaatagattgtttccagtgttatatagttcctctttaatcagttgatcttcaaccaaagcttcaagtggtttttgtttttatttattgccaaaagcttcttaaccaatgtgattataaatgtttaaattcatttacagtgaaatggatttgtatcttccttgctctacagtagatagtgaagcctccgtgacctgtgtaagctgcaggttgaggagaatgtttaaacagtaggcgagcgttcatacagtgtccctggactgcatttccttgcttacagagccttggagctgggccaactcgcatgagcgggaggaggagaggctcagttttgagagccctgggtttatttctggctgtggggatacgagaatgtgggagaaggtgtaaacatagtttgagggaggtcgtagacttggaggttcttgccaggggtaaatgctggctggatttgtttatggatggatttgattatagctgcttcacgcttttacctctggagttggtgcttccaaggggtgatgctcattgtctggatctcctttagtgggcatctcagaattctttgctgcaccaaccacagcatttcttttccctttcttttggtatttgtattcaaatgcctgacttcctgacctgctgtgagggtttttaaaaataatgaacaccaagcttcttgggaaaagacaggtatgtaaatactgcaagcttatagcatttgggggatggagttgtgggattttggagtttgtgacccccatgtgtctgtgtatcactctctctaatgtagagagacagagcagcagttcctgagctctgtcttttgtctcttcatgggttggtcactgatttcccctttcagggtctgaatccctttcccttgcctccccccatgtgggttccggaaggcccacatccaacagctgcccttggtcaacccccagccctgcacacaggtgttttctgctgttcagagctcaggggcgctgtccagccagctgatgacagctcactggtggcgctggtctcactccagtgctggctctgccctcttggccctgttgcttcctccttggaggattagtcaccccagtcttggggcattttacccacctgtatgactagcacacattgcatccacttgccaaggagtgttagggatacagtctcaagaaaacctgcccagtagaaatgacttcctctggagaaatttagatgataaattccatagggagaaatcatgttttattaatgagaaacaaaatcgtgcactagtgggagttcaggctcagaagccagtgcatagtccagcctggcgacctggcatggtgtgttaccctggccaaagctccccaacctctgttcatgatttccctctgtaaaatgggaataacaatagtatccatttcttttgggtggttataaggaatacttaagttaactcattcatgtaaagcacttgaatagtggcttgtatacagtaagcacacagtaaatgtacattgtcattgtatctttgtacctcaacatctgaaactatggtttatacatagcacatactcattcatgctttgttgagtaaatgtaatattcagaaggtgggaaagtgatttccttctctcttatcataaaataagagttatatttggttgaaataaggcatcataggcctgaagacatttactccctggctgctggcaggggagtagaatgttccaaactctatgttgataactgggtgcctatgatttgttaatcatacctaacaaactcagtctgtcaggtgtttcagtaaaatttactgactcccaaggtaattttgaaaggacaaagccatcaggtgatttgttttcaataagcattattgggatatttcagactccaacatgtgcagtggagatattaacgagactttaccctttctaaacttaggggcttactctgcattgtaacgtatgtttgcttttaaggcgatagatgggtagatagatgctctgtaattgaatagcctactgggcttctgtgtagcacagcactgtgtaagtcgcaggtgttcagtaaatgtattttaaatcaatgagtaattgatgggatatttttcttcacattacatcacattgaagatgcttgtgaggaagttttgttcatgattgtcctcctaggcaggcgccacctaacatgtttctctctagctgcggggtattgaatttgaggctgctctcagcattactgctcatctcaaagaggaacaaatggtcccccaaatggtccagatgcaacagtagggaaaggagtgccaccattcattctgaggtgcctgggccatactctggatgaagctcacagctctaacgtaaggcggtaagtcattttttttttaaacttaaggaagttaatttgaaagtttatgctgatgccatttcatatgacagagactaaagggtatacgtccttgtgttctcttggtggggactgctgtcctaaaggtaaaagattttgatccagaggttggattgttcctcgtgtggcaacagtcctctgacctcagtcattttcaaagtctaatgtctttttggctaacaaaagacatcaagctagagattaaaatttgcagaagatgggagtttttttgttgttttcggttttttttttttttttttttgagacggagtctcactctgtcacccaggctggagtgcaggtgatcatatctacaaaggtgacaagaacatgaacctgcagtcctgttatcagcattttgtaagtgcttcttctcattctaaaaatatgtattgattttaaaaatgaattctgtaacaggatagcaacagtagtaaaaatcctttttatggagaaatttagagctttcagctaacatacacacatactcattcaaatgaaacagcttgtcttgttttaaagaaatatttctgttgtccattgtacaaattttaataacttgtctttcctttttttaggtctctgtgttccagatttttttttgtaactatgaaatccttgccttgtagtcaacttaaaatgaaataaatttatcagtgcaaatgagtacactgtggttcttgtgtggcaaaattatgcaggtggtttgaaggattcattgttttattaaaagactagaagaatgtacaaatgctttccttctttctcatgtttctctcacccaaactgaagtggtccatttaaaatctgatcttcataaaaggaagagttgtcacaggacatctgatttatgagccatctgatttgcttctgctgtagttccacactctgctggggtacaaaaatcaggcacttttatttcagccctgacaacagtgcggccttcccaaagtatgagaagagcagcgtgcagaggtaatgtgcagtcttccgaacagagcactgaactggtttttaatgaagggtaatatgtacttggggtccaaactctagttaattccggaaaacatatcctctcactagtgttgggtcttagtaaatgagtgttctgtgttgaatccttgcttgagaggaaggaggtcataattggtcagggattctatttctttctttctctcttttttttttttttttttttttaaagaaaagcaattgcttagaatgagatgaatctatatcagggtatgtttttgtaggatcatattaatcatcttacccacagactgactttgtggtcaaactttactcataaggatttattaaaagcaatggtttggttaaaaaaaaaaaaaaaaggtatgtttatgggaggaatgtagacatttagttgaagtacagttgatagactttgaccactcagggatattttctccatggactgtcttacagaggcagagcctaactgcatatgcttcttatgactctgatgcatgaatggcagccctaaatgggctcctcttcacttattccttctccccaatctccccagcactgtgttctgtttccttccctgcaagagtctgcgtttatcagtcaggtactcctgtcctcagagtgccaggccagctctgcatccttctccacaagaccaggctgaagtctgcctgttcacctgttgatgctacacagtttgagctcaagctccttattctttgccggcttcccttttttgagttccagtggagtggtactcttgtgtcagagggattcagcactgcccactatgtcatggtactctgcgctgctcctcttgggtctggatggggccacagttgtccagtcccatcatgctgcagccctaagctccagagggtgaccttgataggatgcacatcctggagcttaatttcataagccttgggggcctgcaagcaggaggagttggaagcccttgagaggccagatcctgtgggtttgagcgcagagtctacagagttaaaacctgcagaacaaagaaatcaaaagaaggacataaagaaagtttgggagacattgagtctgcaaagcaaagaaatccagtattgcaaggggaagattttgctttgggaggttgaagttttgtttgccctccgaatgaaagtggtatttctgttcgttagccaaaaaatcatcagactttgaaaatcagtgaggtcagaggactgttgccacaccaggaatcagaattgtggcattggaagtttcttcagaaaagcacctttaggcccgcccaactttacagattaaggaagtgagacccataaaagtttgtcatgttctcttattttaaaagatatctcgaccatgtctgcagttatggcctctttttcctgcctcacccaaaggggtcgaggagctttctcttgcccactctggagagaactcctggggcccccccgctgctctccctgccccatgactttgtcccagaatacagaacacagtgggctggatcagcctctgctgaacttttccctgccagcctccctgcccgccttcttgcccccgcccctaccccccacacaggaatctagagccctcccagtggtggtgtgaagcctctggaatgtggcactctgacccctggcagttgagtgtcctggatggacctggcctgggaaacaggaaggactcgggggagggggaaggagtgccccatggccttgaggtgggatggagggaaaggaaatgctgcccagcgcggccccacaggcagctcccgctagactcccacactgggggcggggctggcagggcagggagccggcaggtttcctcagaccaggcctgtgccccggggcctctggcagagccaggctcaggaaggtgaactgccagagcagttggggtgaggaggaaaggatgtgaggggaaggaggaggagcaggccagaatgcagaagcaattgtagtaggagaggacaaaggtgatggatgagaaaaggaatgtccagtgactgtgtggactagacacacttctcactttagaaaccaagtatattagaaagcggaaaagaccctcctaaagaaacttccagccaggtgcagtggctcgtgcctgtaatcccagctactcaggaggctgaggcaggagaattgcctgaaccggggaggcagaggttgcagtgagccgagattacgctactgtactccagcctgtatgatagagtgagacttcgtctcaaaaaaaaccttccatgccatttttattttagagtaaagcacaccccatttggataccccagtgctttttaacatgctcagccttggcaaagatagggtcactggggttagtgaaaggggtgggtgcacatgcaagtgtgaggccaactgttactcacctgtccctttctgttttctttcattggtggacccacctggaccacacttgggtctgttacctccctcaaagaggtttccagaaaaacctgaggacgtgcctcagggtgatgatatgcccagcagctctttgctcctctccgggattagggaaccttgtatcctcaacttcctcctaattaaagcctttggcagaatcaggatgcagaaccagggcctggaaccgcctcagtaaacccctgtggaaccactagcagatcatgctgtttccaaactgcgcgtgttggcaagccagcttttcactggggatgtttaaaattaaattccatgctcttgggaaaggaatagaaactataggcagagtctgtttctgaaacacctgttttaagtggaaagcgatcctaactgctgccatacctgaagggcttgtgtttcctgtgcagctggaatctctctgtgctgagtaaattaacttctgtgcccagggtagtcttgaatgataattagtgctccgtggccatgccacacatcctgtctgaagcaagggtgctaataatgtcctttcctctcttctcacaagacattatatgaagtcctaggaatagtggtcctggtgctaaatagaaatgtcgtggttatggcactaatttattgggcctgccagcccaggtgtgcagcatccctttcctccacccgattgataagacaccaggtgaggtccagtgtgatgctccaggcagtgctgcagctgagttggcctgtgtctcctggctcaaggggtgcatcttctggtctgccttgagaacttaccagtcttccataaattggaagttcaaagcaatggaatgaacaatggagagaacaagcacatacacataagttaaaagctgtgcatctctgtatattctaatcctttgaaacttggtgatcattattgttcattacataggatatggatttgatcagagcatcctttgggagttgtctgcatttggtatttccttttatatcctgaaagctgttagttcttgaaaggtgtattgaacctaataaaatagtaattagaggtatttccacaaattgtgagctttgtcatttggatagtgtttttgagacttcttttccactctaaataccaactttaaatagaataatatgacagaattatgatcttgaaaaatttatctacttaactgcatgtgggaatacatatttctgtagcatgtggaaaaaggactgagtgatgcatacctgttatatttacattttcttttggaagcaaattattttctacatgtgtatgtttatgcctacatgtgttctaatttgaaatgtaaaaatctataaaaaatttttccttgactgctatgttttaaaatatctgaaagttacctgcttcctagtccttggaaggcctgaattattataaagtttatttctttgcatctcaatcattcccaaaagattttaaatatgaatgcataagtagtgaataaacaaacctgaaagtttgatacctacagaacatttttaaagctgcttctttttttccatgcagtattgttagtagagtataatactagttatgtcgtagagcagtcacttactcatttatttacttcagcaagtggatattggggcctgctgtgtgttcagcacagagtgagtatagaaatgagggaagcagtttctgctctcaagaagctcagcaatgccttaggataagggaagtgctgggggcgggtgtgctggaaagagagagggatgggtggaagaaaattgaaaatcagacttctttgaagaaaagatacttaagctgggcacactatggtagtagcagctttctaggtagaccggaggaaaaaaaagtgttcctaagcagagaaatgggatccgtaaaggcccattggagtgaacatgcatagtatactcagggaatcagttgattgagtaaatatttatggaggccctactatgtgctgagccctgttccaggtgcagaagatacagcagtgaacgagacaaaaattcttaccaactggagctttctgatagacagaatcagccaaattagtaaggaaaacatacagcatacaagaggagagaagtgctacggagaaaaataaagctgagaaaggggacagagacaaccacagtggtatctggtttgcagttttaatggtctgccaaagtcttgccagaagttgaggttgattgaagacctgaaggtgtgctggagtgaaccatgcacacacctggagtaggatgttccagacagagggaacacaagtgccaaagccttgaggctgcagtagccggggaagggaagagcagctgtctgcacagtgggaggtaactggacggtcagctagggctaggcacaggcctcatttatcagtgtgaggggtcagacttgaccctgtggtcaggagagtgccatcatagatttatagatacggcttgtgctgtcatctctgggacccccaaagtgaggacccagtgagttggagctgagtgtctgttaggtatagaggtaagatactacacaaaggaaactcagttttgtgaaaaacgtgtaaatatgtttttcaaacatgttcttaagactttttaatctttctatgttcttgttgtctggtttatttcccatgaatgttagggatcagatcactgctgtgtaaataatagtccacccaaggtattcatatgcatttcttgacatggcctaaggcaagagtcctgctttccattgtcccctaatttatatttgcttctttctggagagttttaaaatgaatttcaagggcttgatgcctttaaaatcagtggatcaggccctgtgttgcgagatttcttaatgggccacagttgtctctgtgattctcatttccagtttatagcactactgtccacctaaacatacactaaccatgtggatcttaatgatgttttaagaaaaaaggttttgacatacatgccagacttccacttaagatgaaactgggcaactaggaaatggtatgccgtacatatgaagcactgtttattgaatattggtggcaaattttgttttgttgctaggaccagattcttggagtgtgtagtaggaataaataagaccaaacacaatcttgcttcactgaaaaaaaaaaaaaaatcaaaggtttgggtttttaggcaagatatttagggaagatatttctttgtagaccagtattagagttaatggcaaggatcagtagtataatcgttggaatttatgtcactctttcatttatcttccacttggtttattttgaagacttcagataaattattaaggtaaagtgcataggagtgctgaagttgatttgtaaaagcattccttgcaaaaatgattgctagctgatttcacaaagttgttatcctgaaaagattccttattgcaacttccagatcattacaccttttaaaaactattatttgcttttcaggagtattgctgtatatgaaggtcttagcaaagaacctctcgttttcctcgatgatagattagttgagatcatgtttatattggtgggttttcagttctgatggctctgcagctctgttccttggctgcaaggtgtcatagaggggcctctgcttgtcctggtggttaaaggaccatcagcaggagtctccaggccgtattactggagacggacctcaccagagtgagatgggagaattagtggtgttcctgtccttcttttccctgatgctcaggtcttccggattgacattaacttgaaattttgcccagcctttgactacctcactttcctgtttcttcagctcctcatgtcccctgctgggtgacagcctatatgggatttagacctaggttgctcagcttccctcctcagtaaaactgatgaatccatggagagtgcttattccagtgtctggcacatagaaagtgctcagtgagtgttagctgttatcagaagattagtctcagggggtgaaatgtgctttattatctgtgctacctcttcacctagtataatgaaaaatgtatatccttcacagtgcttattttcagagcaccatgtgtatttaattgttagaaggtctagtcacatttcttttcactctagtggttcacacttttggatgtgtgcaattcccatacctagtcttctggtttactcttggtgatttgactaacagattttaggttagagcatccattaatatttataaaatggtactgtgcattattcatgtcctcaagtcacattctggcaagaagcattaacgtgtgtcacattatctaattattgtcataatacacagaagtggcaggaagggagattaaaagtttattatttaagttattatttatttatctaacatggttgaggcatattatattcattcactcttttgacatgtcataaatattgatttgtggaagtgttgcttgatacagtattgaggttaaaataaaacttgcgctaatattaatatttcacaagtaggaagactgagatccaaagatgtttctctgttatttctaaataattgactttcttcctctaccaacaaacttactttccagaaaaagtttgctgctcaaagattcacattgctttgattaaattcatgtgctcgtcctctctatccctatttattccttctgcaggtatttattttgctaagctactatttgctaagccctatgatagttcagtgatgaagagtaaaaagtagatcgttagtttcaaagaacccacttcgggtaaaggagattagatgaacaatttcattgtgctgctgtaagtgaagtaattttaatagatatgcagtagaagtcctacactggaaatagtacttaattcagtccctatagagtggggaaacctaaaggaagtattaaccactgaggagaagtttccagtgcagatgaagagaagtagctttctaggcagagagaacagccatgaatgtcatgaaacaacatgggacattcaggcaattcatagtcactaagtcttactggaggaagaggaaggcatggcagagatgaggttgaagaagtttgctgggatcaagtctaaactggctttgtgttattccatgccgggtactcaaatgactgcatgttggacttcattttgtagaccattgctttgcaactccatatccttaagaagtttggttaggctgttctcttaacactccttgctgggtgttacttacattaaagcacctctgtaggaggataaaacactgtgaaccaggtatgtaagagacagctaatgacctggcttaatccaaggatgtctttttagagtatcctgatgaagagatcaaataggaaataattagacatttctccaaaatacttttttcctcaaccaagatttattaatttttaagtaagagtatgtttgataactgaaaattgatatcctttgaagctggataaacatgcagttacattttttactggacattcaagttcagagacagctgcgttgcttaatcatggcatgtgtctgaatagaaggctgatctagcacagcacaaacatggaacaggggagaagacctgagattttccttggaaactattggattttactctcaaagcagagggaatataagagagttaaggtctgtgccacaaagtgcagctaggaaaacatgtaaatgggcattaaatacctaccttggtgatttaaaaaatttcggaaatggagccattcagtgtctaactttgagtaacttcctggtaaaacctcaaaagagaaagtgattgaaaaaatagacatcagagtatctggatgagttaacatgctgtgtgagactactcattaaaagccatttataagatgtcttaataatctttctcaagaaccagttttttaattttgttaactgtttttgttgcttttactttctccatagatttattatttccatcctccttgattctttggacttactctgttgctcttttttcaagttggatgcttagttcattctttttttttttttcagcttgtcttatgccctgtgaaatttccctttaaacactgtcttaactgtgtccccatcaatgttgacatatggtacttccactgttcttcatttttaagtatttggtaagttccctataaacccctcacattaaaaaatctttttattatagaaacttccaaatatatacagaagtagagacagttgtgtaatgacagagtgcttcagcagttgtcagttcatagccaatcctgttttattaaacgagatttactgagacctcagctagtaaatcctctaagaatggagatactggaaaggtcctggaaagtgatatttattacattaaaagacctttggcttgccttactctacatagtgactttgttttcaaaacaaagtctaattggtctgataatggaacattattttaaatttaaattatgactgccataggcatatgattctctggcactgtccccaataaattgttagcattgtacaatttcaataaagatgctagaatcaaacacaaggataaagtctaaaggggcctcatggattatccattctatgtcctttttgtaattaaaaaattggagcttagagagctaaatgccttgtttggggtcctgccgtgaatgagtgacagagctaaggttgtggtctcctgggccaaggtcctctccattacaccatccccctctgggctgtttcttcgtatgcagtttaagatggcccctaggttaggcagaactgtgaagtaggagagttgtgtcccgtagccccaatttctcctgtccttatcatttcttgtttcatgaaacatgaaacatgaaactggtgcttctctgttagttgtattgctgaggtgtatgatgaaaagtacagcaatgggacatatacttaataacaaatattttgctgtaagttgatttattatattggatcagtactgcttgtttttcagtgatttcctcacttggacataatacaaatcagtgttcttgttgtttgttatacatttagacatttacatcagtttaaaagttagtcttcaacaaatatttgtgtccacactttagtattccattgtttgaaagattcaggctttgtccactctggtttatagttacatatgcttaaaattttttcactttgtggaaatgtctgtaaaatacatttttgtaacatgaatcatttctactgataaccataaatttgcccttcctgctttgcactgattgcggcacaaggaagagaaagagaaggaagcaccagctttgggaacataggccttaagcttgaagcagagagaatgaaagcagactgtattagattcctcctcgagcagaacggaatgcctgataacagccagccaggagctgggggagttaagagcagcgattttacattacactggagtttttaggctggcatgaaaagagatgccagtattagctatttgcatcttcctgtagccacagggatatgtgaacagctggagaattaatttgatatatattcccaggagcttctcttctgccaacagaattccattactgtgagcttctgcgtgtgtactgtgaatttgtttcttgctttttaatatctgctatagcatatttctggtaagtggattgccatataataggatgcagccatctcttggtttggagtaaactctattaacctaaacagatacaaggtggaaaaggtaagaatctgagcatacaaatgccttccaccttcaggctggcagaaatttcatgtgaacacacagtactttgtccagtacgtgcactcatacctgaaatgttttgtttcatgttagtggaatttcacacaccagcaagcagatggaaagatatgttgaagagcatagaggttgaatccaggaccactcaggctagtgttgccacagctcgttcctgtagctccttagcacagggggctatatctgctggagctgcttcttcacatatctggtgttcgttatgcctccacacatcttgtaagaggcctcatgcttcatatccttctcagtgcccactttcctgccctcaggatggaaacttctctccaactagcctttgcattgaaaatctttcatgtcaaatgtagaaggaaagaatttcaggcatcaccgagaatattgaaagatattcttagaggagaaagactaagtccaggacaagactgaatgtagctattggaagtacaggtgtttcctgccttggcaatataagttgttcactcttataaagcaaataaaaaaacctactcatattctgcaaaatcattcattacactaaaaataagagagctgttgggaaaaaatagggttggggaaggtcactcaagacctatgcatctgtgtgtatagaggataaatgcaaacaataagaactcaaataaaaatactggcccaggtgagctgtccctggcatttatttgcacctggatctctggtagcccatgctttgcagccctccacactccgaagctcattctgcctcctttcagggcacggggtgttgaagatacttacttttcatgtggaacggtgttaccagaattaaacataacatccagtagtttcttcatcattgtttttatgggggttttttgtttgtttgtttgttttgttttgtttttagtacaggggcaagtgtctccagccttctcatttctgcttgcagtttccccagatagtttaatacagaggacattttaaccacgagagcagtcatttcttgcactaaagaaaggaatttaagcaaaattttcagccttttcttcaggtcttccatatactggtaagacttaactgtgagaaaacttgctcctgatacttatttttatttatttatttttttgacagagtcttgctctgtcgcccaggctcaagtgcagtggtgcgattttggctcactgcaacctccacctcccaggttcaagcaattctcatgcctcagcctcccaattagctgggattacaggcatgcgccaccatacccggctaatttttgtgttttttgtagagacagggtttcgtcatgttgcccaggctggtcttgaactcctggggtgaagtcatctgcctttcttagtctcccaaagtgctgggattacaggtgtgagccattgcgcctggccaacttttgatttttttttttttttttttttttttttttgagttggagtcttgctctgtcacccaggctggagtgcagtgacatgatctgggctcactgcaagctccgcctctgggttcatgacattctcctgcctcagcctcccgagaagctgggactacaggcgcccgccaccacgccagctaatttttttgtatttttagtggagatggggtttcaccgtgttagccaggatggtctcgatctcctgacctcgtgatccgcccatctcggcttcccaaagtgctgagattacaagcgtgagccaccgcgcccggcccacttttgatttttttagaacattaatgtgctgggaaaaatcacatgagaaccagcagaaccgctgtattatactgacaccattttcctatttaccagttacatattggctaaatcacattaaagaaacattcatttttatggttccacggtaactgttagaagaggtacccagcattcttttgttattccttggcctaggtgtacctgcaggacatgctctttagaacagcagttctcaaagtgtgggctacagaccgcttagaagcctgaagccctttttgggtggtaaatcaggtcaaaactaattccataatcctattaacattttatttgcttttttttctttttccactttgcactaatggtgcaaaaaaaaaaaaaaatggtacataaaactcctgatactttagtatgaatagaggttgtggcaccaaattgtgctagtaagttactgtattcaccgtgtactttcagtaaagcaaaatggtaaggaattaaaataataaaataaaaattagtttccttgaatgcccttgatcgaagcaatacaaattattaagtttattacatttcagccctcaattatacatcttattaatgttctgtgggatgaaatgggaaatacacataaagtaattctgctgcatactgaagtacagagcttgtcatgagaaaaagtgttatatttcaagatgtcttctgaacatccaagtggaagtgttggtttagcagtttaatatacctggcacttcactgtagtactcaatattggacatatttgaacatatatgaatttgaatatatttatgaaattaggtttctctcttttatacttagagaaagtaacttatgtaatatcctaatttggtatcttgcagaaattataaacttaaaaatacatttgcagaggtacctcagttgtcttcacctttcaggctaggagactacatcttgtcacatttagggtaccaggaaaaaacctacttcatatagttaaaaaccagtacctctgtttttaactttttttttttcctgaccagtccaaggagaaaccaggagctatgttagagaatcagaaccttgattcttgtgctgtgtatgtggatttacttaggaaaagagagattttaaaacataatttgccaactgctgttagcagaactcttgggctcagatttgatttccataatccaacctcattacatttttgctttcagtccttgttgattttgttaaattattttaaaatatagtgttctgtaattgaataccagaaaagcatttgtctcagtagcatgttgtacttgatcctatgaagcggtggttgctagggaaaccatttcccaagaagaaaaacaaagtattgattaggagcgggcagagaattgaaagagtttactctcaaaaaaaagaaaataaaagtgtctacgatgttgttagctttagagtcagtgatgcttcctggctgaacatagtggcagcaatgtttctgaggggaatggtcacctttacctgagcatcttcaggtgagtctgctgctgctgccaggaaacttctgctgagaaagcagcagaaaacagcaaggggccagcggcctcatcaaaggccttttagctgtgattccagatttgagggaaatggtcttcctgtggggaggcagagaaaagcatctggcagtgaaaaccaattagctgtgagatgggctgcttggaaggactgttgatgccagccaggtgataagaagttgaagtcttagagctgaacggggggaagagagtaatgatagatgatgcctagtgagaaatgtgcccagtattccaagcatttctttgaaatgtgtgcctcatacagtgctgtaatgataagcttttaaaataggatttgtattgtttaaacatgttctttatattatcttgaaacatagttttccttgtgatgttttgtatatatgtgtgtgtatatatgtatacacacacacattttttaattagacactttttttgttaaagacacaactgcattgaccataccagtgacatatatgtgtgtctatatacacatatatgtataatacatatatatacatgtgtgtatatatgcatatgtgaggcttctttgtctaccggggaattatggcttacataaaaccactatggtaggggacaacaggtctgtgcagatgtttgcgggagcatagaggatggagcagcttattctcctggggcaggtagagaaggcttctcaaaagaggtaacatctgagctaggttttgaaggatgagcaggagatagcagaggaagaagggaaggaggtattccaggtggacgacactcccgagtaaagcatgggagcagttcctgcgtgtttctggtaagagcctcaagtgtgcctagagcattaggatgtgagagcgactggtgaaaaatgagtctgcagaagtagctacaagccatgccatgaagaagctgatattcagcagtaagaagctgggacattttcttattgccaagagagaattactgggcaggtttgttttttgaggaagatggatctggggacattgtggggaatgaggtggagagacaagagaatagtggcagggagccaggttagaagacattgtggtaattcaggagagtggtgtcttcagggagttccagttagaatggtgggaagggatgtttactgtggaaaaaattctgcaataggatcaactcaataactgcacatatttataagaacagtaataaagatttcctcttaaaactgtgaaggaaaggaggacaaatatacatggcttccagtagttcaaatgttacttgaatttcttacaagttttttttaattcctagggctaaactgcctttcagttataaatttgcatatgtagtcacaaaaattccttcatggcaaatctgactgaactgtagtaaaatgctagtactactggcatgttaacagttaaacagataagaaatcacttggatgcacattttgttataactgaagacaaatatcaccttcttttctatgttgaattttttcaatatggtgtttttcttctttttctgattttcctttcagagtactttactaatttcattgttgtcttgaagataggaatgtacctttatgtgtctatgttatatttgtgtgtgtgtgtatgttgcttctctctgtctatatatataaaacatatatatatatcttatatatgtatgttgtttctcagaaccaaatttaggctaaataggagaacagattttaaataaaacataaattgtgtgtcggtataaacttcaaatctgaaagataatcattttactaaaagctgaggctttgatcaaataagtgagcctgatctcctgaaatctaaaacaagagattttctattctcccttttcaaaggaccgccctgaagctctttatgtagtagatgacattcttgtaacgacctcttgatgagaaaattatttatttcagtcaggaagagcagacttttacttcacttacgtactgagcaatgatgccagcaataaaagcttaccctataaaaataagagccatttgtttgtactgtcttttttttttttttttttttttgaggcggagtttcactttgttgcccaggctggagtgcagtggcatgatcttggctgacgacaacctctgcttctctgtttcaaacaattatcccccttcagcctcctgagtaactgggaccacaggcatgcgccaccatgtccagctaatttttgtatttttaatggagatggggtttcaccatgttggccaggctgatggccaggtgatctgcctgtcttggcctcccaaaacgctgggattacaggcatgagccaccactcccagccaaaaacagatttttaagatggcatttatacctgccttagtttgagcaagaggtttaaggtttcttaaattcaggtactttaaaaaattctcttcagatatgcttatcagaaacatgtttactatgtaacagtcagttcccatttcaggtgggtaaagtatctgttaaagataatgttaagtgtgaaaaaaccccatataatggcccaaggattcacagagagaaatagtctaatttcctatgaggaatattatgaagaattgagcctgcatatgattctgtcatattcattgcattttttggagctgagtcccatgatagctctttttaaaatcgaccttatttattgtgacctgctccattccatgatcagaacctgatttggtctcagcctttgtattcagttacctcagcctgtcactaagctgcaccactttagtttttttgttgtttctggctttgggttggcagtgatggatactatcagtctccccaaacgcattagaggggatcccctccattgtaactcttttggtggtgtctgatttttgatgttgattattagctgccttaatgtagtaagttgaagagctgttttaaacctgaagttggtctctatcaatagagtaaaaaattagctttttaaagagagtctcaccctgtttcccagaccggaatgcagtggcgtgatcaacctcgtgggctcaagtgatcctcccacctcaaactcctgagtgctgggaccacaggcatgcacaaccattcccagctaattttttgttttgtttttgtagagactgggtctcactgtgttgcccaggctggtcatgaactcctgggctcaagtaatccccgtgccttggtctctgaaagtgttgggattacaggcatgagccactgtgcctggccaaaaaagagctctttaaaaaataattttgtagattgacaaatgtgactcttgtaattttattgaacatgaaaaaacccaggaatctttatttgatattaaacatttttaaaggcatctcagttgttgttgtaataacacattaagagaagtagtggttttttatttccaacctttgtgcatatagctatttaatgcctacatggatggctattatttcacttttttcagttattatgaagagattgggtttcattcatttgtaaagtttcagccagactgcctttcacaaattgatttgtcaaaattgaatgttaatcttgacatcccagtgcgtttttgcccgcgaacaggcctttgaatgaagctgcaaacacacattatctggttgttaattgttttacagatgagaactggactgatgaccaactgcttggttttaaaccatgcaatgaaaaccttattgctggctgcaatataatcaatgggaaatgtgaatgtaacaccattcgaacctgcagcaatccctttgagtttccaagtcaggatatgtgcctttcagctttaaagagaattgaaggtaagcattaatttttgttaaccatccagtcgtaagccttagcattatgtaaccctgagtagtaatagtatttgagcttgaaaaggcaaagacaagtttacagagagtggtagtttgtataatcccaactaagatgcataaagtttaccaggtgcttatgtggtgggtgtgtttccgagacgctatggaatggcggtgctgtggtggtgtgagcagggccctctgtgccagccctcctaggccacctctgcataatggatgatttcacaagcggtgtgcttgagatcagcatctgttgtcaccaggtccattctgtttgatttaccgtaggatggtgctccatgaggagtctgctaattagaaatgcggctcatctggcatgaaagagttatctctttagcagaaatgggagaattatgcagtgatgattgaaggcttaggttggttttgctggagggcaggaatcacatagggcgtggagggatcattaggctcttcacctctggagataagtcagaaattgcattcaagtaacaagaaaattatactgatatggctcataacttttgtacattcatacatacaaccaagaaaaaacttcaagaaattgaatatatgactcatcaccacagtaatcttgagtgaagtacccagagcttggtgccatggctcatagccaaaaggggtaaagcctgggtttgggtctcagctctgccgctaaccagcattaaactctcgtagccccagtttcttcttgagggaaaaaagtactgaaagaggcattcttaaatatacctcttatctctaaaatgatgtcgttgtaagatggagtgattggtaatataataccaaggattcttaaagtccaaaaatcaagcttataagggcagtaaagcaggactgaagttttggaaatgtacttagtttccaagttatattaaatggtaaggaagaagaaatttgcagtagcctacaaaataacatttctctttgtatttaccagtgctcctgaatcattagaaaagaatagagtagaaaacaatagaaataacatttgcgaattgcagaggatcctagagaacatttagtccagtccttgaacttgaacactgggaaactgagtttccacgcatttgatgagtatcagtgctagtactaatcacaccaagtattcttcctgtcacatcatgacttaaacaatgccatgggttacctaactcatttctgttgttcggttgccctttgctccccacacccattgcctgccacaaaagggtattttgccaacttcagtatgtaaacatttagggatatagatgacgtgatcacatgtctgtttacatagttaataatttacgcatacacatttaaacttactcatataaagtcatacacaatttagaatcattactttttgctattcttacatttcaggaagctgtcctaaatggtgagtgcgtcaccattgctgtcattgtctctactcaggcccccttccaggtcatttaatcccctgctcctgaacatgccctcttcactgccacctaagttgtttgagatgcagcagattttgaatctaaggatgatgctatcccaggaagttttgtcccaaaacccagtgtctcgtcacataaaattaggacaattgcatttgtaattagttaggcgtgtatttatgatctttgcaatgtggagattgacatgtggagattaactttattgatttttaaagtgattctaaaaaggctgtttgtgagatccagcatttccaattttgagatcattcccacaggaataattaccgtatctgattgaatttctttacttgttattttccaacttattatttcagatggcttctatgtaatccaaatgtggaattagttgaggtcatttaaggttaatgtatcttctacaaacagtgctttgttattcaaaataaagtaccaggcagtatgtgagatcttgtaagaagtcaggattaggggatttcccttttctgagaaggaattttgaaggaaaaagcatacttatattcaggtatatattgtatatgaaagaattagtgatgaaatcatacttaataaatagtcacgtcgttaatagtgacagagacttggaatgctataggacctcaatgccaagaaagtatgatttggaattgtgtgataaggtatcatggagggtagactgaacgatttagaatagtgatgatgatagatttcagaagtgaggccaacatggacgaaagaagaaaatgtggaagtgggaatctgcatgacttacatggaatacacttgggaaactggtctgaaagagcagagttttatgttggtggacaataggaaataaagattggagggaggataggaccagattatgaaatgtcttaaacattgtgcaacaagcttaagccgggtaatatgagcaatcagaaatcattataggtttatgaacagacagaatcagaaagaagatggtgaagtcaacattaggcagactttggttgtggtggaatgcaaactggattagcagagggagataatggcagtcaagaggctcgttggagagcttttcagctgtttagatgtgttaccacaagaaactggactagagtggcagcaggaaaacagcaaagaagagatggatatgcaccattttgatggaagaacctacggtatctgctagcaggaaagggaaggatgaaaattacacaaagatgattctagggtttctaacctgaaatagaatgatagtgcaagtaatagaagtaggaagacttttgaggagtctcgtgataaaatggtactgaaaataggggtaattattttagggcaatgtagaggtcaagaagagcttaagaaaatataggagatactacagcatgtttggatcatgaccggaatgatttagtaagaaggaaaagccaataatgtaagaaaggcgattgcaggagcaaagactttaaggaataaaaaggacaaaattgtttgtttctcagggaagtataaaagaaggtcatcatctgacattgagatggaagaaagggtgtggaaaatcaaagagaaagaggaaaatgtaaacagacatctttaaaggagaggacaaatgaattaactagggaaatgtagtagggtcacctactggtgctgacagcttacttgaggttagtggttatgcctttgaaaagaggctggccagcacagttgcgtgattttctctagttcttatgtaggtgtgcagtttaggtagagaggtagccggttgggtattttcttgaccattctggtagaaagagagagagggagtcatggggattgatgattatataagagaactttatggtgattgaccatttaatctacactgagaaggagacaaaatcagggagtcagtgatatggagagtagaggggaggttctagtgggattgaagaattaatggagtgagatagctaaggaagcaagtagaaatgaatacttgaagagaaagttattattggttgtaatgagggttagaaattactatggatgatgtagttgattgaagaggggtgaagaacaacatcactgggggtgggaggtcagataggtgagtcaggatggagtgcctctaccaatgatgaagatgccaaggaatagtagcagggaagagacatggagccagaggttctgcaggtaaatgccacacctccgtgtggctggtgataacctaattgcttatgcttcaagtggagaaagttttattttttaaaggggaaaaggaagaatgatctttaagtagcagtgagaacaaagaggatacctatgccccttccaggatttatggaatgtgggagataaagccattcccatttgagaagacttcaagggaaaaagagtaatcaggtactacctaggtttcaatttacacaagaaggtgaagggaacatccagatggaagaatgagggcagaaagaattttgttgataagctctagaaggcacagaatgggatttgggagggaggcttgtacagggcatgggtgattttgcaaagccaggaggggttaagagtgcagtgatgatggatgacctggcgaatttagacttgctctcgaatctcttacaggaaggtgaatagtctagttaaagcctccttttagggactcttctttgagtagtttatagtattaagggtgtgcagtggtggggatagggcaagcagaatggtattcttggcagagcataatgagaaaacatgggtctccatttctgtgtttttggtggtgatgctgaaaatgaattcgaaatgttgctataacattttttaaaacgtgtggaagtcattgcaggccatttcaatgttatagacttatggagaatactggaaatttctgggcattgaaaaagttcctgtgtattacttatgtttgtttaaaaggagttggtcctcaattttactcagtgttttcttttctaaaatacttgaacatatcaccataaaatcagtttgttaaaaatataaaggaaataggatactggataacagtcagccgtggcttagtgcagaatagtttgtcagagtgatctgtattttctaaggaagaagtctgataaagggaatgacctgcaagttatcccaccttgatcttaacaaagtttatgcttccgtgccttactacttattcatcagtgatttgggatatgttagactgagcaccacaaaagttaaattagtgcaccatgggcacatcagtttgatgcagtagtaaaagcagtgccagcctctatagcgccagcctctgcagctgccacaggtgtgttctaggggtctctctgggctcagtggtcataagtaatgtcaataccaaaggtttccatgatgcagtgaataagttgaacttttaagtttgcctataattccaagttgggtacatggcttttaaaaaaattattgtaattcagtggtcataattcaagaattaatcagaaatgtgaaaccatgccacatttggtgaagaatataaaacaccctggaaatcattcatctgtttatttcatccagcaagtatttatgaaatgccagatacatacgtgacactgttgtagttgttgaggatacagctctcatggagcttaactccaaagggggacttggactgaagtcctgccaccggaactctagcatggagacactttcagctgtagcaagaaaccttctgccatcccctaagtacagggaagacagaggctcccagctctgtgcccacccacatttttatacagggctgaaggtccatggggagcctgggtgtcatgcaccaagggtgtctcctaggtttctcaaacttgagagagcctgatggtcacacaggcagtaaatacataaataaacaagaaaatagcatatggtatgataaaagctttggaaaacagtaaccagtatgctgtgatagagaattacttggaaaattgctgtattcagggacctcagggacatattctatgaaggaagggcagtccaaactgaaatctcaaagcccaaaggagtttgccttatgatgacctgaggagagagaattccatatggacggaacagcaactgcaaaagctctaaggagagaacaagcttggtgtgttgaaggactagcaagaagaaacagcgtgaccagaatgggggggagggaggggtaagggccagaccacctgagcccttgtagaagatgatgagatgtatggattttgtgatgagtacacaggaaagccattaaaggattgtgagcaaaggtttgacatgatttgtcttttaaaagatgaatatggtggaaaaagagactggttggggtagggagatgtaagagtatgaacagagctggctggtaggggttcttttagtagttcatgtaagagataatggggactcgtacctgagagctggagatgaagagaattaggtgcattcgagataccattggaaatagaattagcaggagttgttaatatggatgttgagggaaagagaaatcaaagagtactcttcgatgtggagtttaagcaaattgtagtgccctttactagagggaggaccagatttaggaaggacccaggagttttgggcaaattaaatttgacatccacatagaactatttgtcacaagcaatttttaaatgtaattcagtaactcattaagtagaattcatacatacatgctctatggtgtataattacaaagagatatccctgagaaaagtcaaatctctccagaaaaagttataacctcatcaggagtttgtatagaaaaataagaataacctactttgcagtgatttatcaccaggcagaaactggctgaagaggtgtctgtgttatccataaaatgtgttttcatcattgctgcatcacacatcacatgggttagattggtgtagaatatgtggaacctagtgctgcttgcacagtgaacattttgcaaaaggaggaagacacttagggctttagataattctcctctgttttagctgaaaacgtttggagaacgttgaatggtttatgatttttggctgttttgaattatttcctctatatagagaaaaaatagacaatcaaaaattggcgtgtgatactatacatcattgttttatattgagtggacaaataagaaccgtgttgcattcataagatggataaatcaaggaaggttttgtggaggaactaggaattgggtccaactctgagaaatttgttgattggctcagcagaagggaaggagagtttaagagcagccttggatagaaaagagaggacggacagagaggtacagataggaagatactaaggaggccaaatcagtgggcttcagtggctgattgactttcggggatgaagaaagggaagacttccagattgtgggaggactattatcaagataaatgctggagaggaggtggtcaggatagattttgggaggatgataggatatattgtggtgtcatttattagaatgtgaaatacaaggagagcagctttgtgggaggttggatgaggtaggtactctgtttggttatgtttgaggtatctatggagaatcaaggggaggatgagagttacaggtctggaactcagagagagatctgagctggagataagaatttatgagtcaccctctgagggagactgtggtgtctaatgactttttgagtacataaatgatgtgaggagtatgagcatttttaggaagattaatgtgacagtaatgtgcataatggaggaaaaaagtgactggcaatgttaacacaccaagagtgataccaagtgtatcttatacaaaaggaccccgtgcagggaagctggcacaggaagtgactcctctgttagcatggtagaagaaaatccaagggttgctactgttagccaagtgaaagtctaaaacacaattgccagtgcccatgatattgagatgtataaaatggaatacattattttaattaattgttaattgattggttgactaatttatactcccttgttcaaaaaagcctttaaaagtatctgactatagtagagctggtcagacccacacctggaattagggctagttcagagtagaagcactgaaatgattaagtaattggatagagaggtcaagaaataggattatagtcatagactctttcagtccagaaggtactcagcattctctacaagtaccttccgaggcgaccgctttcagtttagagctgctttaattgttgattcattcatgcatttattcatgtattcattcaaaaagaatgtattgagcacatgccatgtgccactacacctcagattcactagggcaaatttagtttgcttttacctgaggactattttctaaatgacctaaattgcaacacattttcaatatactatgggagcttgctttgtttttttgtttttatattttgattttacattgtatggctatgttctctgaaatgaaactaatttttacacaaagacttctgttttatagccttttttcttttcatttttaaaagcgcagataacagttgcctcagatcattaacttaattatcctgtactctaaatttactatttcagtgctacctaaggaaatggtaatatcatgagttttttattccatttttagttttttacatttcacttatttcacttcctttttttctttacacaagtaaagcgtacgtgctaaattttattctcgattgttacctcgtccttggtctagaggctgtagtacaaccctgtgctgtgtgtggcctaataaaatgttgtaaatcttatgtcatctgtaatgtttgtcagtaaacaaatctttagtatttagaaagaaatattatgccattttttatttatataactttttttctcaaaagcattttgggtattttttatgtgcgtgggagaaaatgctcacagaaaacacccaagtaaatgtgatctggtggagctgggagtattagcattcatgccgcctttgaaatagtgcaacagaatttcctcttaatgttcctgccactagaaccgcttcatggagacacttttcagctgtagcaagaaacctgctgccattgcataagtacagggaagacagaggctcccagctctgcccctacccgctgtcccatacggagctgaaggtccatggggagcctgggtatcatgcactgagggtgtctcctaagtttctcaaacttgagagagcttgatggtcacacagagagctggcttaactaggactagactagggctagggaaatctgcatttccagcaagccccaggagaagctgctgctgcccattttcaccacagtttgagtagaaaagttatagagtgtttatgtgaatcgacttcgctgcacagagaaatggatttgttgtgctggtgtcagagaacatcatatcttcaagtagtcactggacctaattttgatttccactacttctttcattgtttttttaaaaaagcatatcttatacattgctttgcttcaaatgttaatacatggtaatgatttcattatgcaattaaaaaatttttttctcaagtaaatgttaaattaaaaatgaaatatttcatattatacaggacctcatggtaagggacaaaacaaaccctgggactcggatgctggaaaaatcatttgcttttaatagagttgatccttttcataggtttacccatttggtctttgctaaactttacaaatatgtctaaaactttatgtctatggattttttttggcaattatattgatctcctgtatggcattaaatgccattatttcaaaatatttcctaatatgttattgactgtattagaaataatcattaattcacaaaatcagatatactgaaaattaaattatatgttctccaaaaatataattgctgtttactatgagagtattatatagcagagttaaactaataagacagtcgttacaaattatcaccactgtaattgttccattggagggaggatggaaatgggtgggttttgtacattttataaggtttatgaagtttaagggaaaggattttggggaaagctcttggcctttccaaactgctgttaatatactcattgatagtggaatatatgacctttgatggcacttgggaagctaaaggaaaaatcagctgggaccttgatgataacgaggtccctgacccacccggaaggtgaggttaaatgtgttttcctttggtcaagggaagggaattccagatcctttgctcatgtcaggaaaaacctttgtgggggccaggacttagtgttttaaacttgataagtcttactagtttaactctgctaatatttgacccctcccccccccccaaaaaaaaacaaaaaaagataacctctcaaactgattctcttactcgtcctgaaaccaagcattctgtattgcaagggccatgccctctttgcttcaggactttcatgtgtacagattcctaaattttaagttacacagctgcttcatcaaacttactcatcatagattctagttttcttaggctagttacatctgaaagtggtattatgcttgtgaatgtgttgctttagctcatataatttgtttaaaaagtttattttagaggaatccagttaacactgcttatcaagtttagaaacactaagtcctggccccctcgaaggtttttcctgacatgagcagaggatctggaattcccttcccttgaccaaaggaaaacacgtttaacctcaccttctgcgtgggtcagggatctcattatcatcaaggtcccagctgatttttcctttagcttcccaagtgccatcaaaggtacttgtttataaggcagtaagaccattatgcaactttaaattttatcccactctgtttgtaaagacaatcacaaattgacaatattctttgtcttttcttttttggagcatatatacagaagcacacacacatatacatattcgtgtgtatgtatatgtatatctgtaaacacagatatgtaaagtgactttaaaatacaagtacatgtgtttcattttaaattctagcgatgtcattgggaaagaaagtgtagacaaagttacatatttttgtaagtagtgtacttttatttacgttgacagttaatatttaaaaattttttgttacagatacaaattttggggagaattgtccttagaaacatgttttaaatcgttgttctgatgtcttgataactggtaccaggaaaataaaagggttaccaaaaggcagaaaccagtttcaaattatctgggaaataaaaacaggaaactcagggaacttggcctgagaccagttggagaggagcagttgttggttgaataattatacctgcattttaactgttggaagtcatacagcgaccttctggttgttgtgatttcttgtgcccgtcaaaaaaaaaaaaaaaaaaggaagtcacgattaaatatcttatgtccagttaccaacaggagtgtgagtgtaaaggagcctctttattcctacacattaggttacaaaaaggattggtataaaaaacaaattttccagttgacatttagagtgatactttctatacagtcatctgtaaacagcataataatgttctataccattcattcatggattttttttcaccttcttctttgctttaactcttaactctgagctttgaagccatctcttctgtccaaagatgtgcctagttcaagcacttttctgtcctctttccatacctaatcccaggttggttaaaggagcaccagaagttgtaggtgagcaggttttgctacatctgggctttatttcaggattaaatagaatgtacttactatgtgtttttaaaagagacttattgttaatattgcaaggacaaaaacaacctgacaggttgagccagataaatggtgttcttgagggccgtgcctaaaacttcaccaacccaggatgcctaaaaaatgttggtctaatgactgaccttagcagggtgacatgttcactgctggggtagccctgagcactcctgcgcgtgtttgtggtttctgacttggctgtaggtgacctctcagtttttcccagggctcggcgtgtgctctgtaacacagagctgctgagttgctgctttgcccagctgtgtccggctaagccctggcccccacaaaggtttttcctgacatgagaaaggatctggaatcccagcccgggaggccttctgagctgctggcaaaggatgctgtgagtggagaccactccccatggcagagctcccttccctctaaggggagctggagctgtcccttctgtgtccacaggggttctccgcctcctgcagagcggagctgcagccccaggcttgtctccatcaaccagagggtttgcataagcaggagctgtcaggcaattaaaacctcgttagttagtgtaattagtattccaagaccatgatctgggattttggacaactcaaccaagctggacagtttatatcctgcttatgagaagaaaaaaaaaaagtctgtgcaagggaagttcaagaaagagtctgggagcataaccactttagcataaactcacagacagtcaaaaaagtgatcatttcaaatgttcttataattttatcactataggtaaggaatctctattagacactgtgttttttctactctcctgtcttgccagtattatatatttactagtatcttgattaagagatcctcagaggggaaaaaaaaaaagctcttttaaataaagagagttttaattaaaaaagaaaataatttgctaatgggaggaagcagggctgaatgcataccatcatacgtaaaaatataccactaagcaaagccctactttcctccagttcttgttgaaggttaatagagctaaccttacatgaaaattgtaaagattgccaaatttgtctttttcccactatgccctccctattcttttagtttttttccacctcagaagcccagcatcatctttctctcgtttccaccagtaactataatctaggaaaaattttaaatttaaatttaccctttttgattggttgtaccctagagtgttacctctgccagcatccccacattttaatcttaattgtgaaattcatattgaattcaatccagaaagaaggagcaaggatttctgcagtcaatgataccccttcctgactgagccctgctcacttggggaggattgtcctggggctggcccattgcataggggcatttgagatgaatatggaaaggacctcgccctaagaagtctagtgggagagatcatagacacaaggagttataatgagggtagagcagccatacccagtctgaatagtgttatgcccggtagacattctagaagacattgataaacaagaatcaaagctaactttaatcagtttaaaagctactttgtgatttatagacacatatgtttacttctagaattggcacttctttgttctttgtgaaatgtgtaacttaagaaaggtatttaggagcactaaaattaaatatttgagtttttttaaagaagcattctaataataaaatttgactcattccctagttcatattgaccttcactaagcatactgttctggggcatttgaataatttgtttcaaaagctatgagaccattcttttaatggtgcatacgctctaagataagaataatggattcccattggttgatgatacatgcaaaggtagggatatactcttacagtgtgccttcctgcttttgattcgtggtttctcttgctaagtgttttctgcatcaggaggaggtgacagcagtaagtggtgcctgtaaagttggaaaagggaaggaattaacatgaattaatgtctgtgtgagtttttaaggaactggaatgtccctctaaatcgaggatgtgttttttttgtttctggttgacaacttcctagttttcctacacttcattattcttttctctgtcactgggatttttttttcaatttcccgaaaagcaaatgaagtgctttatccttatcagtagcctttcttttcctgttccaataacaaaagaacaatacaggaatttaataatgttaaaaaattgctgtgtctttttcttaatatatccatttatttgtctgcagataaaatccaagttttacagacatagaggaaagctgtttatataagtaaaatgagctactattgtatcttgtccttgtcagggttttctttttttgtcttttcacccagtttagaaagtggattttttttttctctttaaaatgtgtgcccatgttctgttattaagaggaaaagtcctgaaaatacaaagataggtgaaaacactggttatcctctaacagaaggacactttaaagattcctaaaacacattctgatcttgtttatgtatctatattctattaaatattgttatttactcttcctgctgctttggaaaaaaaaaaagtccaatctgcctcacagaccttttataaatatcagagttgtggttttgcaacagtgtacatgaaaagacacttgtttcagtgtttgagttcatggcagggtgcattaacgtggcgtctgcaagtatccttgaagccacattgaggagggaacttgggacttgttccatggtggtcctgctctgacctcagaggaccttgcttgctgacttttttaaggcatgaaacaaattctcatattctcagtcgtgtctgacgcagatctgggtactagtcagggttctaaactgcctaaataaatatcttgcatataacatctaaagtgacatttatctctgtggtactaaaaagaaaatactattccacttacatgttcttggtgccctttggcattttgattgctaattacaataggaccttcagattgccttctgattgagacctaacttatttctgtttcatctggaatttttcaaatacaattattatgtggtgttaacacttcattgcagcatggaactcccaaaaatgttgtgtatatattctttcatgcctctcagcctggcttcatgtctgtctaggtacaggtcttattataatgttgcccttgggggtccttttgatatatcaagaactaaacctctttagtcaggagagtgtattctgtatggatttataataaatagtctgtgttcatatgcataggaaataatgcattttctgaaaaaaattatgcatgtcacttgtattttttgtactttatgtgccggaagaacattgtatacaaatatgtcccatgtgcatgtatgaatttatatagctacatgtatataagcacatatacatccatgatgatatcataggtaatatgtggaaataagtgcaaccatgtgattatttttatcttattctttgtgtgtgtgtgtgtgtgtgtgtacagttacctgtgtgctattaaatgtgacagtgccgataatagtgttacattctctggttaagtgtttcctgagaattttggtcttccttaatggtgcacattagttatagactcttaacccgtgagatacattccagtggttcgtttctaagaatcgatgtaatattatgcactttgtaaatagcttatagaggataagctatgactcctgaaataaatattattcaaactgcttccattttcatttcccttatcactataacaaccacacccaactttgcaattaaattgtgttgtctatctgcttcccgcacactagtgaagctgaccctattgaattcaaaggaaatatgagagataaagtcgaaaactgtcttccttttgttgacatttctaaagcaacaagtcagaaagcttgactccctttaggtagaccagagctgctacgggtcatgattagatggtatgtccactagtaactgtgatgacgcccaacagaattatttgaaacattctcagtaaataaccaagaactccagtaagcaaaaggggagtagctgttaacttgcagtttcagttttctacaaatgggggcgcagggggtggggggcgcacggaataccgaggacaaaggtaaagatcgacatagaatggaagtcaccagatttctgcgtttaacccattcttgcccagcccaagtgaaattgtgttttggagaagcctccatatttggccatcgagagattggcagtgggaattcttggctgtattttactgctctctttattgaaatatttgccacatctgacagttctgtcactgttcagttcagagggatttttaaatcatatactgactttgatgcttcatggatttgtattatttgtgtattcctcagtcatactaacctttgtatcaagatttttgccatatgactcatatcaaagtttttaagacatatttaaaacaaatgaattttaaatagtggcccatttgctatatgttaaatttgatatacaaaattttatacatcttaaatttatatatctttgatatcttaaatttggtatacaaatggtggcccatttgatatatgtttgcttaacataatgtaacatgattgattttgttatatttcccatgagctgaggtactgttgttttctattaccagagaagacatttcagatcttttaaatcttatgtgaagtacttcctaagaagagaagtaaaatgagtatatctcacattagttactattatctgcagcatcaaaaataaatgaatatccccaggaaaaaggttataaaattacaacacctagacacattgaggtaggtagtaaatgtgaaatgggcttacgaatgactttattcacttactggcatttgggagggactcaggctgtcaggaaaatgaaccaatctgtattaatataaagcgctagaaatataaataaatcatgtttgaaagcgataccaggattttccttgaatgctgctgaataaattctgcttgttaaatgtcagtgaaatgtatgtcacctgcatgcataaagtgagagggccacaaaaaacatccacttaccactttgaaatatgtaagccctttaatgttcctttgaccttcagttaaaggacatagtctcatagcagaggaaatgcctcaaattctagcatctgggtttgtttctttatacttttttggcatagttacaacagtagggcttttctgtcctttaatttttttcacagtacagtcaacacaggcttttcacacaagcgggaaaggacggttgtgaggccaaaagcaatatgtttcttctctgtgctccacggcagagcctaattgaatggcttgttgtttcagagagagcccagaaccaacaagcagacaaacagaatcccacacaaatacaaattgcgtataaaattagatacctacacacgtgcgtatcaatggatatgtactaaaaatgcagtcagcgatctcttattttgagctcattggcttagtcaccgtgttccaattctttcatctttgcagtttttggattttcatctgaattttcagctggctaaagatgtttcttctacagctgaaaagagaacctagtttcattacatacacttgtaaagtgtatgtatttggatgggggtgctctatttcagccctattcatatgtcaaccatattgtcatttatcattagcaaaaggtcacttttaagctttgcagaatgaaacggtgagatccgattttccattaattaaaaaatatacatcataacagtatgctggagacatcttcatatatttgtgttttccctgctttacatccaataggtttctgtgtatgagcttctcctgagactgaataatagcagcacaccctaatgcaccttttttaatgggaattcagttgggtaccatatgcctttctcactgctgaaggccttcatgctttggcatctctgctctcatcttaccggtgattgtgggccatttgtctggttctgacatggaaatattaggaagcagtgctgttatatacaaatccttatagccttaaaattaaatgcagctctcaaaagcagcctaaaagttaaatgacacacaaaagcttgttttgtctgaagtttatatgtttattctgtagagttacattggatagggtagttatcagcccttagcaaatgcctacttagttttccttaatctgttattcattcattcattcaacaaatatttattgagcgcctgctctgttcagacactgtgctagattcagggcaaacaagacagataaggttctagtccccccccgagctttcagtcttaagtggcaaaaataaaattatgtgattgctgttgacgtacagggtactgagactgagataggatagcttgagaaagtctctcctctgaagagctgatgttttaagttggactgaaaggtaagaaggagctggctgtgcaaagagctcgtggaagaacattctagacagagtgaacttgcccatgttcagtgaccccagtatgggagaaagagttttgtgtcccgagggacttaaagttgtgatgtggctgtagtgtattgagtgagtgttggggagagtggcagaagaggaagctggagaggcagggaagggctcagttacacagacaacatggtaaggagtttggattttattctaagtataataggaatccatgaaagagtttgaagcttcagatggagatgagaggatgccctttttaagatcaactgtggctgccatgtggaaaatggattgtagcgggaagctagagtagaatcagaaacattatttaggccactgaagaagagcccagccaggagactgctatgtggctggaccagggtgctagcagaggagttggatagattctctgttccatttggaaatacagttaaaagggctcaattaggttggatttgggggtgaggttgggggtagacttcagagtgaccccagggttctggcttgagcagttggtaccatttcctaagatgggtaagactgggcaaaaactaaggggagtcaaaattacctgcttgagaaactgagagtatactggaggcagaagtgattctgagtccttttcttcgtgtggtgatgctatttggaaatcaagtcattagagtgtttcactacctggaacacatcagtaaaattgtgaaaattccaccttggtagctcttggttacagctcttcagctttgtcttgtgctgttttatctaatcctctgtctcttctgtaggctgtttctctgacctttggagaaggcttttgtttcttccccagggatgtcaacacaacccatatcccaatttgtttggcttccctttaaaattgttcatagattctttctgtaagtttttcactacatgcatctactatttcaggcatgattatcgtcacactagaatcccggtggaaccaaggctagctgggggaaatgaaagattgtgagtgtcatatctcatgcacactccagagcatgtggagaagcccataccatttaaatcattcttcctccatcccctaactgaggacttatgtggtaggaccttattatacttagtctatgtctgtgtgcttatcataccacattttattttcctgtgtgcctgccaatatcctctgaaagcagggacggtgcctggcatctaggggatagttaatgagtgtctgatgatttaaaaaaataatggattggggctgggcacagtggctcacgcctgtaatcccagcactttggggggccaaggcacgcggatcacttaaggtcaggagttcaagaccagccagggcaacatggtgaaaccctgtctctactaaaaatataaaaattagcttggcatggtagggtgtgcctgtaatcccagctactcaggaggctgaggcaggagaatcacttgaacctgggaggtggaggttacagtgagcagagatcgtgccactgcactccagtctgggtgatagggtgggattttgtctcaaaataataataataataataataatggattggaactatggaactaaattataaaagataactttcatgatatgctaaaaaatgggactttattgccattgaggaacctaaattataaaagataactttcatgatatgctaaaagaatgggaactttattgccattgcaagcttgtgaggagagaggtagcatgtgaagttaagactagaatgaccggttccttgattgaaaacaatcaataaaggtgctgtgaacagattatcagaaagtatctgtaagtataaaacacattcagaatttagaaaacaagatgtaactcctactacaacactgcgtttgtcttctgaaaggaagagacatcacaggtttagtattttttgacctgtcatttgattttagtttacgcctaatttcatttaagcttatccttttggccatagtcccatttcttttcagtgtttttgctgccagtttttcagatacagaaggaaagtcatatttgctgtgtgcagttggaagaaaccctggcacagttcctccagaaaccaaagacagaaattattagccatatccagaccagtagctgactggctccaattcttcctcccatgagctttcctgattaatgggagaatctgttctgtagtcgaacagcctctttcctgagcccagtctgtcctggcttcagagcatgaccagctgtgcagctgaagccattgccagggctctgtttctgattctgctcctcagcatgttggaggtgttggacggggaagcagaggggtgggaagagcatccaggtcagtttagatgtttcagcaggtaacagacgtggcaccgtccacccagaatcccgccactcccattggactctgtcctcttcagaaggctgtcattctgcatggtgcagatgttgcagtccttcccttattcttttgtctttttgtccagaccacttagctcctgtgtctgtggtgattaaatgctttgtaactttttctgacatccttttcttcacccctcttctctcttcccctactgtctcgcccaccatacctcttctgttttctgtttgcctttctttcctctcagctattgcattttcccctttacactgaaatagctttgtttattggcctgtttccagcaatattaacatatttcaattttttactcacctgtttaccaatttaacaaagctaaggtggttcatggcagtatttggggcctgaaatatgaaatactgtcatagcagattgtatacgttcaatttctgttacctttctcttacctttcttccttattctagactcaatctatttcatttcaggggtctgttatctgagtgtttggagtttgggatccttgtaggatcttcaaagctaaagacctatctccactgcatctctgagatcttaaaaacaataatatgaagatccagaataaattggtgtcagttaaactctaaccaaagaaggtttaaatgcagtgagcatttgagtgataaataaggtacggcccgaactcaagaggcttccagttttcttggggagacaggcatgaacaccactcactagaatagaaagtagaatgaaataagtactttcataatttacaggtacgagaaaaatgcacaggattactgagaaaggagttatattctgactaggaaaatcagaaattgtggcattttctgtgaacattgaaggatgaacaggatttcagtaaatggagaagaaaggcaggagggcttcctagaccaaggaggtgatggtggtggtgggtggaggagaattgtgcatgccgatcttctgtgcagcactgggtggcaggcacattgcacctaaatgagcactgactatgctttcaagaagttgggactaagggaacaggtgcaggttagaattgtagcctgaaggtaaagtaagagctcaaggaggagtgtttacttcctgaattttagaaatgtagcatgtttataaatagagccagcagagagggagaaattcaaggcacagtgcaggagtgcaaggccccaggtaacacgacagactcttctttgagtcctgcctctctcacttttcatgtttgagctctttttattgtttgctttttgagatggtctcgctctgacacccaaggagaagtgcagtggtgcaattatggttcactgcagcctccacctccccaggctcagcttcccaagtagctgggaatatatgtgcacaccaccctgcctggcgaatttttgtattttttgtaaagatggcatttcactgtgttgcctgggctggtcttgaactcctgggctcaggcagtccacccacctcggcctcccaaagtgctggcattacaggggtgagccaccgtgcccagccacttgagctctttattctgccatgtccgggttccccttttctatgcaatgcagaggtggtataaagccactaaaccaaggaatcagcttcagaaacaaggtaaagctgccttcactcaatgggaaatcacatctatagatcaccgctctgttggcagggtcagatgactgaggtgtcttgtgtcttgatcaaaagttttgtttccactgggtctctgtcctgaggtctccatggatctgtgaccttggacaagtcatttaacccctaggcaccttccttgccctctctgttaaaatgagatgatggtcccagcgctgtcttaggcctctgtgtcaccaccactggagttgtttaaaatccaggctgtataggttctgtctcctcttctcctcccactgccttccccacttctccttcctctctcctgctgtagtcattagcctgatgtatcctgacagtatccctgtaataaatataagtggaatttgctaattaaatgctagcatttttaaagaaagtttccagcaattggtagagtagctgagtggtttataggcttcctattcaagagggaggtgtcctaaggtttaaaattaaggttctagtcataaaggaggcttttattattaggacaacatggtaatttggttgagagaggacttactctctgcaacattaaaacatacatatacttttgacagtttcagtagtagctttgtccttttgatttacttctttggacagttgtgattgacatcagattgaacacatggttcagtaaaaactacagctccttgaagtacttttgttaatattctaatctcctatttgcatcattaacaagagcacattttattgccgcttgaaatagactcattgacatcccagaataggtagttttgatattagctacttgttaatgctgcccaggccattcacattccatgttcttgataatgtaccacgttcttagtacacagcccttacttaccacattgaagagactgaatgcactgattttaagaaggaggtcttgtgcctcctagggggactagctcttttagtattatttctcttatttctgaagcttatgttagaatctgagcataaagcttcatttcattttccctggagccaattatgatctcaaaatgagaagtgcatgagtaaataaatttaaagggggcttttgggaaatgttctgacataggcgatctgcgcagcacatctgaaatacctgggatgtggttatatacagtggtcatcatattcagtggtgacattcagaaatgatggcagtttataaataatcctaatttgtagcaaatatgtggctttaaggccctgtgatgtgattgttttctttgttctgttgatcttgtgactttaaagtggcattcagttctctgttcattttaaatgtttgtcgcttctgacttctgtttcctcttattgttttctgtttttgtgtttgagcccttaactcaggtgtatttatttccccctcccaacttcctgccctctttcttcttctgatatcttctctttgataaccatgtcttccatgtttagtgttctcttgccctccagcaacctatgttagtttggttcatttgtttaaaaacaaatctcctatttttgagaatgagaatgtggtgttattaactaacatttagagcatgcttatatatcagatgtccccaggcattttctatggattatgttatttaatatacccaagaatcccatgaagtaagttaaaggggtgaagtaacttgcccaagatttcacagcagggagaggtagagccgaggttggaacccagatggtttcattctggatctcctattcataaccaatcctgttactttattgtctcaactgttcagtccgtcaagatttaatgatcaccagcgttgtcccaggcacagtgcagacacaaggacactagatccctttctcttgccatatgtacggggtcttaagtgccatttgagaggttcttccatagcacctgtgcatgccagtgcctaactcttttcaaaagttcaggaggtcttcatccctgtggagctgaggtttgcaggataattaagagtttgccagctggggaagcagagaaggcatagggacatggggtaagaaaggagagcacagtcgacactgcaacagctctcatgtgactggagcataggtgctgccatagcagaacagatgggcagttggggaatacgtcgtggggttggttgagtccaggtggccaagggctttgagtgtcatggcacagaatttggacttcatttttcagccatttaggaagctagtacaaccttcttgagtctctcctgcctgttttgcctcattccacagaggccactggagatctggaaaccccgtggtgtttaacattggcagctgagacctctacgtgatcagcttagaggaaattttattgcagtagcattgtaaaaactagtgttttcatacagtcttttgatccttggtcccgcataactactgttaaatccaaaaccataagcagaaatttaacatgagtgcttatattcttaacttgtaagatgaatacagagatactttccaaagaagtttttaatgtaaatttaaatgtatgacttttatgcaggtatggtatgtgctttttcctgattaaatttcctttttgggggagaaattgagaatttaaatgatgtcatgaaacaaaaggctttggatactgttgaaaagctgcaatcagtactgtttaaaatgcttactcactattacaattaatctttataaagcaaacatctttcttgatgggacttttttcaaaaaccatttttattagtctgttttctggtggtagtaagatgactagatatgagcccagtttaaactcaaattcttacttttccactttcagtaagaaaaataattagcattaacatttcagtggaattgcaaatatattgccctagcttactcagggaaagggaattaccagctggcgaaaaagcagtagaatgaagtgtagtcaggcgttatctcacattgagattcttaggtggggactctttgaaacaaatctcaaaaaaattttaaaatccagaagatggcctcttttcacagccattaccttggaggcccattttcttgtcctaacgtagctgcccttgcatgaaggaggaatgttttttgtgtctcttgctctttccctcctttctttccttctttcctttttttatttttaattgccttcagtgtttgcagcagttttttcaatgcctttggtaatggcaaactttgattttttgaagttggatttaattttgggaaacagccaaaaggcatatggagtcatacctgattaataaaataggtaagcactttggagaattctatttttgctaaaacataagcttaaactattaggcactgaggcagattttattgtatatctcatgaactgcctttaaagaaaatgtcaaaaggaacattacagaaaaatgttgagaagtggcagaattgggatactagatagcttccttaggtgactttgaagaacaattttattgatgtgaatttataagtcctattattttgtttcttgggggatttgtctctattttgcggttttatcttatatattcaatatagttaatgttctttaattaaaaaaaatctttaggatactttagtagcactcagtctttaatttgaatgtctgttagtgtagtactatatatgtggggatatacctgtaccagttaatagagtgtgtagttaataaaaggtggcagggtggtaaacctttctccccctgcataattgaatagttttaagtgccatttgaaatcctgaatatccaagattggattccaataactgtgtagcctgagaagctttgctgtcagcagctgctggtgtttgtaagagttatttcactacttatcgctcttcagattcaccatgaatttaggtagtaatttaccattgcagaaggggcaagctctgcttctgatagtgttatgatactatgtttttgcttccttaatgatacgattcttgaggtagaaaaattaaaaatatgtggtataaatcagcttcatgaattaaattccccagatttaatgatgacagttttattcctgggatgcttacgctataactccctaaatgcttcatttaatacttcggaaatggttgttctcataggagctgttattgcaaagtcagtaatggctctggggctgaaatttgctttcttaattctagtccattgtcttttgttgtcatgtttcctcagtttccttagatatgtcacaccaaggactggttacagaaatactgcagtgcattatccaatctaagcctgctttactttctttcaaatgagcttttaagcatataagtagcgtatataatggaaacagaatttagggtgcttaggtaagaaaggaattacttccatactagagtattttacagctttgtttgatctcttaattgtctagatcagagattcttgggtactttcaaattcattttaatgtaccatagccctttaaaaatgacaaataaatttaggcagtttgttttcagaactgatttgaagaatttcagcatactatttaaggtaagtagtcctatactggggatcctaagctagagtcagcttggactcgttgaaccacgtgaccacccagggtttcctatagagcacgtttttagctatttaaaataattaccatgctggacctggagacctgtgaatagtccataaagttaattacaccttgagacacaccctctgctcagctactcaagtaccgtatccactttacaatgttcctttgttaacaagatctatgtggttgaagtatgtattatagtaatgtgcaattcattgtgtacagacatttccaaagtaagatgatggtaataattacacagtaaaagagttcaggccttttgcgattgttgtgtagctaggatcggaaggctttgtaaacttgatatgtttttgcatactttgggttggtgctacctgattatggtactaaagtatttgagtcctctgcccttgtatcatttgtttgttagactttacattgttgactgggttccatgatttataaaaagatcccagaatcttttgtaactatttaaaggtcagcagctaatgataatcagaactaataatagatgcttacttatgcaccaggtattagtctaagccattgatgtgttagttaatacctctcaacaagtaagtgaggtagagacttttattattttatagatgaggaagctgaagctaggaaaggtgactgaggcccacagacttgtagtaagtggtagaacaaactaggcagacaggtacgtaggtaggtggatagaaagaaatagagaaaaaaagagatttaagaatagtagaaggtgtcagtaaaggatataatagctgatttcctgcctgctgtggtctaggcattatgttgggctacaaggaaacaaaaatgtatgaaactcaggcccagtcctcatggaaatcacatttggtcatggattaccctgatataagtgtaaataattaatgatgcaatgtgaacattttataaagtaggttgtgcataaagtctacgaaaatagactgagagaaggaatccaacttgtaggggaggcagagatgaagagatattcacagaggagaaggcttttgcttaaagatgaccacagtgccctttgagagtgggaaccatgtattgttcaaccgtgtctctccagatctctagcaaagtgcccaggatgtcatggttgctcagtaaatgttgggtggtaggtggtagcagtctggccagatgggtgaatgttggggaagagcattgtaggagatggacatatctgatgaaaagcacagaggcagataaggccatggtatgctcatccacagtagggctgtgtccttgggaagtaggacatatgggagcatggccactgtgctacttcacacatcactctccttttacttttagtctctactcccaacatcctcactttacctgctttaaatcgtatttgtatttcaaaaccctgataaaaatttctcacttcctccgtgaagttttttcagcagttgccatgcaccctagtctctcctttctctagtcacaatcctttttgttcctgccactcatgagcctcaatggatatctcacttacactgatttgatctttacaaattgtatgcatgtattaaattatcatatgtacccacccccaaaatataacagattgcctgcagtcacctctttgattattgttttcttttgttaaattatttcctctattctctcttcttggagtgcagagaaccttaggattcatatgctacccttcctattggtacaagaggacacggaagcccattgagatgaaaataattgtccaaatcacgtaagcagttaaagtcaggcccgggactgagtccatggctgagaccaatccatgctagctaatgttcctcttgttcttccgagctcagtagtgagtttgtggaggtgagggactgggtatcatactcactgtgggtcaagtagctgctcaggaacatttgcaaatgaaagaatgaataccacttggctttctgagtaatataaggataatgtggttcccagccttaataaacagctctagcagactaaacatattgatagtaagccctcaactgttagatatactcattcagaaataatatcagaagatcaactgctgagcagaattttcatgttaaaactatttcactaggagtactggtacaggtcggtgttagactcattactgaaaactcacttgaagaactctattagctttacatatttctagcagattaaacttagattacttacttttaaattattattggaagttagtctaagttattttccaatatagaatcattgtcttaatttaataattcttgcttcacaataacataatttggaacggaaattagattccagagtgcccttgtaattacaaattgaaaaatccttttctgactcaaaagggggcttactggtgacaaattccattatcagcaacattctcatcagaggctcagatgaggtggtgccttctgatgcattcttaagtgggtaatgggtagaagagttaggtgtgaggttattgctaaatacgaataaccatgaattatacaagatttattactcagaaaccaacagagtagagccttgcaattcattgctttaacattcatgaattcagttatttatgaaacagtgacccagaggatccatgtcatgtagtggtttgtcatttgaatcaggtgaagcccctgtgcaggggaaaatcacttagctggtgacaagccaaccacccaattgtttttagcccattatcacatatgtaggaagtcatgaactagtcaaaactgttttctttgtgaaagaaggcctggtgatgggagtgcagaggaataacatgttcctagaaagtgatgattctttaccaaaaaacagaaatctgggaccaattaaaaagccggcatgctgtatttggcaatagattgaatctctgaaatgcatagtccagaaccaagaagagcaatttctggaaatacctcagtgagtgtactggccagtgtaaaatttcactttctgggacaattatgatccatccgttttttataggaggcccagtaatgatatcttgactgaattgcctttttgagttacaatcattaatcttgaaggtcatttgagatgtctcaagtctcttatttaagtctttgagatcaagtaaaatccctagcatgtatcaatagccacctgtatcaaacattgtgtatgttttttaaataaagaatatctggctataggattcccttagcctctttggaagaaattatcttgaatagggaagatagtgaagaactggtatgtccaagtagaactaggaattagagcaatagtctggatcctggagctcagaaaatgggcagtaagtcagggacaaaaggtggcttcttaatctgttgttaaaaattacttagagtagaaattcacattgagccagtccatcaagctcccagtatcactaaagaaaacctgtggtactaccactcccccttgtttatatctgacctcccacaaggctccttttttgtatgtgtagtgctttccctattccagacacatttttatgttttttaattataacatggacaaaggatagcattgacataaaccccaaattttaataaatgactttcctgaaaatgagagtagcagtgactttaaaaatggtaagaaaaggagccgtgcgcagtggctcacgcctgtaatcccagcactttgggaggctgaggcgggtggatcacgaggtcaggaattcaagaccagcctgactaacatggtgaaaccccatctctgctaaaaatacaaaaattagccgggtgtagtggtgtgcgcctataatcccaactactcaggaggctaaggaaggagaattgcttgaacctgggaggcagatgttgcagtgagccgagatcgcaccactgcactccagcctgggtgacagagtgaaactctgtctcaaaaaaaaaaaagaaagaaaagaaaaagaagaggagaaaatggggaagaaatagagaaggctggcttcatcctcctcatttgctaggtaggagatctgcagtgccttcacaagactagggaggcagatgcatccactcaatatagggatagagtctttcagccatcagcaggagatgttcaggtaattaacttcccctcataaaaccaaggatcagaacaagagcagagaagcactgtttgaactgtgaggaagccatggcagcatgagagggtcttgtagacagaaagctttcagaggtgggagccgtaacaagccaaggcctgaagcagacacacaacttccacaggaagcattctaccatctttcatgttgagacaccctgtctagtcttaccagtggctctggtggaagagcttctactttcctctggctggacttcatcttctgaatgggttaaggagactgccagaggtctaaacttctggggattcagttgttacagagaagtccctatggtatggaggccctaggttgttcctcatgggcgctctctctgtctagggctccagccccaagacccttggtgtacagacagattgcccttgtattccatcttgcaggcctgccctggctcccattcctagcccatttgttcactgtgtctcagggggcgaggctccgcctgtgtggctgggtagcctatcagcacctggctggtggacagcactatagctgtcctatgactaaaggttgctcttctgacctttcttagccactccactaataaagggttatttttgtgttggtttggtttgtatgtttagctgatttcatgataaaggaactttgtaatcaaacactttttcagctagattctaagcaattttaaatattatgtaagagatcaaataactatcagtgtaagatgcagactacagactgaaaaatgagaaggttaggatgatgactgtgtgttttgatggaagcagtgcaggacttcccaggagactgggcttctggccctgccttgacattcataggtaaatgacccttgggcaagtcatttggcttttctaagtcactgttttctttactcatatctacgaatttctgattaagacaacttttcttctcctttgacaagtaagtcttgtagacagaatcattcccacatttgtatgtaatattgattcccctattctcttgtagttaaagcttcaaatctctaattcatcttttttgtaggaaggattagattgatttattgaaaattctgagctatagaatactgtagaagaagcctgggctttctgcttaaagttcatatatacagaaaatctaggcttgtggatgacaaagcgttttctgtacctcattgcttttattaaaatacccaacttattatagtgtctcttatttagcagttggttaaatattcctggagttaatgagtaagaatcttctatcttgtaacaaatagatgtagagctttggtaagaagtacacatattacttgtttgagtgtttctcaagtgattcagaatgctttacttacattcgctcttaaggcaaaatacttccattattcttacagttcattgtcttaggaaacttgttgcagaagtttctaattgtccccatatacatgtgttcattctcctcttcctgcgtagatataaaatgtttaaagatacagtcacccagaataaagacaccgttgagggaggtgtggccacgtgactgagtcctggtccatgaagtgagcataaatgacagtgctccttttcccataatgctgtttagagttgcgccttccccttctacttttcccctctcccacagttggaataccatatggacaagggctgcaccgtagggattgaatgggcaaaaaagctgaaaggaacttaggtccctagcacctgtgtggagcccaatccccataacatttatagaattaaatttcatgacactcttattgcacataacacaaattcccaactactggcatgtggctttgtgagagctgtttcaccataatctgttgagacttatttgtggaatcatgatgtcccgtgacatttgaaaatggaagagaatcctggaatatgggagcaacactgacgcagaacacagtgttcactttggaagcagtcatgatctcttcttgctgtggaagcctcaacagtttgcctgttccctccattgtactcctctctgaattctctctcaggcctagatgctgggctctgtgtgggttgctgtatggtatagaagaggatgagattggcggggacggctcttgttcaggtccatcaagactgtcgctgtcctctataccttgagccagctctactgtgcatttatagaaaagagagaccagcacacagaaagagagaaagcagctgtttttagggggaggagagaagatggtggagcttacaagagactgatgtttgcaagtggatatggtataaagtagtagttctcaaagcacggtgcctagacagcagcatcaggagcctgtgaatttgttagaagcacacatcctgaggcttcacccaagaccaggggataagatttggcaatctgtgcttaaaaaagcgtttgccttgctcacttctgagaaccagtggtctaaagagtgttgggaagcctgacagtggtagttacaagggtgtaccctgatgggagtcctgggatcaaaaagacttgaactagaagtaagggaccaggtgagggagcattcccttcagagagagttgttaaaataagccggggttctcatgatgctgctgaaaggagtgtaagtactgtacctcctgtgtttgggaccaagggtgtatctagccttaggcttccattccagcacatcccgtcagccagatgtgcaaaagttcctccgtatacacactgtactgcttaaattgctggtattttgaaatagaaaaaggtgcttataaacccatactgactgtgatgaacagggagtactttttccacctacctctgcttgggaggctgaaccccatcttgccctggaagatggctttgagccagaagccaagccctttaatggctatgaaggggggaaaaagtatgatttccatgtaagggctaccaagaatataagtacctatttaataaattatttgttgaaatgccttttctattttggtagttgaagtttgaaaaatgtttggagtactataattatcatttctgggaaaaaaatacacattgcagtatttttgtttttgctacaggtcaagttgtagttcaggatggaaagtaaacacatccctttgctcagctgcagctcacatatttgtagtctctgggtgccctcttggcagtcgtggtggatacccaaaggacacaaacagggcatagaaacgcggggctccatcaggggcttgccccagtgcaagtctgattaggaagtttgctggagccgaaggaatggcccagaagggtggagatgccttcacagaaggagtcctaggaccagaatgaggctgttctcagaggcatgcccacctctgggaggggtctgcagaagcactttctcaccagggagagcctttatggtatgggtctaaacactgggagatctttgtttgtttttggaggcactccttaccattctatgccatcttgtcaatttgacaactttgtaaacagggcccatccacacatcttgaatgtagaaatagctgagaacagtctccaggagaaattacctatataaggctgcttccttccttctctccagagtggagacgatttataaagagaaagtattggaagctgacagagaaacagcacttgagagtaaaacttttggcatgtaagaggactgtgtgtgtgtgtacccatgcctatgagtgtgtgtctgtgtttcagaatcaactttacctttctgagacatagcaagcatggagtgattacatctgtgccttgggacatcgcgttaggtgttaggtttaaaacaaactgaggagaaaacataagaacctgtgagtactctgtgtgtgtgtatatgtatatacacatatatgtatgaaatgtttttatacttacacactttatattttacataatatgaaaaagtatatattcttttactctccaaggcagtcttgtagaataaatgtctttatgccctgtacactctattcagcaccctctttttgttcttgctatatcattttaattacataagtaaagtcactttcagaaatctcagatcaacacacgatattctttgaagtctttctaaaaacatctgaaatccatatgccacctctgggactcgggaattttttgacaatattacgataatacccttggtttattgttccttgtctttaaaatcacgtaagatcacactttctactacactactaaaaactctatagagtgttgacaaatactggaggtttaaaggaacatgactggctgctcctttaattcagcaagcgtttgtcggtcttccttgaatgagcaggaactgagcatccttggaacctgactgcataggaagggctctcagaacatctggttggaatatgttcataggagacacccacaagggccagcccctcattttacagatgaacaccagacccttcactctgacatatttaaaatctgacattttattatgtacttttttcaaattgctgtcattgttgcacaaaggaagaaccaagttaccgtgtcccttcctcagtggaggaaaagttgatagaggttttatttgttgttctaaaatggatgccaccttccggtaaacattacttggggagttcttaatttctaatgtttatgcctctgtgacattttcaagctgttataaagagtcttcttaaaatgttgctgagctggctatacaaatttagttcatttaatttacctcattagtcatttgtcccattctctaataattttgattccttttttgtgggtcagtgtttatggcaaaatgtgttcggtgggggaggtattcagagaagactgtagtttattaggtaaaattaaacgttttgaaaccagtctttagttctttgtacatttatctaaaccatccttaggccttattttattgccagatttttaaaaaaataaattcattgttacattttgaaatttgttatggtgtgtgaatatataaatataattatttgaatggcaattttttctgggagtaggttggatatatttttctggtgtgaattaacagatgaaataaaatgtctctgaactcagtaaatatttgaaaactgttttaaaattcagtaggatgcaaacaggccacatttggcatccggctctcccactccccagtccttccaccccactacctcccataaaaggcaaatcctggaagccactctgaacttttttccttcctcccaggaagctctgacttttccaggaagattccagggaacactagttggatccgatttcctaagaattaaagcagctttaaatctcctgggagtgtagaggatgaaggggttgagggtccctagaacaataggtcagcattgactgcagattggagtcagctggggaactgtaaaaaaaaatatataccgataccagggtaccacttccagtaattctgtttaattggaattggtctggggtgcactctgagcttttggatttttaatcttctcctagggtttttaatgggcagccgaggttgacagtcattattctggcactaaattttcaaactatagtatgcatgagaatcacctctagggtttgttcaaacccagattaccgagccccactcccagcatttctgattctgtaggtctggtgggccttagaatttgcacttctagcgagctccttaggagatgccgatgctgctggtgcaaggatcattgtttgagaaccatcactttagagcagttcatctcaaactttactgtgcatcttgctaaaatgcagattctgattcagtaggactggagtgaggtctaagtttctgcatttccagcaagctcccaagctcccaggtgttgctgaggctactggtctaggggccacactttaagtaacaaatctctaatctaaagcatcattatgaatgcaattccataacatcgtttgggaagaaaagatgtgtggttcaggagattcctagaggcacggtggggccgatatatgccttagacctggtggcaggcagagatctggagggctcagtgcttctttggcacttggccagctgtggcttgccagggtgttggaacatgcccttggcgaagctgtactgtcaatagggagcttcattgtaaagattctctgtttgcttggagtaaggcagtggttctcaggcccaattgcacaatagaatcaccctgggagctatttaaacaagtactaatgcccaggctcctcccccagaatttctgatttaattggtttgaggtgggatccagacagtggtatttttaaaatctttgtgagtgattttaatgcacagccagggttgagaaccactgaattaagaaatcacgttacagtcttacagatcacttttttccctttatatttggctaagttatactgcacagtgatgcaaactagctttattaggtagtcaaaaacaatttaatatggcatttttgacaaaccaccaagaaaagactctgcaaagattccgtcgctgttaaatcctaaattcggagtcttaagatagtgctgggaaagtgcagtgggtgtttctgaacgagcttgaaatatgaaatatttctgggactgtatcaacaagtctaattttttccccttggggttatgattgtgcggaacaagtcttcacagcaaagcttgccaaaaaaggttatgataaaatcatggaatgtgtatgaaaagaattcacagtgtaactttaaaggagtcagtctctaaatttaaaaacttagggatgacatacgtattacatttgtaataaaagttttaagaacaaagtaatgctgaatataagaaagttcctccttttatcacatgatatctctaaggccaaggaacaagtgaaatagaacagccagcaagaaagtaatgaggatacgctaaagacactgaacctctttatctttgcaaattaattttgtcctctgtatttaagcaaaaatgtagctattgactaaatatacagataccagcaacgccgagtaggaaagttgaagctcttcttgcttttggcattatggacgactagtgggaaaatcatgggctttggcagttctgccacttgctttgtgaccttggccaagtttcttatcctctctgggtctctctcttcatctgtcaagtagacatgaagatataatctcttcttcacacaggagtacaaaggcgtgtgagaatgagtagaggcgtgccccacacgtaggagatgctcaattagtagagatttctttcatttctccagcatgaccatgagaatttaatgcttaataagaagcattatccatcaaaacatttttcttgttgagtctttattggtattttctgcctattaattgtatcagtttagatttcttattaataatcatgaagtctgtttttccacttgaagagtaggccctttcttcttgctttagagccatcatttttgccattccctttgtctggaacactcttgctttgtgttttgtgtgctttctcccttctttcatgcaagcctgtgttgcgatgccatgtcagagataccttccttcactcgcctggtgacacatggcacccgtatcactgaatatgctgcaaagcctttatcataacctggcatggtgctgtgtagctttttattgtctgtcttctccagaattgtaattctcaaggttggtctccctgtgctactgagtgaccaagggcccccgtgatactctaggctgataccacggctactctagggctttagattataaaagacatcagagggaggtgtcggaaaaaacagtgaccccagactcttctcttgactttgtgttctacctactaaatttccgctatcaaatataatccaaatttggggtcctttgaattccccgaagtagcttgaaccgcccaaggattgtctcaggatggctgtgtatctcactgtgtgtgtgtgtgtgtgtgagtgagagagagacagagagagagaatgaagaacgagaagagatttcaaaatagaagttttcagtgtcagatgtatgggactctacaaactttaaatagaaataatggtaatctgccaatgtaatttttatcttctttttttttcctcttactaccagtagtttttcatttgtctttgtgttttatttaaatttgcttttaagcagaagctcttgcatgcatttgcttctcgtagatcatgattgtattaggttggtgcaaaagtaatcgcagtttttgtcattactttcaatggcaaaaacagcgattgcttttgcaccaacctatacttccttgacatatggacctgaagagggcctaaaaatggccaagatccagtcatacacattaaagtgaccaggattgatagaaactttccagggttatggtaaaatcattttatattgggtgagcctgtcaatattttaatactaacttcttaaagattattaagatgatgaaaccaggttatttttccatagttacttctgttgcaagtgatattgtcactttggtctttctatatctgggcaggctttttttttttttaatgtctgttgcactgttatcagtgtaatcagacatagaagttattttaagtattatatatagatctgttagacaccatagggaaagagttaggagagacttcaaatagataaaattaaaaattcagaagtaatgtcagaaaaactttctaattgatggagtggctgtagttttatccttattttctccatggaaaaaacatagaatagagacagagaagaataaataaaatctgatgggagaatttatagaaaaggctgaaaaaaaaggtttcagaaaaacaattcctgatgttatggtaattgtactacatttaagtgacaagctgatgactagttcggggcagaggaagatgcagggtgagtagggattctagataatttattgaaaggtgaatagagggttgaaagaagagaaaaaggaatgttaattacaaaataagaaagatggagacttttgaaatctaaattatttgaaagcataacttcacaatttgaaggcttgaatcttatgcctgctagtcatgaagttaaaaacatagctttgaaaaattaaagtaagtgctggaaatttgaagagaagttactggctcgtagtagattttacagatccctcttggaaatcaggtaaaaaatgggaggtataggtaatcagaatgtcataattaagcttgatttaatagataacgcaagattatatgtaataaacagaggatatatgttcttttcaaatacccatctattttaaaattggttatgagaccacacatacatacacacacgtgctaaaaaccaaaaacatgcaaaactcaagaagttaacaaaagtagagaattgtacagcctacattccattctctggcaaccaggcagtaagactataaattaaaaaagaaagctccccaaaatgtagctatgcagaaatttaatatcactcttctaaaaagtctttaaaaaggaaacatataaattacttagcaacaagtcacactgaaagcaatacattatcaaaaatcagaatataaccaaagcaatatttgattgaaatattcaaagcataattaaaattgtttgtataataactctttaagaaatgtgtttgttataagacaaccaaatagaaatgaaccaagcattaatcttaaaacactagaggaggctgggcacggtggcgcacgcctgtcatcccagcactttgggaggccgaggcgggcagatcacgaggtcaggagatcgagaccatcctggctaacacggtgaaaccgtatctgtactaaaaatacaaaaaattagccgggcgaggtggtgggcgcctgtagtcccagctactccggaggctgaggcaggagaatggcgtgaaccggggaggcagagcttgcagtgaaccaagattgcaccactgtactccagcctgggtgacagagcgagactccatctcaaaaaaaaaaagagttagtgtaactttgaaactaaaattggataaggccaacataaaaagagagagaactaaagatgaacattactcaagtttataaatttaaaaatcttaaaatgttaggaagtcaaattcaacaggatctttaaaaacagtttattcttagaacacaaggatgatttaaaatccaaccgattatattaataaagagaaagccagtgtgattgatcatcttgaaaagttgaaaagcatttaataagatttaacctgcatttttaacattcttacatcccttctagccgtcaaactctgatcgacttacacttaagactgtgtctttggtagcctaccctattccacttttattacaaaggcagctcttaagacataaatccatctcttcaggctcgaactgcaaaacacacgtcgagaggtgacaatgttgggactgtcaaaaagaacttaaagagtgggataaccagccgggcgcggtggctcactcctgtaatcccagcactttgggaggctgaggcgggtggatcacaacatcagaagatcgagaccagcccggccaacatggtgaaaccccatctctactaaaaatacaaaaattagctggatgtggtggcacgcacccgtagtcccagctactcaggaggctgggacagaaaaattgcttgaacccaggaggtggaggttgcagtgagctgagattgtgccactgtactccagcctggcaacagagcaagactccatctcaaaaaaaaaaaacaaaaaaaaagagtgggataaccagtaagatctaatatgttgggttttaatggagatgtttaattgaagcatatgtttcaaaattctgattattacatactaaatattttgtaaaataaaaatgtaatagaatatgataagaatatattaatgacagcaaattaacaagagtaggaattaagtgctatttgcaatcaaagtcacaaagcttttcttaattataaaacaatgtgtttgccagataagcagtctaccaaatgcagtttacaaactccaacttaatctgcatacattcaagattcgccttctcctcctcacctctttgatttattctcctccacactgatggggctctgagagtggaattccttattagttaatcatgttctcttctcacggcagttccttggggggttatactatgaaagtgggctagatggattctctgagactcctgtttgacccaagcacatgtggcgtataggctgtagctcccatgagacatgcagtgagataagactggtaagagggagcagggatgtagctaacccggtagctttaacaaaaaccacatttctgaaagggaaggagctgtgcccagagaaatcagctgatgactcaggatcacagtagtgattcctgagacaggagtcatattattacagaggaacatagctggaactggatggaccaagtttcacatcaccacatcaccatttactagctgtgtgaccttgggcaaataaatctgaatctcagtttcatcatctgtaaaatggagcaaataataactaaccttctggggttattgtgacatgagcacatggcatgtgtgttaatgaagtctgttcttaggacagaggctgttttattttccattctgctttaagctgcttattggatattggcatgtgggtgatagccacagggagggtagaggcctgcaaatgaatgtttcccctgagtgaggcacaggtgcatgaagtggtattctatccaacaggaaaattaagtgtagtcataaggtaggtggcagaaggaaggcagcattaagactcaacccatctcatctcgttctccaacacacccggtacccagctgtggtaaacagtgctagtatttgtcttcctccatattctttcttgccaagtgcctttccaacctcctcccacgtctccttcctccccagatattgtgtgccttcctgttgttgcccaggttcccaaagtcctatctttctaagaagggacctgtttttctgaattattctcttcctctttctatataatcaaatctctaatttgtcccatagtgaacggtacagtcttgaaaatggcataaggggttctaaatcgccaggtacccctgctgctcatccaacctcatctcctgtttgtcctctcactgtgcctcagccacactgacgttcttactcttcctgggacacacaagcctgcgtcagcagttccttctgctgggatgctcttctccaaagtatctccgtggctcgtcccctcactccttcaagtctttgttcagccgtaaacttctcaatcatgcccatccattctcaccacattgtaactgctacccacttcttctaagcattccaattccctcttactctgttcttgttttcccctcatagcacatatcaccctttactactatataatttgcttctttataatgtttgttacttatgttctgtcatcctccaccaccatatcaactaacaaggtcaggaacctgtgtctttcctctttactgacatatcccaagctgctgaagcaacaggtgctcagtcaatgtttcagtgaatttactagaactataagtatgaagagtctcctatattatgtcttaggtagacaagaaatagataaggaagaggaaagatacagcaatcaaggtagaaaatgactagaggaacaggcatggttttaaaaagagatccactgctatgatatcaagacctgagtggactggaatgaggtgacctggattcttgctttaagtttaccaatgaccttagccaggtcacttaagctctggggcctcagacgttctttatctacaaaatgagaaaactaaactaggtgaccttttgggtcttatcctactacccaattctgtgtttgggttttactttaggaagaccaattaacacttacggaaacattgcctggtactaactggcatcaatttcacctaatgtctcctgaactccccatctcccaccaaaggtcctgggctgggatgatgtcttttagtctatttccatcttttcctcaagggccttatgttcgtataggtctcttaaaactcaacccaagaagctaaactgtggactggggtttcagaagccagggctttgctcctccatcgtaaaatctgagtaaacccacattgttttatttttcgcatctctaaaattgagatacagcaatgggtcggcagataatattagacagaggggaataaggtgcatttgatggagctctgctagaaatagaagcacatcaggtgccatttcaggaaattacacgggaatttggctcattatccatcttgctaagctgccacatcgtaaagtcacagactattaatagaataccattgataactcagagtgtgcaggtagagttcctccatgttgattgtcgtacacattgtctccagtttctgaagtagccatgatttgtttgtgttttaaggtacactgttttcaaagaacagcctttaaagctcttttgaattcaaagatctttcagttactcaaggaatgggtccagttttcagattctccacgccatgggtgcatcttcccttcagctttcttcattttggtcattgctccagatgttcattgtttaacacaagtgggtagggagacggagaagaagggaatttcaggctcatattttggtgtcatgggcagatcttgggtgaggttttcattgttagttaaactaagtttgaaggtttacactgaatttctttccctaccgtcctctttggctacttaaatagatcatcaggactgtttgttcttctgttgaaagtgccccacactgccctgggcataagctaaattctttctctcccttttagaagagaagccagattgctccaaggcccgctgtgaagtccagttctctccacgttgtcctgaagattctgttctgatcgagggttatgctcctcctggggagtgctgtcccttacccagccgctgcgtgtgcaaccccgcaggctgtctgcgcaaagtctgccagccgggaaacctgaacatactagtgtcaaaagcctcagggaagccgggagagtgctgtgacctctatgagtgcaaaccaggtatgcacgagctctgtctcagcagccttgttcctttgcatcagagggtagcagatccctcctcagccacccctggcctctcctttcacacgaagatgggccttctcaccggtgtcctgtgaatctgccactttgggctaatggcagcttgacttctggccttctagtcagagaaccagagtgatcatccactggtacataagcgccttcggagagcgagcgtgtcttttcctcttttcttctttttttccttcaaagtatgcttgactggggaggtagggttaaaatttatggtactatggcaatctgcttcatttccccagagaaggtcagagaccttatttgcagctatatctgccactttgaattattacatttaaaaacaatcatcatacgtaaaacagaaagttatttttagatgaatacatgcatcaaaacgccagaagtttcataatgcaacactcagccccaatctttctctttgccaattcccccgcatctgccctctttactttatagcatgtgccaagtcatctttgactgtttactcaccctctttgccaacatttgatgtactgttgtatcccagctgtttcttgctttatattatttctaacatccttgctcttgtggcagcatttccgatgtggtctgtgaacacttctgagttatagcgatttcctctttgcaagtttctaatcatcggccagttgtttttttgtttgggtttttctttttctttctttcttttttttttttaactgctagataaacgctccaagcaaagtgatcctttgtccgtctcttgaactattctatcaatcagaaatgcctctggctaactgtcactatccatgtaaccactgctggtttaattctttctctgtcttcattgtagctcttaaatatctcatccccacctctttccttacacagaaaatttgaggaatattgcagttctatagcattaactggagtaacatgtcgacactaggactgggtttgtggaagcaaggagactttggacatttgtcaagagctagtatttcatttagggactccaaaagcaagtaaatataacaataaacggtgcctctctgtttgcccctttcagttttcggcgtggactgcaggactgtggaatgccctcctgttcagcagaccgcgtgtcccccggacagctatgaaactcaagtcagactaactgcagatggttgctgtactttgccaacaaggttagtttgccattagtttgtcaagttttctcctcatttgttagcatcatctaaggtacattttgagcatgcagtttgttttcccatgagaaacctagtcctttcctgtttctctggaagaaatcactgaactgtttgcattacttggtatttatatgtatctttcctcagatcaaaaccaggtgtcatcaggttaagtcgttaaaccttatagattctttctgtaagggtgcctgtacacttttgagggctgggacctatataagcaaatatgcccctctgtatatagatagggaggcaggcagtgaggtgtctatcaagagtagacacatcatttgatcctctgcagtgaatcttgtaggtgcttaaacaacatgttcaatgtgatgaaacattgggacccttgatgtttggaatcacacatctacccagacccatttcttgctgaggtcaagaggagtcttaattcttacaatgctttctggaataacaaacacatctctctttggcttgactgcggggaagagccactgtcattttaaccctagtagcagggcatgcacttagccccctagaactagtttttctctagaacatgaggatctccgggtcctgtcctttttagtctacaaagcaccaccatagagctgtccctccttcgtacttggctttggggaagactgttcttggaaatgtagggtttacagtctgttttcccccgactactcacccctcttctctgccatgacctcccttccatcttttgcaggtcaacaagccatctttatgactaagtcatttcatgtttttcagctttcgttctgcgtttaataggatgagttaaaactgtgccttatttaactcaatttccaacctcttcttcctcagtcccagtgctaggcatttagcttctgggtttgttgcatgagtacctgtgattatgcaaatggttggataagataggagtagatgtggtccataggtaaggtaagtatcagttatctgtccgtaattgaagagacatccagaatttgttctgataattactttttccttctttcttctcataaaataagttaaatccttggcatctcctagcctttgttctgtcaaacctagtattctctaagacatatcctttatactgtattataaaacagatgcaaagatttttgtgaagataacatacattggtgcagccaccttcctatgacattagaatatgataatttatgtgcagatgcttaggaaggggtgaaatatcttgcaaacataaggtattactaatcagtaaaggagataaatggagcatcgctaacagtaacagatgtcccttcagggtcttcctgaaaaggaaggtggtacattatattggagaacctaattaatcaaaactaagccggttgttaacgaggtagtcctttagtgaggaaaatggacaattctcagttcactattataaatgccacatagagccatctgcacataggaggcacggtcagctattttttcagtcactctagggggttgaaatgggtagaagctacaggaaggtatatttagtctcaatttaagaagaaactttcccacaactagtgatgttctgtaatgaattggctgcttcctgaggcagacagagctccttggagctggatagatttctttccgtctggatggccacctgcccggaatgcttacaagaattgtattaggttggaaaggaggttgaactagctgccttccattttatcctcaagcttctgtgagtctagaaaataaaacttgaagatgattattactgtgttgacataattttgacttcagcattcaaaaatgaagaatggccagagttaaatttgcctctaatgaagacattgaaaacatagagaaggaagtcattcaacatcccactgtaaattatttgcagagaagggataggttctcacagctctttagtttcctgtatgtcagatcatcagtgacccatactcatcccctgctcatttgttcgctttgaacagggtctcctcctccagctctctcacgagtcctgtgcctttgcagttgccactacctcttcccggactcccttctgcatacatataggcagcttctacctctccttcaagactgcatttcctgctctttgaagtgttgtcactcttcggcccctgaagatgacttaagtgtccctctctgctcccttgtcatccatcccctgtgtatctttttatcatagcacttttcataacacattgaacatactgatgtttttttgtctgtctctcctgtcctgtgtgattgtcaaggaaagggagtattttgtagcctcttgtacctaaatataatgtgtcagcccacatctgttggtgaatgaatggatgaacaaacaggccctctcttagccaagatgatttatatgttgaagaaaagaaaaagaatgaatatttttagtttctagttaccttcctgccattgggttgtaatactactccctgtctcattttcaaatccttgcacttttcccccagtccccactttatggtgcggtactcctcaatcctgtagaaaccctccattccaagcacagcagtcatctctcacagcatgggatgcctttcactctccattccatctcttttcatattgctcatccagcaggactctaattaatttctcctctgtccacgtggtcttcatgcttcaaccaacaggtcccactgcctagaaacttcccacataatcctttcctatgctgtcagttaattatcgactttcatacattgttactgaattgtcgaatgcgtgaagtcttgtcttatcagctatacgatgttcctaaaggtcaggaattgtgtcatcttttcttttcctctgtatgcattagtgctgaatgagtcggtaaatgcagaatatactcaagctgtggcttagacccattcagcctagtttagcatattcagtggattcctgcttactaaggagggtgatgggatgataggttgtacattgattagagaataacaacccaaataatcatgtgaaaatggaaaaaaaaaagcctaacatgtaataataatggtagtattttaagagaaaaactacgtaactttattcttgtgtgtgagccatgtcaaatgtccactctttaagagcatatttaggcataaagaagaagattatagaacatataagatcctattatgattatttgacttttaccagcatacttataagagcattgttaagaaattagagccatttgagagcaaagctgattatgtggagaaatcaggggagaaagctatttacattttaggacataataaggtaaaatatctgaaactttagctgtaaagaattacattcagtgaaagtaacaactccctttttataagaatttattgcactttcatgggctagaaagtgggtttgtggacttttctcccctatcttgaagaatacattcctccctccttcattcccatccaaatggaattgcccttccctatgagactatttcacccattcgggcccttaactgccccatttctgtgtgagcttgatttgttagttttctctggaattgtatgttttcagttgattcattcatctattcatcaaacatgaattgagttcttaagagtgacagacactattctccggatgttcttactgtgcatgggtttcactttccacttctatccctcacaaatactggttttcccttctacctgtggcctttgtgagtataggctcttccttatttccttgctgcctttctgtcttgtttaatggcctttcattttcacttcttttgtgtcttttctcttgaacttcatcctgtttaaacatcattcttgtgtgtgatgtaattaatttttaaccattatttgattcttccttccctcaacttggcatagatttccaggcatcccgccgtttctttttatccttttttcttctgttggcatgaagacatgatatgagttatatggcagtgcattctacctttcaggagagggtggagagggataagaattagtggctctgggacttatactgggcctaaacactacacagtgacaaaaagggaaaatgggactgtctgtgaggtttaggacaccttgtggtccttgaaagtccctttgtgagtgtctgcatgtgtgtgcatgtacagatgctgctgtgcataagagaatttacaacagaaacttaaaagacagatacattaatgcaaattatttctttgcagggaagaaaaaaaccaagatagtctttaagtgacatatagataacaatagcagtcacaccttaaatgtgtaaagtgccttgctgtttataaagcattttccctattcatatcttaccatcactttaattctatgaggaatttataggtatgagaatggagattgagataataagagacttgcagaaaatcacaaattttccttggtacaagagacagagcaggttcaaggcttcaacccaggttttttaattttttttttattgaaaaccctgtgctctttccactggagcttttttgataacaatgttttgttgtttttaagtccaagaaatatatcggggaatatgaatttatatctcaccaacacatttctatctgcataccacatacgtgtttcagttattcactgctgtgtaacaaccgccccaaaagaagtagctgaaaatgacaaagatttattctttgtcctgattctgtgtgttgactgagcagttcttctgtagccagctggcaggttgactgagactggatgtccctcccatgtttggaaactcagctgggatggctggaaagacccctctccctacatgatgtcagaagcaggagaggaagttgcaaagcctttggagaccaagagttggaagttacagaacacttctgccatgttctgttggtcaaaggaagtcccaggtcaagccctcattcaaaggtttggaaagtaggttccacttcttgatgagataagccacaaagaatttgtggccatttttaatccaccctaatctacatttaaccaagatagatgccctttagttttcattttctgattgcaggaatttggtggtgtgtttcagaaacgtgattcttttccaaaaactcatgcccttctggccctggaactctgggtcttcaggtgaaattcgggcagcattatagttaagccccctgtgtgcccagcagctctttttctgcttctttcttcacttgccatttggcagtccacccaggagcagacacgtgatttaagagcctctgagccaccgcttcagctttaatatcatttagccaaccattatttttaaccttccgcttcttgaagagtgctgtgaccacctaggttaaactaggttttctcccatcatacaaaagggaatgctactttgggataccagaaaatctgcctgataaaaccgggtccatttttaaaacaaaacaaagcttgcaaagatgttgaatagagattctcctctgtaatggttgagcttacctgagagaaatggattcaccagaggcagatgcatttgaaggatggatccagcctgggctatacatctgagagtccatgttctcctggtgtccaccagcccagacctcagcccaactgggctatttctcaagaagatagagagttctaagaccacagtgttttctctgcacttcctactccttgctctctccagtgtttggacctaattttacagactcttcactttgcctccgtaatttttcaccagtgtttcagatacaggcttacacggtagacattaactagttaaaaatctagacagtaatacctccaccttactcactttcactgtaagtcacgagttttttaaataccctacgccttttgataagtaactttgtacctttttattattgacaagtcacctattttaaatttatttttatgaaatttgtcccaaactttttgttctaaaagttctgttatcaatttgttttataaatatgccgttcttaaaagttattgagaaaagtccaatccagctattttaaggtagaaataaattaagtcattgtttataatgtccaaaaacttaaaatagagtttcttctgggttgtgtgcatttcagaaagccagattcccaagctccctcctggctcctgcctctctctgaccaagggcctgatactcttccagaacctatatctggaacatgtgtatctcttgtgttctgagacactagaccaaaaatcctattttatttttaaatcaatcttcagaagtatttttttgacttgtttttttttttttccttagcttcaaggtaattaaaaatgttagattatctgtcagctaatatgttgactaatatgtgacttctgttttcaccaaaaaatgtaatagaatatgttggacacatgaaattctaagtacaatttcactagaaatattgacaagccagaatcacagagctcaacacaggaggcaggctgtatcactctcctgtttcatagagggagcattgtggagctggaagggtcctagccggtgcacatcagcggaacaggtctgtctggcacttaccactgagctgcactgtcccttgtggccctgggctcactcaccaccaggccctctccagtcctgcctctcaggagccctaacattctgtgtcatgcactttgttattgtctgtaagcagacacatacctgtgagtaaaccattccgtagctaaagaatactcctctgcacatcacctggtgctgttcagaaagggcacgaatcatgtgtccagagctagaatccaggcccacttcggcatgagtttgggtgaggctctcacattgtctggctcggttttccagtcgaagaaaggaggggaggaaggatttgattgtctcaaaagtaacttctacctctaaattctttgactttccaaaagcctttagaagggaaggaacccaagccgctagcgacaggagactcctgggaaacaaaggtaaagaaaaattttaggaaatttcagagctcagaaaataatgggagagatatatggctcgcctagggataagaaaaggagaaagtccaggggaagttataaaagaattatgggttttttctttaaactttcttaaaaaaacaaaacaaaaaaaaaccttagaaacagcaaaatgaaataaactactagagtaatgatttaagccagggtaatcagaactggttggattgtgaaagctgagtaacaattcagtaaaatagattacgtatttggtcagtggttagttgactattgttagttaaccttttttttttctttacatctataaatagatagtccctacgtagcagaagcagagaatatctggccaaaggctgactccgcaagataaggatttactctgttaaactgctttctaatagaatgtcgatatctctgcctgtcagcctgccttggtaaatgtgctggagagggccatgtgtgtatggttcctggtgcccacacaggctcacctgtgtgaaactgcatcagcccatacatggctacttgctggctcctggacccatatttgcacttgtttctccccttctgttgccacatcactttccctgaggtcggattgtgtgtgtgtcttctctgtcttcagctgctccgtattcatattgttcttttctgtgttttacatttaatcgtgcatacacacacagaataatattcatggacaagttttaggttctcttttcctaactttatgattggaccatttctttctgtctcttaaaatgaaaaaagatctactcaaagtgacttttttccttgtttgaacctcagctttatttctctcccataaaacattgaccttagaaggcaatttcccactcatatcctgtcctatcatcacagctccaaactctgtaactccaggaaaggaaataagataaaaggaaggatggtagtcccattgtgtctgaaaaatatgtcaaatatacagcccatgaccagagcgaaggtcatcaatgtcgtttgctttcactataacatctaaatatttgcaccaagctgcttcaatttgaaattgtgctctcaagaaaattcattttgttggtgctgtcttgcattatgataatagaatcttagcagattgctagcacactgtttcttgtgaatagatagagatgtttagaagaagttttctggggttccagaattcacagcctgaaattgactcatactggatgaggccagccgaatggaatctttggcaggttatcccttcccttcagaagcacttgagttaaatccaattaatctaaccacatagctacagtgagtgaaaacaaggtacagattttaaaatgctccaatcggttaaaacagttaaataattacatactcatcgaggacctcatggaaggcagaacactgggcttggtgtggggtatagtggtgaataaaatgtggcacatgctttaaagagtcttaacatcttacagatatgaccaatgccagtttcaaaaaggctcccaagttttggaaggtaataagaaggaaacacacaacatgcacacacacacacagtcatctgccctcaaggaaagaatcaattaatagacagtctttctaccaaacaatgaaaaccaaatttaagaaaaaccatacagtaatatgccagctttaaatccaaactgagaaatcaaggacctcaaaaagcacatatacatatggaacaacagatgacaattttttcttatccctcccttccctcctgaaaactcaataggacaggagggattttcttattcctctgttctggaacatctgtctgcttctgagaaatggaacgagcagcaggatcaagaatcctttagtgctctgtgtgctcaaatgcttatccttccgtggtagagctttccaaagtttgtcaactcttatctccagagctacagcccataactctgcggtttgaagcctttaggagggtgttgggaggtgggaggatcacgcaagagtcagaggctgtcaacacagtgcgcatcaacccaacctgacaaatatgtcaaagccagaaacttcctgagggtggcttggaactgtcagggtcatgttcagagctcagaaagcacttctttttttcttcttggagacagttttaagtttttttaggccatcaaataatatttcctgtagatccatgtgctttttaccattgtgctaggcaattaagttgcttatatcatgcctactcaagctaaccagttttaactatccctgcatatgcattttcaaagggactttatctaattaagagtgttgtaattcattatcatgtccatctgttctaagatagtgtctcagagaagatggcacttaacagtttgggttttttttttttaagattgatctgttagtagacaaatttccataattcagttcatttttgttgttgtcgttccctttaatttgaataatttctccagctgctttttgggagtaaataaaattaagttatataataagtaaaatatgcattagcacagcacagatttaaaacattcctgactcctgacatactattatggtagcattctctctgtttttaaacacatgcagaaaaaaatttggaagtgtatttgaagctcatctttctcaactaagaaaagaacatctattctgttgccctctgtcacagtaatttttggcccaaaagagcgagtcaactcatgactaaaaaagccagagtctatattaaactctgatgtttttaaaacaaaataattgtaggaattccatgttattattggacctatccccagattgaagaaaatatgctttcctagaagtaaagccattgcccattggaaatgaactgtctccctagtagagtgtttgatttgtcaataattctcttcagatgcgtgcgtgctgtgtttcctgtactagggccttaggctttttttatctcaccttaaatttgacctagtgtctagccttattttgtatttgtcttagtcccgaaaacaagcagggaaggctctcagtcagtggcttccagtttaatccgagtggtcatggatatcaccagacactgtatatgtggccctccgagtcggactgagagaaggtaacttaactgaattccgtaagcctttcagtaaagttgaaagcggaatccacagcgtgataatattgaaactcagaggtctctccataccctcttttgctatgtcatcatcatggcacatgcaaacagaacagctctgcaaaaatgctttgtgaaattacttgcatagctaataagcaagtctaaaatgtaaaagccctacctgtaatgaaaataccaaaagcaacccaaatcacggaatatattttactcttcatgtacacctttacattggatatggcttattgggttccccatcattgtagttgcaacagtttgcagataattcagggttatatttggtagacatttaattgctaattagaacccaggaggtagagacagctggtttctcttggccttggtcagtctgttgtgaatgtattatacagcaagtggtttgtaaattattctttcctgactttgcttttgattgaaaagaaaggaagttatatgtcatggctcttatgataatatgatcagggactttgatttccatagctagatcatgaagagttttaatgataattcctaagacattagattgtggattctttgagggcaaggacccaccctatatatttcattctcatcagtacctagcacgggtaagtaatgaatgcttttaactaaattagatagacaattagtctgcagcaaaagtcctagcatcaaaaccccatagtgttcttggattgttcagggagcagatattttgagcatttgtcatgtgccaggcattgggctacccagcaggaataaaatatagtcgctgatgtctaagagcatatattataaagggaaggcaaatatgtataagtcattgtagtttaaagtgttgtgtgctttggtagtagaagtgtgcaaaaaacacaaagttagcaaagcaaacacatgctaattcctatttggagaacggtcagatttgacttttgaactgagtctttaagaatgagtcagagttcacaagatggagaaagagagaagggcattctaggctgttgttgatttttcgacttgtaatgtgtcttgcagcttaaaacattaacactaatcccacctacctttatgattcaagaaaaagggaattcatgacaatgttgggttttcttgagataaccactccattgcaagactgcattacttgtttaaggtgttttgttactttcctgtttcttacaagtgaagacgcttcttagtatggtaggcaaggccccatattactcagccctgacctccctctctggccatgactcctgccagtacccccataataaccccagtcctcctctcagtacatagtgtacttctggtgggctaacctattagtttaaacttaacacactgtattctttcttgcctttgtaaatttagtgtgttctttcctctatctggaatgccttccctctgtgcccactcccccacatttgatggtcatttcacaaactgccactcacacccctcaccaccaccacacacaaacacacacacacacatacagcatcagctgtttatctttgtgctgctagttagagaaggcatcatggaagaagtgatcgtcaggaatgaaccgaggtctctgaggcatgatggggggcttcagggtagaagatgcagagtagctctgacttttctctagctgctcttaacagcttgagtatcagcacagaggaagtcaaagggttgaatcacagtttgcagttagtagttcttggggctgaattttaccccaagacatgttttctttaatgtgcccctttttttctatttttaaattagtcactgatatttaaaaactggcatacttcacgtaaaaatctggcttctcttgagtacatggaaggtatgccctcattgagtttaccctttggcatggaatgagtagtgatgccctgttagaggtcacagaccttcttgaggtgtctagagtccccctctactcttctaggattcctgcctgattcaggtttgccatctctgggattaagtaagttgggtttgggagacagatacagaaggaggataaagaggcaggaaaggtaaaggcgttaggaagatggtggttcaagtgaaacaccgtgggttttgggctccgttgttaaagaggtacagtcaggaggaggttcaggccgcagagaaaaggaaacgatctggggagtagatgtctcagtgactttgaagtgtcagtgtggtagagcatgggccagggagaactggaaggatggaccattgtgatcagcagataggatgtgtgacttcagagagttcagagagctgtggctgcaggactgagtcaccgaagtagagggggcaacaagggtcactggattccaaaagatcaagtgaggccagagtattgaaaatactttgtccacatagactctcaagcctctcagattataatcatataaaacagctaacaggtgttgtgtgcttctgtgttccaggcactatcctgggtgcttttcatcagttcgtttaatccacatagcagtcatatgatatgtgggtactttaatcatccccactgtacataggctacaattgaggcttagagagattacttaacttactcaaggtcacatagttcctaagcggccagaacttgaacctaagactgtgttgttgccaaagtgcattccccaaacctctgccctctaaagcgttggataggagacagagtcaccggaagggaaggtttgcatgagagaggaaagcaaccatgtgcaagtagccagtggtcaacttggagaatgctgacctcccttccatcccaggtgaataagtgagtaggatgtggggattctcagtctcactggagatggctataaggaaatagaatctttaggggagagccaggtaaatgttagaaacaaattcgagtggtgcattgtgtgatatgttcggaggatgggggagtttgtctgcagaggaaagtttggaggaagcaggggagtcagttggaagggatgagtcccagagcagtgctctctggggatgtgcattccttggaggatgagagacaatacggtctttcactttgcactgatgacaaggatgagaggctgggaattgactgcccaaaggaatccaagtggatgcatgcttaaagtcatctgtttcagcactagctcaggccccagatggttctggcggcctgaaggagtgttagcagccaggcaatggaggctttgctcagattttcaagtagaaggttagtccagacatcgttggtgtttgttctttgtgtgctctggggagaggatttaatagtcaacctcccattgtgttctcatttgtggttatatataaaagcttccctaaactaaattccctaaacttagggccagaaccctgtgtatccccagccgcaatccagcttagtacctgctgcatgtacacactcggtaaacagctacaaaatcattacgtgttcataaacaagctgattcattgttccaaagcatctattttctgaggcagttggaaattccactctgaagtgggaataacctatgttgctaaactaaaacttattctccacttcccagcccagttctcctttccacagcgtgatgtgccagtttcccttcctccttttccaaactagtccttcatgcagctctcactcccatcctgtcttactctctaaagccatcctaccagccgtgaaagcagatgccattgtcttcccctagacctacggaagtgaaggcagggagccttccgttcctgggacttggccagctctcgatgtgtgatatcggattgttgagctggactgagtggcccaggatttctgccagatcccagctgtaacatttcaacaggggcacgggccctgcgattactttcagctgtgtttctgctgtgtctgtctccacccccccaccacccaccgctggggttgagtcccttcaaaactaaccctgattttttttttttttagccactcacgtcaaggtagtaatttgtgaaagatgccgttgttttctccccaccacacctactttctgtggggcagagtcctagaagataattgttaaattcttataggaaccacgtagacttacaacttctgttctcctgcagcttataccactttcctttcaacttagcaccttaagataagcttccggagccacatgccagcctcgaggaggaagctaggaagagaagagcttaatggctgctttattattattaccagtagtaggaaggcaagggaatattttattttatttttatttattttataaattttttatttccataggtttttgggaaacaggtagtatttggttacataagttctttagcggtgatttgtgagattttggggcacccatcacctgaacagtatacactgaacccaaacctaattgtctttaacttataccttccctacatgtgagcatgtcctttgattcctccccccagaaaaaaacaaagcgtaaaacaacaacaacgaaaggcagagtgattttttctggtggtcttcaaagggaaagtgttgaagaaggtacagtttctgctcactgtacacaggggagggatggctgcggggggagagtgtgatccccagggcagggctgcacttgctgtggctacagcacatctgtcagtgttagggggtgtaaatgccaggaaatcacgcaggaataagcttgagacaggggagaaagggtgaaggagggttagttattcatacacagatagtagtaaatctcttatggtgaggcacgaggaaaactgtgagcctaaggaactttcatagggaggagtgctgttttccataagaagggttggaccctcagataggaaacctgtttctttttggatattttatttgcagcctttaaaaaaaaaaaaacttacacattcctggaaagagtaagaaatttaatcagtagaaagatagtacatcgaatttaattaaagttgcagctactttttatagaatagcactgtgttttatatgtcattataatttccattcccgacaagctatttcattaacacactgtgtagaatcctagtaacacaagggctttgccctttttgctcctcatttatccttgtttcctgactaaagggcgacctcccacccacctgtaagtagtttttaatttataggcggtcatgtctccacttttgaaggcctcaagcactcacttccggtgtgtagtagatccagtattgaaagaaatcttttccagaagacctcactgacttgttttcctctaggatacgggcagaggaagatcagagtctgctggggaagatgaggaatatgatggcttgctgcttccgagctgcctcctctgcagaaggagcctactatggggaatgttaggataacatcagcacccacaccaggaggatacctctggggtgacggggcgaggcagaggttgaggggcattcctgttctttgctgaaagggctgtgggaggggcaaacaggactcctagccctgtggcctcctccaggaatctcctgtaggttatcttcctttaaggtttttctggtcattgtagtaaaacaaactgttgacccttgcgcttagttatgtagggtctgaaacatgcctagtggtagggagacaacagcatctagcatgttgtttcttttccggccttgcttagagttctttagtagggaaaaaaaagttatataattattatgcccccacgaaaaacaaaacgtcaccagtgcaaaggccctatcttgagctgggcctgaaggttgaggtgcttggagaggaggaggatcaggggagtaagggacacaaggtgactgatgttcctgaaggacagggtgcaggtgagtgagaagaggatgagctgaggtcagtttgcagcagtgacgggaatgggaatggcagtgatagaatcaaaggattttatatttagagaagagtttattatgatccacctgtctcactttatggatgagaaaacagtctgcaagagtttaagtagcttgctagcagtcacacatttttcttctttgggtgacagtattggataaattggtaatatttctgttcttttcttccctcgtggtatctctcacttttaagcaatggtattcaggcaggaaggagtctttgtaagtgatctaaaacaagtactagtaatcattgttctcattataatgttaaaactagttgtacttgttttttgcttttttgtttttttttagtggaaagtacaaattaaactgtgaccacccaggctttgcgcatctaggcacaaagttcttggaaagtggattgcaaattcccatcagcagactctcctggagagcctattatatgggcagattctggagccgctccccaaacctgcagaaaaacaatgtttgagtgggtaccctggcatctgcattttaaacacattccatagtctttccttccacatactaattttgaaaagcactgtacctagaagcttgcagtctaaaatgtataaaaataaaaaatataaaacaatacatggtctaacccctgacttagtatccatgaaaaagtttatttcagattattggttgggtacctttatcatttttttactattatttataagacaagtaagacatgccccctgcactagaggaattcacaggagaaacagtctgattttgatttagtatgatgggccgatgcacttcaagagttactaccgttacgtactgttgcaagtcagaggagggaaaattaatcctgtttgttttttgaccagagaaggtcttacagggtagatggtcttaaggttgtggggaattcaccaggggcaagggagaggcagggatttgaggctgggtggacatgagctgtggctggagtgataaggggtggtggcaggtgattgagtgacatcagatcatcattgttgctggagtgtagggtgtgtgcaggaaccagtagaatatggaaactaataacaggtagaggcagacttaggagcaccttgcaagctatgcccaggagctcggactctgaccttctggcctgcctgggattgtctgtgaagtccaggaagcaaaggacatgaagggaaagcttaaatgtgtactcaccgcccttcagtcagcagaacctcctaagggggtgagtgccctctaggggtttccatgatttctgagttccattgtactcaggcactcaggtgcccactgagcttgaatccattacctacttgagaaaaaaaaaagacagctttaccaagtcccacctggctgcagctgtggttacattatgcaaaaatttattaatgtggtacctcgattgatcattatattaactctaaggattacattagaggctttatttttctggttacttgcaaatacaggttgcatcttctttgaagttaaaaagcccttagcccacatattgtatgattccatttatatgaactatccagaattggcaagtccatagagacagaacataaattagtggttgctaagggccggagatcaggggaaagggagtgactgctagtgagtacaggatttctttttgagatgatgaaaatgttctgaaattaggtactagtgatggttatacaaccttgtgagtataaaaccactgaattgtgtactttaaaagggtgaatacttatcgtaagtgaattatatctcaataaagctgttttgtttcattttttaaaaccttagcacttctgctcaaggtcatgcaaatagctctgcctggggtggcctttatgaattcacagtagagaaatctcagtgctctcctcactttcttttgtgtttttgttttgttgtgttactgttattcctgtcttgttcctctgcagttcacttccacttaagaaacatttatatgactagacatgataggtactagaagagcttatgttaaggtgagtcctcaagttaccacaaaatagagaaagagggtgctgtaagaaaagtgtggtgtttgggggttcagagaagaagctgttatccgaggttggcctagaaagacaactgggcataagggctggatgaggaatgtgcagaggccattagggcaggcagtgcagagacagcaaagtgcggacttatttggagaaaagagcatgaccgtagcaatggaaaatgaagggaaatactgggaaacagaattgagaaagggttatatggacttcagagtgttgaatgctaggctgagaaagtgatacataaaatgaggagtaatggaagataaattttgactgcagaagtttgggaactgagccttaggatgggtgtagcatggtttgggagagacagagacgtgggcagggggagattggactagaactggaaattggggagagggcttcagaaatgaggggtaagtgttgaaatcagctcactgcagcttttctcatgaaatgctgtttgctctgccccttttgtgttctcctttcctttgcttgctccttatccagagatggggataaagggagggaaagattagggaggacaaaaagaattaaaatgaagagaaagaatgtggtgaggacggtacaggttgcatgcgtcagttcttctgtagttcagcatttcctgttcatgactcagtagaggaaaatctagtctcttctagtggaaaacacagagaacaggaaaccctatttaaaatcaggtcacttgactaagctgtgtaactcctgttcccatcggtgaaagggaagaatacctcctgcagtgtgtgttaaccagagaatctagaataatcttactgaagaattttttaaaactacatgggactcatatcatttgtagatataacagacttcctgggcaaatatgggtcatgatggggtccccttttgttacctgacagagtgaatgtaaacatacctgttaaaagataactcatgtgagttgtattatgttgaaaataaggaattgctatttgaccatttcgaactgcaaaactggcagtttcagtaaggttttaacctaatagatagctacccaatagatatctgacctaagcccagatttttaccttttgtggttctttcatcagctctttcttgattaagatgctaatttcacgttcaggggaagctgtgaaaagtcaaaagatggcaacaggtagatcagaaggctttgcagggaaggaaacaaggagacaggagctggggtcacaccagctagcaaaaccaggatctttattatgcagtcagtttagttgtaaagattcagcataaaacattttcctttcctaggtgggttaataggtggttgggtgcaacttcagctcttctgtagcctgctggagacaacttgtaagggactttaaaaaaaaaataggaatatttaaatgttaggaagacgtaatgcatataatgtttactctttgggtgacaggtacactaaaagctcacacttcacctctatgcaatatatgtctataagaaacttgcacttgtactccctaaatgtattttttaaattgtaaattttttaaacaaatgttgggaaaataggtcaaacataaaaggggaaaaaagacttcatggcagacttagtcatggtgttcagtgtggtgtgactcctaacagcatagcagagaacccagcacgtaagtgcacgtgttcagtaaaggttgttcaagtgttgaaggacaacatctgaagaggtattttttggttgactgtacactctcaggtgtttagagtagaatgattccctggagcacgtgtgtaggcaagaatgtggaatcatagaagatttgtaagagaaggttaatcagctattcttgcgggatgctttcattgtaatcacatctacacattggggccagggtgtggcctgtcagtattctagccccatttatctataaactccagagagttttaagttgtacagagtgccaagtacaataaatgtaaacaatataatgttactgttatatcacagcagtatgattatgtgcttaccactgcaatggctagggatataagcgtgacaaagtatgggatgaccttatcaggcactaaaagcccagctcacatttactcagcgctagaaaatgattgtcctgcaggaatatagcgtatgaattgagagctccaagctctactcacacaaaacaggcaaacctttacttgaaaccactggtagaaatacaattgcagcaaaacctgaatgacctaacaccctcttctcccaggaatccaatagaactgccaccccacatggaagaatcctcaaggagcctaccttggggtgatagtggggtgtttaaagccacctttccagtggctttaatagtccttgatgcaaatcataacctaaagtaatttcttttctagttccatggttaactataaatgtaattaaatctctgggcctcattattgaagtacttgtggactataagcatattttaatttattaaagatccaaagaacaataagtgaacaaaccaattacttaaataagaaggggggacaaaagcacaattaatgaatgtattgatagttttccctgctgggaacattacctttcctgatcttgacctctaccgtatgtaaatacccacatacttcctgccaggatgtctttttttaggatgtcttccttttactcctgtcaacctgggaactcccgccgtcatcttctccaccctctgacccatacatctctccccaggggagtcccagggcagaaatctagcggctctttcctcatcttacattcacatgctgacacccagctgccctaagtttcctgtgtcctgcctctctttcattgtagcagatgcaacattttgtctcctcttatttcacctgcccgtatttgccaggcttctgcgtttagcaatttttgcagcagcatcgaagttaggggtgagagccagcacagccagcttgcagctcatggaacacccccattcatgcgtgcagagagatcgatgctcaggtgggagcttaagatccaaaaaattaagactttcagcttccaagatagctgtcataaagttcacttactacagcttaggccctctctttataaagagctcctcagtcttcagtccgtttcttttattgtgcacagtcataaattaaatattgctcaagatgagagtggacttaagacaatcacactgacaagaaaatactaaaaagctaataacttaatcattgaaccaggagtcagaaaatctctgaaaaaccctaaacatcagttgcagcaaaggagcaacatgaggccatttagcacgggaacactcactctgtattagcctgtgcaagcatcgattcacagaagagcataacagatacatatgaagatgtccctgagtcagccagaaaatgtttgttacgctcaataccagtctggttaagtaagaaatgaggtaatgcattttagaaatatttctgtcaaaatggttaaagttaaaaattggggtgtacataaaggagacaagccttagttatttgaaagcaaattatggtagaacccctcctgccttcccatttcccagtgacaccagataaaggaggcagtgtcgtatagaccaggtactttgccacagccactgccactttgtttgtggtctcccgacttctatgttgttgtttattcatggggttttccttcccttttctttggtttcagatgcgagtgtctctctggcttatgtggtttccccgtgtgtgaggtgggatccactccccgcatagtctctcgtggcgatgggacacctggaaagtgctgtgatgtctttgaatgtgttaatggtacgtggggtttctcttgttctcagagagtgtacatttgtgcagaggaggaggagggagggttcaacttagctgcttctgccttttacaaagcagggattaccttcaggggcttgctgaagggcactcaaaaaggtttgcttaagatccacagtgcagtaaagaaagttaggttaggaactatcattccacccatcagaaggaggattctggaaatgtaatagcagattgcatgtagctgtcatactcagctgtgttacagaatttccaaaacttagggatttcaggaaaaggatcctggagcctgtgagagttttcctgctgtcactcagtaactggtcccatggctgtcgggaggtgacctggctaaaactgcattgggcctgccacacttgggaacaagaaaaacatggctcatcttgtttagcattttcctacttagaacatctttgcacctgatcttagccaaaaggctgagaggcggtggggaagacatctttaatcagtggttggtcactgatagcggcctgctgtaggcttgacccacgtggccctgaaaaaggattcttgggtcacgagattccttctgacagaatctgcctctccctttcactttatatgggaggatttggtgtttggtggcttgatgttgattgagtttaggtgctagaaggaaggggaacctgcaacatgcttctctaccagaatattcattaacaaaaaataaaataaacaagttacatgtcaataaccattcagagcattatttagtcaatacttgtatacacaggaagatggagatggatttggacaaatacaacaaaattacacatagaaatattcatatcaaatacttcctgtaggaattcagatgtcataaggtctcctgccctcccaaggcaagaaaggttatgttgcagttgagtcctatttggttgcatcctgtgatttttaggcccgtggccaagttgttttttattgtttatttttgctttgaagaaacacttgcagtatggctttatggttaagaaagaacacagactagaattaataacctcagtttgaaaattgggtcctccactcactagctgagttaactttgaggaagcttcttggtttccctgggcctcagtttctacatctctaaaatggactgaataacagtaaattaaacaaggtattataggtgaactaccttgaattttgcctcagatgtaaataatctttagtattcttttttttttttttgagacagagtctcgccctgtcgcccaggctggagtgcagtggcgcaatctcggctcactgcaagctctgcctcccaggttcacgccattctcctacctcagcctcccaagtagctgggactacaggcgcccgccaccacacgcggctaatttttttgtatttttagtagagacagggtttcactgtgttaaccaggatggtcttgatctcctgccctcgtgatccacccgcctcggcctcccaaggtactgggattacacgtgtgagccactgcttccggccaataatcttctgtgtgcacactttctattcacatccagaggcacagttctggacattggggatgggggatagagatggtaaggttgaacttcctgacttacagaccttataaatacaagcatacaggaaaggggaacagaaaaagttctgtgcacttaaatcacctctcggtgcttctccccactctggtcattatttagccagtaatcacatccattaaacacaagcaaatggccaagcagaccttttttctggaggtgctacagtttgatttatgataggtgagattctgtgaatacttgtaccactggagacagaaatagtcactgcttccctgggttcccagcatctcagatatgcttcatccagtgctcatcacttggaaaagacttaacgctcatgcctgtctctcactccaaaatgtgaactgctggaggacaggagtctgtcacattcatccttgtgtctgtagttgttagcctattatctgcctcacagaggacacccagattttgttgcatgagccagtgaatgatctaattcgtatcatcttagttccctctagaggtgtctgttaaatgtcagcccataaatgggttactttgtaggaatcctccatctatttactgccctacactttaatcttaagtcatttgtcccctgaaaatatcatctctagtagaaagatttgctggtgtttcctatgggtgaggaaccggagtgcccttcttctctccttgcttcttggttctagatacccatgggtcattcctttcttatcagaacatagactttatgtcttgctccagtctgatgtgtctcaaactactaatagccgtacctccaccttagcaaccttgggatcagtctgcagggcctgtcctcatttattgccacttattatagagccctgacttctggaataggatttgccatctgtcctgagaagatgttgagtggacaaaacacagtcactacatctctggtcgttgcttctttcttgccaccataaacttgttgagtgatctttgctttcttcctaatcctgtggaactgtgtctattgatatatcagtcattcacctgtagaggagactaggaactaatactgtgaagattcataatcctacagaatattgttaagaacattgtctcaaagcctgcatttttcttcttttgatatatacattcatactcatacacacacatatatattgatagatgaatgtgtctgtgtatgtatatataaatatacttaccacctagtgtcctggaaaaatctgttgttgtaaggtcaccattagaagatactacatatcaaagattcattatcatcacttagaaaagcagaggtctattttatatgtataaaaccactcgcttatacacagaggatctgaggaaactttacagtgagaacagattctataagatagtgataaaatatttatgagaaaggagactcacagccatagaattgtaagtaaaagttgaaagtgaaaaatcaaacagaaagcacccacgggtatacagtccatcagtgcctatgcagttgtgggagttaaatgttaaattaggcccccagttttctggccatcaaagtgaaaaaggagatagggtcaaatacgctgttcttattttcaaagaggaaaaaacctgctggatgggacaactgtctctctaatagagatttttcatatggaaaggaatggatttcatcccactgaatgatgaagttgatcatgtgcttaattgcgttaacaccacaaatgcagaaactggtttcctgggattgttctcaataaaaagcaaaggcaaaatattaaaatacaactcagttccaaaaggtcagattgacacagctagaccgtaggtgcttggaacattgtttctcaattttgcaaactgcccaaccatggtgaggtagatccaaagaccccagttcagaagactgtgggtagaatgttaacatgactgaccccacatgcagaaatggattatgcactgccgcactcacttcctatgctgccatccatgtgatccatatgcttatgtttttttctttttaaaatcaactttaaagtgaaaacatacaattttaaaatacacagaactcgaaaactcgtgagttttgaaaacactagcctgatgagtagatgcagagagagcatcctccataaatattactttgtttttgtagtttgattttattttgttgtggcggagggatgggagagttgcagaccagttcatgacagtttgtaactgcattctctgacaagcgccgaaaggagaacttatgaggctttggctgaacaagatccttgttatttagaaaccaaaggaacaggtggtatgattatgtttcttttatgtgaacttagaagtcatcaaaatcatcacctagaaatatgacctccaaagcagtgttgtaacagccctccaccttcgtcaagaacccactgtatgtctgctcctgcccacaaacaaatgtcccatcagccgtcagctggagctggacaatggcctctactgttagatgggtggatgctctccacttaacacagtaccccctgctgtcttacacatggcccacctctcgttcctggaggcatttgggtttgaaatcctaggtgtagagtgtgcaagtgattatttggtttcttagatacgagcatttgtccaacgtatatacacaaacatctagataaaatggaatatcttggttggaaagtcgtagccaaaagctgactctgtctgtatgacctacttataaaacgttccccaagtgagtaaatgaattagtctatagtattgttattggatagaagccagttgaaactaccagaaatatttttagccttacggtatttaatactgaaccatttgttctgacagcatagttagcagggccagatatatattgaggctagcccccattcacagctctaaacaagtcatcagcacaaaagaggaagagtaccctcttcccagtggtgccaagagtggtgggtggatggggtggggatgggagcattacttgtgtatggcacaactagccaaaagcaacttcagggggttatgaagtaagttcagagaaaggggatctgaatacaacttagcgtgtgtttttagcctgttttgtgccatttgaaatacttctgttttggagcactgtccctgtagcactctgcttctcacagcagtattaaaatgcagcactaacagtgaggagcctggatgaaggtcatgttgcccacccagtaattagttcctgttttattcaggcatatacgaaaggctaataaaaactggaagtaatcttatgttggccctgacagaattttctctaagacagtaacatgtgaaatcaccatttaaaggggagccgtacccagcatcagcttgctcctcatgtaaaattttggcctagaaaattcagacctgcaggctgttaattttcaaaaaaaaacactagtacagaaaacattaagaacccactgtctatatagcaattatgctcataatgtttctaaggacgtaatgtcttctactgatagaataatggagatattctggcactttgagagcaatactccactcagtatgtgtttattgagcacccctcgtgttcctggggccttgttaagctaattttgttaaagagtgatacacattgttgtaatcctttctaagggttgttctcttccccttttcctgaaataggatatgcttggtgtcctccagcacacacacacacttcccctcttctccctgtggaataagccaattgaaactagcaaacatatttttagtcttatagtatttaataccgagccattaattatgagagtatagttagcaagaccagatatttattgaggctagtccacattcacaactttaagaacatgtcatcagtataattaataaagggaaaacttaaggatttaaaaacacacagaactcaagaactcctgagttttgaaaacactagcctgaatgaacagatggagagaacatcctccatgaatagtccttctcttttcactttggttttaatttgttttggtggagggatgggacaagctgcatgtcgaagctgcagagagttatctagaagatttagctatgaaaagtgatgaaggtggctacactaaacaacagatattcagtgtagaggaagcagccttctatggaaagaagatgccacctgggactttcataacaagagagaagcagtcaatgcctggcttcaaagaataggctgattcttattaggggctaatgcagctgataactttaagctaaaccccacggctgttaagaattatgctaaatctactctgcctgtgctttataaatggaacaacaaagcctggatgacagcatggtttattgattattttaagcccaccattgagacctactactcagaaaaagagatttcttccaaaatattactgctcattgacaatgcacctggtctcccaagagctctgatggaggtgtacaagattagtgttgttttcgtgcctaacacaacatccattctgcagcccatggaccaaggagtcatttcaactttcaagtcttgttaattaagaaaaacatttcataagattagctgctgtagatagtcattcctctgatggatcagaactaaatcaattgaaaaccttctgcaaaggattcactcaccattctagatgccattaagaacacaggtgattcaggggaaggtgtcagaatattaacatggagtttggaagaagttgattccaaccctcatgaatgactttgaggagctgaagacctcagtggaagaagtaactgcagatgtagtagaaggagcaagagaactagaattaaatgtggaacctgcagaatgtgactgaattgctgcaatctcatgataaaactggaaaggatgaggagtttcttcttatcgatgagcaaagaaagtagtttcttgagatagaatctactcctggtgaggatgctgtgacaacatcttcaccagataaaacgacaaccagggatttagactattacataaatttagttgataaagcaacagcagggttttagaggattgactccagttttgaaacaagttctactgtaagtaaaatgctatcaaacagcatcacatgctacaaagaaatctttcatgaaaggaagagttagtcaatgtggcaaacttcattattgtgttatttaaagaaattgccacagccaccccaaccttcagcaaccaccatccttatcagtcagcagccatcagcatcaaggcaataccctccaccagcagaaagattactatttactgaaggctcagatgatcgttagcagtttttagcaataaagtattttaaattaaggaatgtatattgttttttagacataatgctattgtatacttaatagactatagcaggggtgtccaatcttttggcttccctgggccacattggaagaagaagattgtcttgggccacatgtaaaatacactaacactaatgatagctgattagcttaaacacacacacacacacacacacacacacacacaccatcttacaatgttttaagaaagtttgcattcaaagccatcctaggcctcatgtggcccgcaggctgcaggttagacaagtatggactacagtacagtgtaaacataacttttaaatgcactgggaagccaaaaagtttgtgtgacttgcttgagctggtctggaactgaacccacaatatctttgaggtgtatctatcaccatccaccaatcagtgtagtttggtaggcagtagcatgtactaatagtctatattacaaaattctcttttaggagttctgaagtatattcaagaaggaagggaagatcccagaacttagaaacttaaagtttaattttgcagacgcaaaacacatacaaaaaatcactaaaaaggcacttctgtgcttcatattgagaagtacaaattacacagtaaattatttcttcataacacttttccacatccacttaaatcatccttttgtggagattgtggcaatctccacactgttctgagattcacatctacccctgataggtgaagaagtaattggtcattgctcctcaaaaaccacaggtagcctttttatcatatacttttcttaagagcctctataaatctctttgaacatcaaacagatttcattgtgttgtgtgacttttttcacccttaaagattgattgtgtttccaggctgtgtttttaggattctccatctttctcacttccactcccttgatccttgtgcttttgctagtgaaacctaagtgccacagttctctcgtcagtcccatcccctcctgcttaagcttctgcacaccctaccataaaaacaagtccacttgaagcagctttattcataaccagaacctgccctccacacttcctcagatcatgcaccagggttgtggcttcacccagatggtagctgtggttgatcaactcaaccaaataattagtattgattggtttattttttttagtttccatggatgttcattttgttagagtacagtattttgcctcgctctacagcctgcaaatttaatgtataaaagtactccgttttctatactttttggaacttatagtgtagctgcacaattcctttcaatcccaactcagattagtttgttagctaaaagtatatagaagaattctgagccatggtaagatgattcttttttaacattaattttctgaaaaaatgttgtatccatgtagcactaaggaaggagtttaaacattcacatgtagtacgtgtgcacacataaaatcactgcctcattcatgtgactttaagcaaatcacgtcatctctttaagtttcatcttcattatcgaaaaaactggtactaataatactcgttctgtcttcttagcggggttgttataaaataaatataaagtaattgtccttgagtacaatgcaaatgcaaatatcctccaaatgcggtgaaagtattttagacatgcaaggggacatattaaatgatttggggatggacagaagagcccttgaaagatggggatatcatcatccagctttcaccggcagattgagcagggctcatcacctcaggagaactttcttcagcttgggagtactttttttaaaaatagctttaggagacaccatgcaatttaccaacttaagttgtgcaattctgttgttttcagtgtatgctcagagttctgcaatcatcaacacaatcagtttcagaacattttcatcaagccatcagaaaactcctgaactgattgcagtcactgcccattttccccctaagctctcagatctaggcaaccactaatctactttctatctctatggacgtgcctatgatgggtgtttcatataagtagagttatataatattaataccttgtcttttgtgactggcttctttcacttagcataatattttcaagtgtcattcatgttatattgcatatcagaacttcatttctttttatggccacgtaatattttattgtatagatatactactttttgtttatatatcagttaatggatatttaggttcgttctttcttggctcttgggctgctaggaacatttgtttatagtgcttttttgtgggtatatattttcatttctcttgggtatatacctaggagtagagttgcttgatgatatgataactcaaattaaggaactcacaaactgttttccaaagcagctgtgcttttacatcctcactaaaaatctatgagaattccagtttctccacatcctcatcagtgctcgttactattttttaattatatccatcatagtgggtgtgaaatggtgttcattgcagcttagatttgaattccccgagtgactaatgattcgagcatcttttcatgtgtttattgtccatttctgtcttatttgaagaagtgtctgttcaaaggtttgcccgttttgattagattatttttatcgtttaattatgggagttctcggtaccagtttttttaaatcagatatatgattgcaaatactttctcccaatctgtagggttgtctttttacctttttgatggtgtccttttaagtcccaaaattgatgaagtccagtttatctgttttgttcctttgttgcttatgctttgaatgtcacatctaagaaaccactccctaatcaaaggccacaaagattaactcttatgcttccttctaagagcactgtaggtgtagctgttgtatttagatcataactctatgattcattttgagttaatttttgtatatggtgtgaggcatagggttttcttctttattcttttgcatgtagataatgcaaaagactttcaacctcaggcctggcatggtggctcacacctgtcatcctagcactttgggaggccaaggtggttggatcacttgaggtcagaggagttcaagaccagcctggccaacatggtctttactaaaaatacaaaaattagctgggcatggtgtcatgcacctgtagtcccagatacttgggaggctgaggcaggagaatcacttgaacccaggaggtaaaggttgcagtgagctcagatgacgccactccactccagcctgggtgacagagtgagactctatatcaaaaaaaaaaaaaaaaaaagactttgaaccccactgagtcttggccatcttgtcaaaatacctgtaaatgtgatagtttattcctgaactctcaattccattgaactatatatctatccctgtggcagtaccacatagtcttgattactatagcattgtattatgttttgaaattaggaagtaggagttctctaactttgttctcccttttaagattgttttggcaattctgggtcccttgcattttcatatgaattttatgatcagcttatcaatttctacaaaagagccagctaggagtttgatagagattgcattgaacatgtagatcaatttggggaatatttccatttaaacaatgttgtctttcaatccatgaacacgggatgtcccgtttacttaggcctttttagttttttgaaaatgttttgttattttcaaaatacaagtttgtacttatgttattacatttattcctaagtattgtatactttttgatgctattgtgattggaattgttttcttcattttctgattgttcattgctagggtatacaaacacaatttggggagttgcaattgtactctgcaaccttgttgaacttgtttatacattctgatagttttttagtggatcccttaaaactgtttacatacaagatcatgtcatctgcaattagagatagttttacttcttcctttccaatctggatgcttttaatttatttatttttcctaattgctctggctagaattttcattactatgtcgaattgaagtggtgagaacacacctcattgtcttgttcctgatcttagggggaaagcacttggacttttgccattaagtatgaggttagctgtaggacttttgaggatgccatttatcaagttgaggaagttccgttctattcctagttggttgagcatttttatcatgaaagaatattagattctgtcagatgccaaaaactgtgtctatcgaatgatcatgttgctttttttccttattgtgtgacatatcgtattaacattaatattttggatgttaaaccaaccttgcattcttggaataagtctcacttggtcatggtgtataattttgtttatatgttgctggatgtggtctgctagtaattttttttaagatttttgtgtctacatttataatatactgatctgtagttgtgttttcttgtcttggtgggagttattttaaatcaactaaaattaaagaatgaatgtagggagagtgtttcaaggcagagaaaaatttaaaaatcattgatatcgtgatgagacttctaaatatgggactatgagtcctcagcagaacataaccctgaagcacaatggaaggagcacaaggtttcagttgaagagctactgttttggcttctgtcgtttgctgtgtgactttgagtaaactacctaggatttcctcacttttaaactcaggataataatacctatgtcagaccttcattatagggattaagtgaggtgatacatatagagagtattttgttaaaggccaaacactattaaaattatacgtgtttataccatgtacagagaaaaagaatttaagagagagcactgggggaacagaacatcaccacttcaaaaaagaccataataaaatttttgaagcagaacaaaacctaatgtggaggcaggatcattcatttgaggtagacaatgatttaaccaaacaaatagaatcactttaaagcacataccagatatgtgagtgtcatggtcataaagtttagctttgtctgggatggaaggaagtcagtgtagattttcctagggggaatttctgttccttggtgtaaactggataacagtgtgttttattttattttgttttgcttcactttattgttttctgttacatgaacttacattgagttgagtaaatttccatcaacttataacctcctattagaaattttctagaggctgtttgaaaaacatcaaaggacacaactaaaaaatgactacaaatatgccttgtttgttttaactcttttcagatacaaagccagcctgcgtatttaacaatgtggaatattatgatggagacatgtttcgaatggacaactgtcggttctgtcgatgccaagggggcgttgccatctgcttcacygcccagtgtggtgagataaactgcgagaggtactacgtgcccgaaggagagtgctgcccagtgtgtgaaggtaagaaaaggtgctaattacagattaacaggagcatacatggtatagagttctaaaatcaaaatcgtcctaattcagtctcatccaaaagtaaaggaatattgaagttccttttttagccttttttaagacaccatggtctgtcttttagcatgttaaagccaggtagagtgtgtggaaacacttccctaagggaagctatgcctgggtgtagacaatgggtcacctctttccacaggcaacgtgagatgtcccagagttgttttccgttcctcccctgcagttctagcaattcctcagcaagtcctagggcaaagctttatcttcaccctggcattagagctcaccacctcctcacctcagattgctcagttaggataatgtgggcctcaccctgacagtctcagcctgccggcccagagaggaactaactctgccactgtcgtaatacccaggaccctccagggagatcagggacctgctactgcttctctgaaaatatgtggtggttcacatggggtcgtggtatcaggtcaccacctggtgacaccaactcaaggcccagccaggtgtcaggtgtgactctcaggaatctgctttgtctggattccccttttctctccaagaagtaatatgttcatgttccttcaacaggctgcatcttcccatcactgatgttcataaacaataagcatttcaaaacagttgctctgaatatcactccctgcaacccacacattttacagattaggatgttgaagttcagaagagaaaagtcacttgcctgtaaagtcactttacactgcagccagtaacaataaccccgtgcctgactgtgtctatagtgttcttctgacaacacaacactgtttccccagaaaggaaggtcttgtgagccttcctgtcctaaccaggccccagatcttcaatctgaagtcgcatgtgttaatcttatgcctgatctctgcacacaaagtgggagggcacagtgtcatgccactttccatacttcctcattttcataaaattttctccttttgatatttgagcaatatttacaacataatattgaagatctgaaaatgtttaaagtataaaaattgcattcctaacatagttcataacagtgagttcttttccctactagaggttattttacccaacataggagaaaagtagtttattttttaggtgatgttgacaattaaaaagaattacttcaaatttttaacctttctaattgttttgttccctacctgcccccagtctgcaatagttctgaaactgtgcagcagttgatgctgtaaaaatgtagatacgaacctctgtgtagtcatcatactgagttgtctgggcatggatccagttatgtctcacttcctggaattcagatccaggctcaacgtagaaaaatatgtattctaatactttttacacaggaatttaaaaaatcttctcttgctcaggtccattggccgcctccctctctggcagactgccttcctaacgctgtgatggcattattttaaatgctgaccttctaactgactttattataatgtcccactatgtccttagaataatgatgaccaaactctatgaactgtctggattcctctctcagcacagcagtagttgtttgttgaagccagttttttatgtatttctgagaaagaaaattgagtaatttatctggttgctctcaatagagggataagagagggtttcatatgcagtatttatatacttgtcagtaacctcagaaacttttttttttttacagtagctttggctacttctgtctcccacctggggctgcagcttagcttcccaacttatgggagaaaaaatggcctaagttcacagcgctcctccaaggcacagtgacccatggtatgtctagactagccttgtcatgaacaagtccacagcaagaccactgttgcccacatggtcgtgcaggtacatgagatagagttttagaagtaacaatatcactctgacttagggcattgttgcttccgctttacagttagggaagttgaggtttgataaacatttatgtctacaactgcgaagacattgtcagagcctaaaatggagtcatgttttctaattaccaacccacagctcttgccacaaagctttccaactttacagagtgataacacctgcacattggtttttagactacagatcctcttctctgggactgctgtgtcaggatgagtagacataaattcagtgtgacagcttcttttgcatgcacccccagagactcctcatgcaaccctgcgcttctgttgatcacagtgggaatagaactgctgatgactagaacccagggaaaaaatgtctctgggtactgacagagataagatttagaagatgctcagtctaactctgaactcatgttctcatttagatccagtgtatccttttaataatcccgctggctgctatgccaatggcctgatccttgcccacggagaccggtggcgggaagacgactgcacattctgccagtgcgtcaacggtgaacgccactgcgttgcgaccgtctgcggacagacctgcacaaaccctgtgaaagtgcctggggagtgttgccctgtgtgcgaaggtaaatcttgcagatgctaatgagtccctggtgaatgtcttctgttggagaagcttctaccagcgtacgttcttgtttgtttatttccttgggcataatgtctgcttcacgctgttaccagttgccaacaaatttatcaaacagctcaaactgatgatttgaggaaaggttgcacatgtgaaatgagaatagtgtggtcattattttgccattgcaaatatgcgcgtctgaatactttacagtataagaatatgtacattttaattaagttcactttgaacctaattaacacccaaaggtcagcctaacaaaatgaaattgaaaatgagaccgatgagtcaatcttagcacctttgacttgtgatgcttccatatgcccaagcgtcctggcaactagaagaaaagactggaaccatgaaagccaatttccactgcctagtgccgtcaccgagtatctgttctacttctcatataccaatggctgtggctttgcaattcctctagtgctgttatttatgtcgtggttacctgcatttgctatctctcttcttgttcagtggagggaagcctgaggcatcctggactagtttttctgtcccgactcctattccagctcatttcctccatcctgggaagattctctgcatacttaactcatgtcagtctttaatcttgtgtccatgtgtgttagtgcagacaagggcttgaatatttgtacagacatttctaatagagggtatccagcattaagaagtacatttgcatagtaaaatgaactaatgtggatcaaaaattaatccatgttgaagatggatctttctagaatttctaaaaacagatattgaaaaatggacttatctttccagaaagtcagttaagtagactaagtcttttaagtgcgaagaaatcttgtgcttccaccgaaatgttaataaactcagactccagagtttgcctgactagcttcatcagcctctgaggggctagacttattaaagaccttaaaaatcatataaaagtttaagcttgaggcctctctttctgttgacatcaccgattcccttgtcattactgtactcagagtgcagctgccacactccagaactttacagcttccagatgaccagttttgtggaagtcacccacccctgcatgtatatatactcctcccattccctaaaggcagcatttcagtgctgaaaaaaaaagagcatgtagaaatacatatgatggttgtatagtcggccttacaggaaagggtgccttactgaagcagatgaagataagaatgtcagtccctaagaattagggacaatctgttgccaacttgaaatatttaattacgaatatttgggacacacggtaaggaatatgaaaagcataaattcataatccagtaaacattagccttttaacctcatgggtcttatgtcataaattcaaaataaaactttaaaaacttgttgaataaaagagcctttcctctggaagtaaatgaaaggaaggctgatccttttgcacccaccttttgcatttatcagcatatccatcatgaagagtggagaaggaaggcagttggtgaacaggtagatatatatataactcatttattaccattttcttagcacacattgatgtttgggtaaggagtgaaacttagtgtggtcacttagaatttggtctctgcaacatctgcatagagttgtaatctaatcatctactgtttgagaaaagagttacagttttggtgagccattaatttgaaaaaattaagaacctcctggaattcagatacagcattggacacaaagataagtaagagataacctttaactttgaagagcctatttaggctgagttttgaattaaaccagaagaaagggaatgtccccgttgaggtatggtggggtaagtgcatcacatttgtacccaatttcatttaaccttcagagcaacactgctgaagcctttattatcccattttggagatgaagacattcaggtttaaggcgatttagatcatttcccccaagggtatagttgccattgtgtggctgagtgaagatcaacggaagtttgtcagattcggctccatttgtgcttgcttcccctgccccacacagcatcccagcctaactcatgccctgcttctagtgtcctcacccatctctactcacctctggcttttggctctgttgaggagtgagggcagtcagcggaggcaagggaggaaatcattttgcagtttgaaaactactccaggtattttgaatgtgatcgtccacctactgtctcctcgcagtttgaagacctcaggggaaagatgcctttgagatgcatccctgagttcacttctagagcctcaggtctgggcagccccctccacctcaacagagctcagcatccttgtcatttcagcggtaaagttctgctggccttttttcctctctgtctctttcatgctctggctctgatctctcatcaaacgtttcagaagattccattttctggttctcagaaataatttatcttgcttttcttgtttttgtttttaacttagttgagtagtgagtttcatatgaatgtatttactctccaataatgctttcattttaagatgtattaataataagaacacagattattttagtataggattaaaaaacagtgcacagcttaagataatgatactaaagggttatttatggctactaataataaacttacaaaataacacaaggtgaatggatcttactgcttagtttatagggtccaagaaagtctctgggatcatttgaagacattttttctcagcagtcattcaatatcatacttaaatataatttcaaatgatttcagagtagcaaaaggattgtatgaaataagaaaaagtgcaaggtgttaatgtgcaataaataagcaatcacccagaaatagttagaggaaaaccagaaacactggtatttacttagtttatacacacaataaattcctctgtgcacagttgcgtaaccagtgttggcccttaccctattagctacagtctctaggtacatcgtcagagtatgaaattagatgaaaggaccccacacaaggattgtggttttagattctaagtaaactaacagcatcactaaatatggcgtgttaggacctccagggaggaagaaccttattgtggctgttgttactggagacacataccttccaaatgacaagataatgtgtcttttggttactcctggaggactagggacatgaacctgggggcccttaaagactaggctgttacttgacagctaacttgattcacaagtacctaagtgctttttaaattggcacttaagtactctcatgatgaattcttagcaagttattgtcaacacccaattcaggtatacagataagcctttccagtctgttaactgattatattctcacattttgctttgttgacttttctctacatctcttgtttatcgatctcattatttttattttctgacccctgtgaagagctagggtggaaacgtgtggaatagcatataaagttttcagttgaatggcatacatagacgacacagccttaatctccttaaaaactaaaaacaaaaaagagattggacggcagaattaggtcttcatctgcagggccactgttatttgtaacccttaatgacagtggctaacatttcatacaattgttatgtgtcaggtttaagtgctttaagaggagcaactaatttgagatcctcacagcatcccttcggtatgggtgctgtcatcccagtttaccatcagagaacacaaagttcggaggccatgtaatttgcccagggtcatacagctcataagtgacagcacagtgtgtccccaggaccagaccctggaccctgaatggacagtgcctctgcgctgcagtgcattataccctgaaagaggctccatccccctgtaaagaaagaatttggcatattcttttgaatccctaaaacaacatgtgatgtgtaagtagatgctcaaaatttttaaatgagtaaataataagtgaggacagtgaggaggaaagaaagactggagcaggaagtcccaaccagacccttcatacagatcttctttttagttgagtgagggagcagaccctgatacagggttaccttaaccagagcgtcaaaagctgatggccattgggacccctgatctactagttgaaggaagaataatgtcagcatgcttatcactgaaaacacattttgagaacataagtaagagtgttatggaagtgtgtgacatgaggtgggcctacatgtctacaggccagttggaccagtttcctgcattgacggttcacccttctgatgggcactcagctctgggctccatccctgtgtcagcctcatgggccttccaagactgatgtgtattctgtggtttattctgtcccagttcagcccctgaagtccagaatcacagagtttaactggggcttcccagaccctctaaggctaatgcttgctgccacgttaatgtactgtttttaagacgccttgtgcatggtgtaggtgccactgcatttcagttacttacacgggcaaggattttttttacattgtcattagatattgagaattatttgctgattttttttttcaataatagcaagtataaatgctgccaaagctgattcttaatgtcagagggatcctgaggagaggttgccatttccattagaaatctattttgtgattgaaggtaagataaggtatcggggagggaagttttggctacatgacatctataacatccccgtgattactcaataagaaaaattcaagagatgtggacaggtgtgtggccagcttagctgtgacacctgatgcaagagattagagcttcctggggactttgaagtcttgatgtcagacctgatctgccttctcatcttgggctgcggctggaccctgcccaggtggccactgtgatctgagtgttcttcaggcctccttaggtgcaccatctcctgcacggaggagctgatgattttgatgaccttagggattttgaagccaacaccagagtatcacttttcaagaactaggaacaacttaggtaatattttaaaaggtagcattcagaattatactcaggttgccagtaaaaaaattccgtgctagcggttgggcaaatgggtagtttcccctctactatttctgtctgtctgaaaacaaagcaaaatccatgttctatctctaacaggaagtcaaagagttatttgtagattgttaaagctggatgagaggtatatcagagtccatagtattcagtattttttaagttttcttcttaataaaaagttaaaattgctatttgcagacatattatcagatacccagctgagtttcaggcctaataattctgctaacctggacttaactcttgaagtagaggatagaggaataagagattcactgtgcatggattccttctaattctgggtttaggatggaatgtggttgaaccaaaaaatccactatctttcttcctgccacctggctttcttggatctcttacttagggaatcctggtcctacttgggacagtgttgaagactggatgtcaggcacgtcttgacctatgtggatttagtaagccacttcagtctcagctcacccaatactgtaagttgtgctcctctaaaaggctggagttctgtgagctgtcaaatatattgtcgtcttcttcatcaatcccaaatttatggaagcactatattctctccctgaaggctgatgatatagcttgaatcaagctgcccttctaatgagatttccactgggctgccagaaaagtctgtaccaggcacatatctgggtgggaattctttgaaacaagaaaaaatgtttccagccctgcccataatgcttcctcactgaacagtatctcaaatgattaagctactgcttttgtggcacggagtcaaacatagtttggctgaccccaagaggcagtgaagtcaaagatgccatagggtcacatgttattaacattctggtacataacagggatcaaaactcagtttatgggtggtattgcttcagtgccatatacgatgctattattagtaagccaagaataataaaatattcgtaatagcctaaagactgttaggcatgtgttttatcctttaactctaaacgtcctggaaactagttccataaatggaaattaaaatataacacagtctattttttgcttgtccaaataaggtcatatgttgggtaacaaatgcgtagcaaatgactgtttcttaacctaggtctttaacataaacatcagaaatttttcaatgttgaatattgtcatattttgatttttctctgatcatttaaaatgtctttacatatttgcaataaaactagaatataggtaaagtaaatgcaaaagacactcacatccagccttaatatatcactttcaagattttgtgatttttcacagctatatagaaatatgtacattatatgagtggctttctttacatgttagatccaccacttacattaatagttaaacaagtgtagaaataaatgttgtagaagtagtttaatagagaagaaatgtttattcttacttatacctaggagttctgctgctggttctccaagtccagcatgtctttgcttgtgtcggtaatgccttgctctttgtacttgattttgagtaagactgtcatactgaaccaagttttacgagtaaaaatgaagattggtcttatactcttaatttgctagatgaccaaactgatcaatgccttaaatgttcagaattgttgagagctaattctgaaacacatgattagaaattcctctgcccctgagtttacagagctcagctgttaagtatttccctgttgaagtggcgtgcaagggggtgggttgctctttatttcctctgctgtctacttcccatacctaaaagggtattattgctgggagtctcataattttcctactaagacaataattgcatctaatagatcagacttgggcctgctaattttcatctaatcaacagaggcaggaaaacatagtctggaatgctaactatgtgaatgaaaaatatttagtcattcttgaaatgataggaatgtttttccaacaagcttaaataaacacaatctcttttgagactgtgctaaactttttttggatgagacaactcttaggcaaccaaacagaagttaatgaaggttattaagagacatgcccttcagaaaaggcctgcagactttaaaaagaaaagattccatcttctttatgctgcaaccattgataaatagcagaattggtttactttttagcttttgtctacccagtagaatttaacattttaattagtaatcatactgcccaatgttcaacagataccattttacctaacatggctatatgagaccatcttattttaaaatcctcatcttcatctcctactgtttgcctcagttccaaggaattcattggactcaacactcctgtatttatagcacctgattacacttttcctatgaagcatgtttgtttattcccaccaacacaaggtcccgccagataataaaattatttttaaacatactaaaatgtacatattcaagtgaagtgtttttcctttcacaagttatatgggaaaaatgtatacttactccagggatacagtcattcagaatatttttggtgcctctcttttgaaactgactttagagatcatagcacatccttttgaatatccttagctttgtaaacccttgactttgaaggtttattagactctaggaaatagccaaagtcatttatgttgaagtctggtttaaaaaaaaaaaaaaggtggccgatctagctgagtaaaactgtttagaggaagcaaaaagtgacagtaaaataaaggcactttgtcttctatgacatagtaatttgctctgaaagcaactatgaagaggtttcaaacagaattttaacatgaacagcattttggcataagaatatagcctctaaaagtgagtacttttatcaataacacttatttgtaagtataactcctggtgtgtttataaaaaaaatcaattcacctactacatagtatttttatgacttctagggattagaggcatgtatttaaatggtcatatactgtattacaacgtttttctgaaattgcaggtgttctattccaacatttttttcaaatacattagactaaaataatttgcctacagaaacaggtcaaaataggttgcgattctaatataatttatttttagtattttagttatccaattccacttctagttataccatactgtttcctggtatagtcttaagtatatcctataaaaacagaatgatttcacattgcttaatatatgagggttagcactgaagatagtgaaaaatccagtgagtcactgttaaacccccattagaacttttctgtgttgtatctatctgattattgaagatacagtgtcacacaagcatataaaccatctgttgcaatactattttaaaatcgtaggacaggttcaaagaggggaaatgtccattaaagaacgcctcttgcgcatgtgtgggtctccccatcacaggtggctgatgaggtggcaggagcagcatcatacccacctatcagcctcttaatttgagagccccaaatactcccctgcatgagctcccagaatgcagattgggaaatctgttgccaggggactcagcaaagccagatcttggtccaggggtcataccatcagtttaatctaaatttgatgtgctttgagcaatacgggacatgtaacatgtttctgaaatttgccagaaagcatgcattttgttttataaatattttgagtttaagttgatcagcagtttgaccaaatttttatttaccatttatatctacagaatacctgtttacacctcagtggagtttaactttcgcatctgagagattagctggatttatctggtttgtttgaaacagcctagttcaggtatatggaccatttgagatcacagaatttaatgctagctgccagtaaaaagatgcagtcccaggctccagctcttactttgcagcagcctagtgaaacacaactaagaatcctcaagatcctaaggccaagtacttgatccttgtggaccctgcaaatcatgtaactttcacattggctgccggagcaaaccgagagttgatttgcaagccaccgctcgaccagcaccagaactcaaagcatgcgttctgtgtgcttacctcatccctgactgcagcttattcttttctagctaaaatttacctggatccccatttccttactttaaaaaagtattcattcatgatataatttgagactgccttggatctattacataatctaatgaggtatatttatgtgcttctttatgtataatcagtgcctaccatttgcccgtgcctgtgcctttgtgccttgcatggtggttgaacccccttagtttgcctatcagtaggaagacaggagatcatgttgtttttcaccttaatggacagctattgccctgcatgtcagctcacttttaaaacaattcaaggagtctctatttgttagggaagctgtaatatgtttggagataataagctatccacttgggatggcctcgggccttgcatacggagagggtcggcaagctcagatcttttcaaagccataaatctctcatcctttctgggaatcaagtttttaaaagattccatggagattttatgttagacgaattccacagggggtgtgtcccatagtcctgtgacagagatactaagaacatgactcattgcatgaggagcccctacaattcttgttatgaaagtactggttgaattttctcttactgttgacatatgtttgagatccctgacttcctaacactgagatctgctcgttaaagacagtttttagaaataggtcttctgtgtctttcaacttgagagtggcaagaaacactggcaaagataaaaagtagtataaatgattctgtgatgagtttgcccttgtccctaaagatctagcaaggcccccatcatgagagaggaagaacaggggccaggcacacagagtcattgtttcgacccacattggattagctgattactaagagatttctgttctcttggagacatcatagacatagtcaaaatgtagaacaatgatatcagactgctactcagcaaatgtgaaaggcgtcactggctggtcactaacgtgctccaaagcttaccagaccatatgaaaagatagcacagacccacccaccgtctcagatgcttttcacgttatcagtggagacaaaaaatgatgcttaagttacaacaggcagggttcagaatgctgaaccaattgccatactatttatcagctgtgcatttgaggtctgtgaaagggctaagaattcattaattagccattacctgagaccagttatagctctgagcagacaagatcagcatgacatcaataattacaacaagaagtaatgttgctgtcacccttacagtatagtcttttcttgacaagcttgtttgagcattattggaatattgtgaggtagaaataatgagtattcccattttctggaagcccagagaggtccatcataacatgttagcctaatgagagagcagggactcaagctatgttttctgactccaaatccatgaccttggcattgcttcccagtagacccccattgtgagaagacgggatgagaaaaataagatgatgaatgtcaaagtacttgatcattgtggcttagattcaaaggccagtccactcctggctccatccccattgctgagacccggttactgttattctgaactctgtggcccagcctttgatcccgggttcttctgatgagcctctgactggaattttgaccttgctgtttgacttctgggagagctggatccgttttctgcttctacttgtttattcctgcatcctcccacctagggacattactcaacccaagagccccgacccactctcccatcctgtcaggcttgacctctgcccattcttgtgcatatccatccaaattctaggccccaggccctaaccattggcacttaagtccccactgagtaactgagctgctcagcctccatcagtctgccaggcaccaggataccatcatcagcacgtgtgcattctgctatgcactcttccttttctttctctgattcttgtcagtctctaattaagccggttgtcaatttgccaagcagtcagcaaaagtgcccataacttcacgcagtagaagatgagctcctgagttgaatgactgcctagctgttttcaggattattttaataacactttttatttggcattatcaaggagtagggtagttccagaagtgaattctccagataattaaaatttgggatgtcagatcttacattaagaattttataggaggccttctataatgctttgtgtacttttctgccttcttaagccaaagatacagatcatatgatcgtattttaacccatctcaggaaaccgagtgtcatcactgagtaatctcattttggacggcttggatttggggatttgcactccattttcaccattattaagtgtgtcaggtttacaacagccttaagatctggctttctgcttcagtggagctcatttattgtgtacctcctatgtgcaaaagactgccacagtggtgtggaccctaaggaacttactgtctaatcttctaaaagttagaaaattagagatacagcctcttaggacaattttgaatgggagctcttctttgccaaataatgttacactgactttaggtgcttagatgtctttcgttttcccgttttgttcattcattgagcagttctatagaccaaactgtactaggtgctgaggttataaacaatgaatgaagtattgtccctaacgtgcagacccttcctccctggttttcaaccatttgccagaagggtaggttccagttaccaaaagtctgaccgcctgacccatcctccaagttgaaaatagctacttaaatgtgcacacacacaaacccgcatacctattaatgtaacacattatttccacttaaagctaccaaaatataattcctatgaacattagcaataaaaagaataagaataaaatgtaagacaagtataaaagatctagattcttagaatccagtgataattttgtgagctatctcaagctggattcctggaaaaagataccccactctataaaaaaaaattttaatttgtcttttgtggtcttttaataatctcaataatgctaccatcttttcctattaaatatgtttttggtaaaggaagaaaaatattaatatgtctaacagccaagattccttgggaaaagcatacaaaattaataaataggtctaaaataaatacatggttgcttccttttccgatcacaaaataatacaaatcttgggaacatttgcacactgttcattttaaaataaaataaactgctctgagataagtacttcagaaattacaaggatgtaggtgttgttatgagaagtgtacaaagggaaaaaggataaccaaatgtgtagcggctaaaagaatttgaaaactccaaccgtaagagacttttttccatgacttaatgaggctttcttaagtacacattcagatgctacggaaattcccacttccagattagggaatttttgtatcttcaattttttttttttcttattgtctgctttagtagagttttccctctagcttcatttgggaaaatttcatcttcactgtactttccttcccaagatgcaattatgttgacaatttagtgatttatttgaaaggtgttctgaccagttatgggtcacatttgaaaagcatctgtgttaacagcttgacatatgaaaatacagcaaaacagacaagctttgatgctgtcttggccagccttatctccagttttatggccctggctaggagacctgatatatttagccattgaactgccatgtcaagtcagtgacattttggaattttcctactcattggatattcacgttgcttaaccacgttcagccccctccaaccccccaatccctgcccaaaatagaaaaataaaactaccttaagaaagagcgcctgaagtaagtctgaaaagaaagcataattgttcatttttgtctctcataatcaaataagcaggcttgggaatttacaaagaagagctatgtaaaatctgcaaagcattattaaagcctgaaagaagaggtaataagagaaacgagagacagataggaattgttagcttcatttatcttaatacttccacctgagtattttttcacttgtaaagaaatgtaagaatgtgtgtgtctttaaaaagtactttttctgtaatcccagcactttaggaggctgaggtaggaagattgcttgaggtcaggagttcgagaccagactgggcaacatagtgagacctcatctcgaaagaagaagaagaaaaataaataaaaaggaaaaaaaaaagcattgttttctagaaatttgcctacaaagaggtttttccagaaagacttttcttagtgtgtgggtgtgtgtgcatatgaatgcataggaacagagggtgctggcagacagctgctttccacagccaggcctgcagtttaccagaggacagcacagtgaggcagcagtcctagagaccatcagaatctggaaacagagttaattaccctcctgacaagacagtactacacacagacccaacagggatggctgtgtatgccttccacagttgtacatttacagagtcacccacccatactcaagaactgctaattggttgtcagctttcccagggctgctaatcagaaagagtgcttcacacatttctcaaaggagataattaatattatttctgagggagaaccagctcatagtaatctatctaagaaccttgtatggattaattcaaaaccagcagttcagtggagtaatacagattagacagcaatttaaaagcatccattaatattgtcatttaggctacatatacctgaaatataaaaattattgtattgtttcagaagtgaatatatataattatacatttaaaaataactgaggatcaaagtatgttcatttttattgttctcccagagttgttgaactatataatgtgagggtaagactgatctacaaactttataccagcatcttaaaaggctgaatttgagtttcagcttcttacttccttggccagtttttggagaatttctcataaaataaactaacaaaaggcaagaaagtagagagcttagatttgtttgcttaacacatttataacacctgaataaccgaatatgtatttatggtttagtaccgtggccttgaagttagattcatgattttcattttaactttatatttttaatcaaattaattgtgatcccagtagcttaatttcgccattgagtagataaaattgctcctaggaaatatgtgagcatcaatataaaataccgatggtgtttttcaataacagtgtctgaagctctctaatttgtaaaaaatactaacattttcctggaaataattttactgacaagacatctgttaggctttttaggttatgaaagaagtaaccctaaatttttaataaatgtaaaataaagaatcaacatgtgtttgtgtatgttattgcacgttagaagatattttctttcaaaattttgttttctaagacttgggataagaattggtggctgagcatctgcactcctgacacaatcccaagggttctttaaaaatagctcttctggacagtgtaaggtgcttggagggtctctaaaaatcgttcaagaaaacaacaggtagaggagaggaaagtttcccactcagatgctgagtagaaaacagcaaaccaatgtagacataacaaacacccatttttgttctttattgcttctaggctcagaatattttagaattcttctccacaaggaagctgttggagggttccctttagaaatagttgtagccaaagacagtgaattcctgctgtttcaagccttcttcctttggaggacattaaggtatttctttgattcctcagctgattcaatacaagatgagatagaatttcaaggtgatcctataaacagtacttcactgaatttcccctctccaaaaccccacctctgtgcaaggatttcctcattctcctaaatgaggaaatctaagaacatttctctcctttgaaagaggcctactaacacatttctaccaagctagtttaacgggggacagttttctttgctccaagcagcaagtatcatgtacagggatgcatcagtgccgccagaaatcttagcaggacctctgttcaattgaactttgtttacgaaacacgccaaagataggggatcaccatcatcctagaaaggcttgtattctccgacacacagtttcagtgccataccccctgtaacataggagcacagaaatgtaggatttaaatgagaatcttctggtcttcagaccaaaatccgacaggcaatttccgtattcaaagcactgttgcatagactagagaaaagtctgggataataacaattcctgatgagcaaatttcagaatgctctaacttttagacaagcagaatgtatatttcacatactttgctcacactccctcaagcctctttatttatttatttatttttttttttttttttttttggatgagaaacagtcatactgagatactatgattctagattctttaaaatcacctcttctcccaccaggaactctcttggataaaagctatgttaagaatctgaccagctcttggtcattattctttaagaactataaatataatattgatttgaaatgctttaattgagaacagtgtcaaatatgtctcactttggagctaattatttagcataagaaattgaatctcagttgtctcatggcacttgtttccaaaaaattgccctgacattagtaataggatcagttctgagattatataataatatgttggactggaagcaaactctcaaatatgtttaacaataatgtgagatttttttctagataattcataaataggtagatagtctatatacttaccggtcatatttttgtcgtaatgttgttctcatggaaatctaactactctggctatggtctcacatgataggaaaccaagcactaaaatgttgggagaatgacgaaaggcagtacactataatggatgacttcaattgaaatgccaggagacaactagttgcctgcaaatgtgtacaactcaacagttactccaattacatagggtattagcagtaaggacccaagacacatgtgttaccacccggaaaaaaactttaaaatttgttccagtttgtgtctgagtaggaaaatgagatgtatttgttaaatgtaataaaatgagatgccaagtgttaaaatgtcttcttaagaaaacctagatttctagctatatttaacatatcacaatgactattgttgtgttcaccctaatctattgaggggaaattgaatagttctaatgtaaattgaaagttttcatgaataaaagattttgttgtgtttttctgtgtttaatgttaaatattgagggtataaaaatttgaaatggctgtacttccctgtttctttcatctaatataggtcataagtgaatgggaaaatactaatttcagaggcacaaaatgattttttgcttcttgcatgctacagcgttgaggcttggaaggtatcccatgggacttgttttacctgaaatatttaacacacacattgtaagaccagcacatactgaacggccctttatgcaattttatttgttcaagtgaacaaaacctgttatgctgaatattttaggaaaacatattgaacatatttcctctcctggagaaatgtgtgttagatgtacatctgtgactgtgtacctaactgttgaagccatttggatagattggcttctgtgactgatacggggctgcccaagtcagcattgtggttctgatcctcaaataacccagtccatttgttcctttcactttctagccacagatcacaaccttaatcgcatgttaatctaatatattttttaaaaaacagcacatacatcactattgagagcaaatatcatttagaggtagaagatcatctttgtaaaagttggacgatggattctctaagcaaatccctaaaattcactgctgctaaaattccatactaccctatgatatgatgattatacatttttcaaggtcagtttaatcttcagtatatacttttccatagtatgttttctgaaggcaaaattttctcataaatttcacatattaaatgtcagtaaagaatagaagattttggtatgtgtagatatgcttaagacatttctttacccataagctgtccaggaaagcagtgtgcctagagttcagaattcttccctcaactttggcctaatcgctctagaacatagaagtcctttctcactgggataacctgtggtgggtttacttaaacctgatacttgccttctacgctctctcatatttgtggttagagtaattttgacaaaacattggcagtcttgggactgaagactggaatagaatcattatttggggtagctaagaaaagtagtgataaaagaaagactaataggtttgagaactaaagatgtttgcagtaaattttaagagaatggaggggagcagcaatacgctaactcaggatgtcttaaaacaactaaactttagttattttttgatgtttacagttatctgtcaggaagaataccttggttattgaaggaaattagaaactacatcagtgaaaagtttatataaaaattttagtaagatgctgttctttgtaataagaatagagaatgtgctatactcacttgatacatatttttactgggagaatgctgatctaagcatctctttagtaagtcatcgttgcctgctacctgtgaagagttgaatcactgtccccttttagtagatggataaaaatttagaactcttgatctcagcagtggcagctaaaacacttattttgatctctcttccctggtaacaggagatgaaacttgagaaaacagtgtggactaatggatagagtgttggacaggaggttgggaacctctgttctgttctattcccagcctgctactgggttactatgtaaacttagataagccagttaccctctctgcacctcatattttccatctgcgaaaatgtaggtagagacattctatactcagctctttcacaaagatattgtgagcaacagcttactttgaagacgttagtatatttttgttgaaaagatgttgcataagtatgtcagtgcctctgttccctttggcaacaccgttcccacaacctggcattatataaactgtcccttattgatgcattgagaaacaggtaccattacagcagattttgtgttgcacagaagctgagagtgtgactggagtcagactgcctgggtttgaatcttgggtccaccacaaactaatgctgtaaccatgggcaggtcagtgtgctagatttcctcatctgtaaattgaggataataatagcacccacctcattggaatatggtaaagctggaaggcatttatgaacagcactttaaaccttatataaatacataatatgctttatgtaagtatatgtagttaccgttattacccaaagcaattcttcattaatatggtaaagcgtcacctctggtcttgctttgtttagtgcccttattcccagcatggctgctcactctttgtcctgaatgtgtgtatctccctctgctcccacaagtctctgggccctgaggataagtgtgtagttatctgtcgtatcatctaccataagtgagggagtgccacataaaagataaaagaaatccaggtgttttaagctagtctcaaaaactgatttattaatttggaaaaaaaatagtaaccgatttcagaagtattacagaatgggactgagataattgatagttgacagctgtatcctgattattataaaaaataaaccggaaaacatcaggaagaaatagaagagcagttaacaatttaaacagagttcatgttaacctctctcgtctgcttccagtagtggtgaccatcagagaagaattgtgtgaaggtaccaaaaactgcatgaattgctcaaacgcaaagaagcagagtgttcacattttcaaaaatctgaacacaaatatatctgtttcaggggttaaagatattactggagcataaaagtttacgatttgatgacaattactgatttgatttttgtaacattatggtgtggaatttcaaaaattgaatagcatctaaaaggtaatcatatgtttcattggttatttttttctctatttattattagaaccaaccatcatcacagttgatccacctgcatgtggggagttatcaaactgcactctgacagggaaggactgcattaatggtttcaaacgcgatcacaatggttgtcggacctgtcagtgcataaacagtgagtagacagaagactgtatgttttttctgaggcctaatatgatattgtcaaagcatattatgtaattgaatatctttttcacttctgttcagacattcccttgacaacctgaaaaaaaggggaaaaaagttatttttaacacaaacaaatacatagtcatttgggagaaaggagctgctgctttattgtgtttttttctctgtttccttgatggccagttgcatcaggagtgcaacctggagtggctttggagtgcatccttccagccacccagaacgctctccctttagtacacttgccaggtcatccagtgacaaggaggtcacccacgcatacagtgtcacattccgcatatgacagccataatccttagactgtgcttcactttgttgaccccagctttgcctccatgcagattccaatcatgtatccaggccctgccctctagagtatagaagagtatattgtatttcttccagaaaaaaataaaataatacacacacaccccacccccatatatgttaaaaccatttcgaattcccctaattcttctgccggaataaacatcctcattctccttgaccattcttcaggtgacagttcctagaactttgttgatctttaccatcatttgacacacaatatgtcattgtctttacataaaatatggcccacaatcaagatactccagaatgggcaggcatggtggctcacgcttataatttcagcactctgggaggctaaggcaggcagatcactggagctcaggagttcaagaccagcctggacgacatggcgagatcccagcctctaccaaaaatacaaaaaaaaatagctaagcatggtggtatgcgccagtggtcccagctactcgggaggctgaggtgggaggatcgcttgagcctggtggggcaaaggtcacagtgagctgagagcgcattactgcactccagcctggatgacagcaaaagacactgtctcagaaaaaggtactccacaatttggtctgctgaatacagtgctactgtgtggcctaagtttgcattagctccttgaattgcacttcgttggctgatattgaggttataagtagctaaaaacactaggaacttttttacatcacctgctgttaggtggttctcatctgttctgtaatagaacgtttgattttttttttaaacgatataaatacccggccaaatataacaagaaattatccgaatcattttaaaccattttctaactagttgggatatttttgaatctcaataatgtgatcttatactttatgcctcccagcttatattaaataagcacaacttatatatccttatctaaatcactgaattaaaataaactgcacagaaccaaggacaaagacctgcagaatgatgctgaacatagctgcttacagtagtcctaagcatttataccttgagtagagttatttagctgacaacatatatctccacaagaaatcttgaaagacacttcgcccgtatcttgtctgaagtcaaaatatattgcaaaatacatcagagcattcctttgctggaaaccctatttttaaaatgagctgaagttataggggcctggcttatttttccagaatctgtactggctcctggtagtcagtgctttattcccctaaatgtcacaaatcatatatttaacaattatttctgaagaattttcagttgtgaatgtcaatttatgtagtttttagaacactttgtcccttttgaattgacatttggcctattttcttaaatctctttccattctcttcgatctctctcacacacagtactggttctgtaataagcgggctttctgtgggcctgtggttgtaattaccatggctcagagacttggacttaacgtagacagatgctcactttctgatttatcagttatctcaggctttaacataccacttaaccttaattatttgtcactattttaaaaatatttttgaagaagatacaaaataggagttaagccattctgcttcctcagttacatgtgaccatcacactatctacagtggcgttagtgctaaaactgagtttataaaacgcctgttggccaggcgtggtggctcacacctataatcccagcactttgggaggctaaggtggatggattgcttgacctcaggagttcgaaaccagcctgggcaacatggcaaaaccccatctctacaaaaaaaaatacaaaagctagccaggcatgatagcaagggcctgtagttccagctactcaagagtctaaggtggggcgatctcttgagctcgggaagtcgaggccgcagctagctgtgattgtgccactgcactccagcctgggtgacagagcaagaccctttttcaaaaaactaacaaacaaaaaaaaaactcttgttgagcttgtagttactaccatctttaaatttcctataagcctctacccatttgggggtattctgacttcctacacttgattctgttcggggaagggtcagtccctgttgccttttatacctccctttagaaagccaagttcactagagttgccttggcagcccaagttttctcaaatggccaaccttgttttttgaacaagataattagtaattgtcatgaagtgtttatattttaatccttctaatgcctcttacattaagaaagctacatctttcttaacatgggatcatatatattaatacattttttctgagtttctaaaaagtctaaaaatacagatttcattgtgtccagtcacctcacctacacttgcgcctgggttttgctattgtgaaatcttggccacccggtcatgcttatctaagacttcggtcacttcacacggaatctttcatcattaagttcaaagaagcagtttccctcaactgcctttgaaggaagagtcaaaatatgtcccttggcaaatagtcactggcaaatagtcatttggcaagttgagactataaggaggatgcatatttaccctatctttaggttagtgttttgtttggcattttaaaaggatcatcagcatgtgctacctgagtgcacctctgtttcattcacacttaggaagaaataggtacaggaggagaccattgcattttgtatcaataaatttattatttgcaaattgtacccatttatacagatagctggccttccttccttccttttttcacctaatataaacagagcacctgccacattctaggtagtattctaggtattaaggccacaaagatgactaaaatgcaagaccttccctaaggaaaaaagtcttctgtagcataaacactcatgaaatatcactactttaagccaaaagctataacgtacaaatgtaaattattttaagaggaagctttggtccttcagcagaacccaggcttatgttcacaccagagtagagaaagaactgcccgtctcccagggctctacttggtgctcagcagatactggctgagtgaataaaaaggaaaccttcaggatcagagatgcctttggatatcattcttgcctgagatctccctttgaggtcttgctattctaataatatatccatcttattttggattcttcttaaagttagtcttgtcatctcgctcactgccccactgtatacctaaagacttacttcaacactgattggaatttttcaggttgtcctatacagaagtctagacatacagcattctgctgtcacctcccccattcgtattagcaatccaggttatttggcaactttggaagccacacctttgggatgtcagtcaaatcaaaccaaatttccaggtcctgggttttgtcagattcttgcgatcgtatgcaactctcctctcaggctctgcacagcagcttttgtgttgcacagaagctgagagtgtgactggagtcagactgcctgggtttgaatcttgggtccaccacaaattatgctgacttccacatgggtaataaaggcaagttgctttacttctttgggactctgtgtccacatatgtaaagggcaaataatagtacctaactaatgggttattttgaggactaaataaatgaatgaatgcaaagctaactctggctggcatatggccgttgcttactctgcactgtaactattttatagcatcttcttctgagtcggcccaagctagccaacatggaaagcccccagcgtccccgcccccctttgttcccaccccatcagcctgcctccagttcttcctgccctctaaggacactcacaccaacagctttccttttactttttcatttcattgtaaccctcaaatattatctttctcctccttggttttagagaagggagtttcttatagccaactatggaataataggttgttttttttctattgcagctgctttatataggtatttattttgtcccaaattcacccttacattatttttctgcatcccatcaaaacctttttcacatacagtagtcctaagcatttatacctgttttctcttaaggattaggcctagtttccattagcttctagattttttttttatacagggtcttgctttgttacccagattggaattcagtggtgcaaacacagctcactgcagcctcaacctcccaggctcaagcgatcctcccacctgagcctcccaagtaactgggactacaggcactgccaccacacccagctcattttttttgtatttttttgtagagacaaggttttgccacattgtccaggcaggtcacgaactcctggcgtcaagcaatctgcccgactcgatctcctaaagtgctgagattacaggtgtgaggcaccgtacctggcccttcaagatttcttaaaacaaggccagcaccccacaagtatttcttctgtcttcgttgatttgttgttcttcattcactcattattttattcatctagcatttgttgagtgcctactatatcctaaagaagattaaaaatagtccttacccttgactcacattggtaatttgttggtaatattagtcatatgttaatatgttgtaaagagacaacataatctagcatattttaggcagtcacattaggattgaaatcaaaaccctatagaaacatgtgcttcaaaagtatgtggcaagtatatgatacagaattctttcatttgaacataacgtaatttgccgttttaatcggtaacaaataacattcttgtaacactaagaaaagtagtactccaggacatacagaaagtttacattatccctgactcagttcctcaaaaacttgtttagaataaaaaatgtttttaaaagtatgatagcaacaaagtttaaaactaaaatgattttaaaatgatataaagcaactagtaacctaacactttgtagatacaagcttttaacaacattgctctttaaccagtgtcttttgctaatagacgtaatatacctgcttactacataaactctgtatgaaaggcatctgcatgaattaagtagcatcagtcttttggcatcttagtgtacacatctttaaatcaagtggatttgatcagattatttgtaagttctcttccaattttaacattctttaattgtagacattaatagtgctttttctagaaactgatgcagacttgtagaattctgcatcagtcagcagagaggaaagagccttcatatttttcatgaaatatgtatctgaatcaaacatcacaagaaggttgcagcatcaaatatagggaggcaggctccttgttttatttcactgtaattctaaactaacacctatcagggtcaaaattgggaccaccatttgtaatgttgcatttctttacttagtagtcttgggaacttcatggccatcctgaactgataataggtttgtaggaattgccagcatctaagagtttaaaatacactaagtcctcacttaacatcctctgtagattcttggaaactatgactttacgtgaaatgacatgtaacaaaaccagttttaccagaggctaattgatataaacaagagttaagttcctaccatatatttctggtcacgaaaacatcaccaaacttctaaataaagacctaaaacatttctaatagtaacaattaaagtaagcatgagttatatatacatttaagaaaggttaacaaaaaacaagtacaatgatgattccccatttttaatgaatcagtgagtgatagtggttgtagtggtgctgtgttgaatgacatgtaacaaaaccagttttaccagaggctaattgatataaacaagagttaagttcctaccatatatttctggtcacgaaaacatcaccaaacttctaaataaagacctaaaacatttctaatagtaacaattaaagtaagcatgagttatatatacatttaagaaaggttaacaaaaaacaagtacaatgatgattccccatttttaatgaatcagtgagtgatagtggttgtagtggtgctgtgttgaatcaacgaataaatgtttgcaaagcaaacattgtaaggagcacctccttctgccatgcagttcaaacacataccatacccagtgtggcaggctcactgaacgctgttgtcctgcagtgtttattgttgtacgtttgtgtgattatcacctgctttaacagatttgtattttataagaatttgtatttattcactcatttattttccaacttgcttattccagtccagggttgagggtggccacagcccatcccagcagctctgcaagctgcaaggtaggaatcgaccttgaacaggacaccatcccattgcagggtgcacacacacacacacacacacacactctctctctctctctctctctctcacacacacacacacacacacacacacacacacactcagattaggaccatgtagataccccagttcacctaacgtgcacatctttgggatgtgagagtacccagagaaaacccacacagcatgagagaacatgcagtctccacacagagagtggccccaaccgagaactggtttttattcccctcctaaaagttatgacacaatgatgttgaacaaaaccattgctgtttgaggacctgctgtactacagcaaagaagtatgcagtactcctctaggggacaccatccacagtgtgttctccatggaggttacgttgtatttatatataatgaatggcgcccccgacagctgtgtcacgttttgagcataggagcaaacattcctatttttccagaatgaacagagttttactacatagttgctatcgaccggccatgctgtacaggccctgtactttgccattgttcatcactttctcttcaatcgtaacttctccccatgtattagaaagcaattttagatcacggtaaagtcatgacgctgaaaaattaggaacataaagccacctttttctgcgtggttgcctcaagtgatgtactaaagctttacaaacaaacatataaacccctacccttctatgaatactgtttttctactctttatttatgtttttatttatttattttttttttagacacaggttctcaccctgtcacccaggctggtgtgcagtggtgcagtcacagctctcactgcagcctcgacctcctgggttcaagtaatcctcttgcctcagcctcccaagtagctgggattacattcactcaccaccacacccagctaatgttttattttctggcagaggcaaggtctcactatgttgcacaggctggtctcaaactcttggcctcaagcaattctcccacctcagcttcccaaagtgctgggattacaggttccagccagccgcagtcagtctcctctttatttaaatgtttgctatgatgatgcatttctcttaagaaaacttcataattgacatatgtggatttaggactaccttccagtttttaatgttgtctatttctgaactagaagatggtattttgagatgttttggcaagtgctagtatttcaggaaaatttcaatgttatcagagtaagttattttcatgctgtcatttctctgataatatagcagtcttgatgacagtggaggagtaggtaacaagaacattgattgatgcatttagttagcaaatgttgttgaatacccactctgtaccaaataccatggttgtccctatacagtgtgtgcctaaagatactagggcctgggcctagagctccctctattgggaagctgaatgtagatgggccagagcataacatgcaggagaatggtcccaattcagggcagcactagagcatcccactcctaggaggcatagccagtctccttctaatgaatgtcctgtatttttatttaaatgtaccagcctttgtttgaaattccattccattgcaaagcagaggtagattacagactagtttttatcacattgtttaaacttgaatggagacacaacagttttctttaaaggtgaagcacattcaagatcaaggtctgtggaaaaactccttctttattgcaggaccagaaaaataaaggcaccaaggtgctcaggctccaaaattgcagggaatttaatcccaagggatgttgactgactctgggaggttttcagggtgtttttaattcatctgtttcccaacataattcatttgtagccatgacctaagcattcttgtgacagaaaaatgggttcacaattgacatctgtgttagagaaacatgactaataaagtcttcttttttcaccattcccttaataatggggaatgaaaaattatgacctttcaagtcatataattacaaatttctaaatgaaccatttagaatttctcttttaaggatgcaaattagtaatcagttgctttacagtgtaatacaggcacatgaggttatatttatatgtgtaataaaaggtttatgataatgacagagtagaaaattacaccataaatcacattttccttcttaaaagatagcaaattaaatatgcaaatattgccaactgagattcacaaaagatgctatcttgaaatatttatgtaaaacacggacccatttcacctattcattgtagttaagttttaattttagattataatataagtgtgttttgaggggacagatgcgttctgtttttcccagtgacttctgtgttattacaatattcatgcttaaaggacggccagataaaataaaaatttgttcatcattccaataattagactctgcttcccatttcaccagtccatgtagaacaatattcaaacattgctgtactttggccatcaccatattaacttcccttctttaaatttgattgtctttcaaattctatatttaattcacacaggtctcaacttgcttgctttatataattaagcatgctttttttctttttaaccttaaacatttctatttcccttttctctcgtaagccctatataaccttttaaaatcattttagaagacttctattaggctaataacttcagtaatgttgctagtcaccattgctactttcctttttgctcttctaaaatagtattgtaactgactagcagaggacagttaaacatcactccagattctgctaacgggatactttgaacacttcaaatagtggttacttaaaccttaatatgagtattttttcaacacacacattttttagcctgtgaactaaaaagcctattatgtaagtatatccaaatacaggggtatttgtcagcacatagagaaaaaacatatctaaatgtaacactgaatattttaattactatcattttgtaaaagatgtacttttttgaaagtaatagtaagaaatcccttatgctgcatacaatatgcagtattatatgatagcatctaacacccataaaagtagttgtcatgtggatatttaaaaacatgcgttatgggatgggcgcagtgactcacacctgtaaccccagcacttgggaagctgacactggcggatcacttgaggtcaggagttcaagaagaacctggcaacatttagtagagaaggcgaaaccgcatctctactaaaaatacaaaaattagctgggcgtggtggtgcatgcctgtaatcacagatgcttgggaggctgaggtgggagaatcacttgaacccaggagacagaagttgcagtgagccgaaatcacgccactgtactccagtctaaatgacagagcgagagattctgtctccaacaaaagaaaaaaggacatgcattattatggacatgcaatagaaataaaacatataatgaaaattggactgtaaatttctaattcccacataatgtaaatggtcatcagtggtttgaagtgatttataaagttcatggaaaaatgatctcagtcattaattgtaatagttatcagcctgctgttcactcagagcctaccagatttgagtacactttagaaatctatgcatttcaaagttggactttattttgtttattattaccaaaacatggagtcatgtgataaccatgaaatagcacagtctatgctttttaatgataaccagtgccatggtagagctgagaaattgagatctgtggaagagtggaggattcagggaccgtatttcagcatcgaagtgttctgctctgttcatctttggaagaaacatgccgtctctgtgtcttcacagccgaggaactatgttcagaacgtaaacaaggctgcaccttgaactgtcccttcggtttccttactgatgcccaaaactgtgagatctgtgagtgccgcccaaggcccaagaagtgcagacccataatctgtgacaagtattgtccacttggattgctgtacgtatttgttaattcagaaaagctattatgaagtgcaacttggtgaaatgtttctacacattttgttttatatgttgtttgtgaattaatctatggtatattgagcccagaatgtctatacttgttttgttaggtgattcagaaagcagggagaaggttgtatctccaaaaaaaaagaatcaagttttacttttactttttatggacatgggccagacacaccctttgtgcctgttatatgagactttcccatagcagagtcctttagacactgctggcaagattaggagatggaattgtgaggtcccagtgttggaagtgctacaactcttcacacctgtcccaaggtctatttgtgatcatttatttaacacatactttaagatcaattgaagaccgaccccccactcacttgaaatacagtgcatccttagctgccatgcctaggtgtctcaccttggaactagtcagcgtttcgtatttttttctttatctagcgttagatttttatgaattttcttggagctaagggccattacttttattttttaatatactttattgagtcaaaccccatgagaatctagattattccagggggggaaatagacacttcatatttgtttctttcgtgtctgtataagcacctatatttgcctttatatcaggttgatgcctttagaaaaatcaccttaatttatatttttccctttgctgtctttctttcatttcaatctgtctttccaatttgatatgtttatgtagtgctagattccttttcttttttttttttttttttttcaggcagggtagtgctctgccacccaggccgtagtgcagtggcacaagcatggctcactgcagcctcaacctcccaggctgtcagtcctcccacctcagcctcagcctcagcctcagcctcccgagtagctgggactagaggcatgcgccaccatgcccaactaatttttgtattttttggagagatggggtttcaccatgtttcccaggctgatctggaactcctggctcaagcgatcagcctaccttggccttccaaagtgctgggattacaggcatgagccactgtgcctggcctagtgctagtaattataagggacttagacctatcatctctttcccatcttctgtcagtcatctttttcattcttcatttaaaaattctaggtttgggaggggtcgtctttataattttcattggataattaaattggaaacattgttccgtaaaattccccaaataaaataatgaatcatcatcattcttaatcctaaaataagaatatgatgtcaataagagtattatgtcttagcctaactgctcatataaaatgaagtagttgtatcacaatagtaggtagcttcaaccacttgctacagtatcatgacagttcagaatcaaggctgtgttcaaatccaaccgtcatgttggagaaaaatctcttaggagattgtagatttcactttgtattcctgtcagcacattcagggaggacccagttggacaccttggacaactgaatattatactggctagaacacatgtgttaaggacacacaccaaaagagaattcttggccagacaccacgtgggagtgtcaggatgaaggcagcagttggtgccccttttatgtacctgctgactaaagaattactttctgcatgcagcagatacttccagaagggagggagggagggagggacggatggatcgtaggtgggtgggtgggtggatggatggagaaacaaatgagtacacagataaaccaacaaaatctccttcactttcctattcatggagttgcacattcatctttttattgtggtgtaccactctccctaattaaatcaacagtcatgtcattgagattctgagagccacatcctagaagcacgtaagtgcttgggcaactctctgccttggtcatgagtaagtggtggtaatggccacagggagctaattacccatcactccaggaatctttgagagcaaaagtcaagtcattctgtttaatagcaatatcactttattgacccttggtctgagtgcttgggcatcatttgagactttgtgattttctgacctctgacaaaattttaattacccaggaagaataagcacggctgtgacatctgtcgctgtaagaaatgtccagagctctcatgcagtaagatctgccccttgggtttccagcaggacagtcacggctgtcttatctgcaagtgcagaggtaagtgtgtacacatggcccttccccctcaaagcagccaggggcaccgaaacaaggaacataaggacaccctgtaatgaaatggtttcggtggttgctgcctattctaacacaaatgtcagtctctgtgggaccgtcccacaggactcccttttcctttcatttttatgaagtaaaagctcagaatagaatgtaaagtaagtatatgatggacaagcacattgactaaattaatcacttcctagctctttttacttctatcaggaactttagcctaaagcacaattatctgaacctctatagagcttctctctgttcaggagtaagattaataaaactgcaacagtaaatagccccatttcaaagttctagagggtgggtatagctcagaagttagctgctgtatttccagataacagttttccatgagaatttagcctttggctgaataagcacatgccagcccacagctgtgaataagcacagagcctggatatccctgctgcctgaggcttctccagggagcttcctgaagccactgagcatgcaccctgaccgccgtttctgcctttaccccagctccagccctgctgcctatccctttttatgttgtacttgtcagcatgatgcacagattaaactataaaagattcctaaactttgttttacgatttttcaaaactggacagttaccaccttaatggtgtttctaaggggttggagtaaacaaaaatctagtcactgctttaattgttctgctgaacaaaactctgttatttgcaaggggcccaggatgtccccattggatgaagcttctagagcgatttttctgaatacattcaacatatttgtaaaatttgttataaaatcagtgcttgtttattgtataaaatatgagaaagtacagtggaaggaataaaaaatcagcgatcatcccacgaattggagagaaactatttgccggtttttttctctcttttcttttttcaagattgagaacatactgacttaaattcttttcatgaacatgtcccatgtcacaaactgtcctgtgttagacgtaattgttggtggctggggtccagtccatgtacagactctgtagcctgtttctcctgtgcagtagccacttctttaccaggctgccttttgtctgtccagaggcctctgcttcagctgggccacccatcctgtcgggcacttgtctcaccgtggatggtcatcatcataaaaatgaggagagctggcacgatgggtgccgggaatgctactgtctcaatggacgggaaatgtgtgccctgatcacctgcccggtgcctgcctgtggcaaccccaccattcaccctggacagtgctgcccatcatgtgcaggtaaaagctggctgccatctgtgtgctccataagcaaatgacttctgccttgcagggccctagacacatttgtaactctggggaggttggaggggacaacccctggaacacttttcagcactgtgtggtttttgtcaaccaccaccacagaatcatccaggcactatcagtgaagaaccaaagaccagagaaaattctatcattgtagaaatggctctcctcctttttgaatgattgactcagttatgtaaggtctttggactacatttttgtaaaggtttgtgggctgatgttcttacattccagctctccattttattgatagcatattaagtctgaatgtcctcattaatatgaggggattggtactagttttatcccataaaaccttatcacatttaaagtaatgtttgagagggagaaactttttgaagtctgtggctattgctcttttttaaattaatagacatgtggcactcttgccaaatggagagatttagagtgaccacacgtccaaaacatttaaaatcataatcatggtaatcaggataagttactagaaaaccagaacagatttgtaattcaagggagtctgaattatgattgtcaataacagtaattataaccataaacttcatctagtacgttttatccaaagagctcaacacagtcttatatctattatttccctctctgtgcaggccactttgagttagggaaaaacacattgaggcagtttctcatttggaaaacagacacagaaagattgactgtcttaccaagagtaaaatagtatgtccaccaaaaggcctgggagaaatgaagtctctcaaatcttgtatcagatttctttcaaagttaagtctactgtcagattttggaggatgattgtttttcctctggtcagtccaggtcctgtatctccctgtgcgtgagtccacctgtgcaaaaggtgtagccgggagcctgaggcctggtccttgtgcaacaagactagcctgggagggaaactgaccttgttcgccatggttggggagcaggggagagggacacttgaagtccctttcagctctgagattctgcacagctcaatagctacagtatcagagtgacaggcagctcccataccttgtagaaaacgagattacaatgcagaagagatgactctttttattttgttttgtttccctgtagttcagttagaggtgctccatgtcagaactctttccttttttccgatattttgctagttaagtgtgaaaaactgctagagtcccctgcataagaaggtaaatgaggactttaatatgatagaactctgtgttgactctttggggagggaaaaatcatgtgtttgcatgaagacccctgctttaattataggtgtgaatgcatagaggagggatttgtacctgggtctttgctaaacatgtcctcaatgaagaattctaacagctagattggtagaaatgcaaagacattaagaatggataattgacctgagaactgaaaatcagtagaaccagaaagatctttctctattacagagtcatggaaagttcttacgtaagcacacgtgaagttgttgttgataccttactgtgggtgtgtcaacatctggatatacgtgtatgaaaacacatttctgtagatggatgtgtagaggtaaatgttttctgcaaatctttagcatgttgccacataagcctccttctgattagagactccagagctgttgcattcacggactcctactttaaagaatatttttctcccctcttcattccaagatcagctgtttttcttcttgggatacatgagtatctcccgaactcttctaatgaatatttactaaatgatagtgtctctcagattttctgtcttccatacactctacatttgagtttctcttttgtctccatgtctctggcccctcttgtgttttgccttgaggcatatcgtacggcaaaaaggtgagccagaaagcatacctgcaaacacgcacgtcagatttcttctgaccacttccgtacatgtcagcatttaacaaggcagtaattgtcagtcctctctaagccctttttgaaagcaataagggaggcttttgctatattcatttatcgatactctttgggactttttgtttctctgtaaaccacagatgcacatttaccatcttgttcagcacagttttcattgtaattctcttcctctctcttgttcttatactggaaagttggttacagttgcttgtgaatgtaagcattgattgatgagtatcagttttctgtgatactgtccctgggtctaagttccagccttttgtaattcccttgagataaagctgtattagaagttgttaccctcttaactggaaatcagcccacatcacttaatttcattagtattgttgactctcatgctaaccaccactttgaaagtcatagccccaattcactcctaagaagatttcagctctgagcatctctgcatatatgggcccattctggggcgtgacttccactgagctccaagcatgagctagccgtgatgtctccagactctttctcggcgggattcaacactgtcaacacattcctgaagtgcttgttgcatttggattacgtgactatggttaatgtcttcatacttctcatttccccagcaaaacttcagggcaactcccagcccctcttcagacattttcaacattaaattccctctctatcagtgtcatctctccaagagaccaaaactacctctcctctggggaaagaaatgatagttttcaccagcctgccagcatttacctctcttcatgatgatattgccaagcacatgtttagtctcaggtgagggttttcagactgttgattctacaggagcattcctgctcagtttgctggcagctggcttagattggggtgtggcctgctcgacagcaggacatatttccaagcataaaagtactcaggatcccagaaataataaagcagatagggcatcgatcatttggaagttttatttaatctggagacatatccatgatccaaacaaccatagacttgggttgcagtttccctcgtctctccctgagctctcagtttcctcatgcataaaataaggtgactgtaaggaataaatgaaataacacatgtgaagtgcttagcatggaaataactgaaccgtaccaagtattctgtaaatgagagatctgaatccgagacagttcctacacattcacagaaatgccagaagaggcccctgttctcatctctagagtgggagtcccctccctgtaatttaatgatcttattgaattctcttattactgttgacagacttaaaccacttgaacctcacgtcctaatattagctcttttgccattgtcttctgtttccatgcatggaatattttcttcactattctcttaataagaatagagcgagatgctcttcacagttcatctcttctatcccttaaagcaaacagcaccaggctttcaagagttggaaagattgcagatgaataatgtgttctgattttgtgtcatttcccagatgactttgtggtgcagaagccagagctcagtactccctccatttgccacgcccctggaggagaatactttgtggaaggagaaacgtggaacattgactcctgtactcagtgcacctgccacagcggacgggtgctgtgtgagacagaggtgtgcccaccgctgctctgccagaacccctcacgcacccaggattcctgctgcccacagtgtacaggtaagcgacaccatgccttgtgggtgcttggtggggaaggatgcagctctgggtgttgtcattctgtgggacccacagggcaggatcagccccatatgggagtgtgccaaacccagtatcccatcaggaacagctggcagcctgcttcctgcatgtattctctttatcaaccacctatttatgcagtcagcatgcctcacacctgagatgactgtgaaacaaaaaaggagactgttgctcttgccaatttttttccttaaccctgcatctcaaactcgaggcgtatacctaagtagagaaagtcccaccgcaccaaattaaccaaacgattctgttactgtgaaaagtcatctttatgtaacaaatgagaagaatagttatttataaataatgtaaacaaaattctttgtaaataaaattctttgaaatataagggtggcgaagagactttgaaatatgcataatgccaccccctccaagttgggatgattagtaagttaatgccaaaaagcattaagtgactagcactgcacatgtataaggagtgctattattttctactttttatttctcagataatctgaccttagcaggtaaatgtatggccatgaaacttgttagaaggaaatttgtcaagatgttaatcataagttactggttttatataactttagtagtacttttaattaatactagatgtgactttttcaaaagatatttaaatataaaattatcaagttgacaggactagttttgttttgttgttgttgcttcttattcccatatttcaacttaaatcaataaccatttactttctaaacatattcttagagcatttctgctcagcaaaacataaacccttgtattttattacttcttttttttaacattggattatctagtcagctggccagaatctgttgttccgtcattatgtgcagcatcatcagtgtctaaattttttataagtttatgttgatggcatttttggaattgatcagatgaacttatagggatagccacattactggctgttgtcatcatgcacggcagcccaagtattaccattttagtacagaactgttaatctgagaagcttaattagcactacagcttttctagtataagaaatagttcatatgtgttacatttttaggatatgcatgacctatgatttcctaatttgttgtcatcacaattcactcagattcaaaccctactgatgttttttgttaatatatagcagtgactttacttacatcaccttggtagaaactacttagagtgatcttttccttggtgataatgaatttatgtacttttagctatttagtttacaaatatttgtagaatgcctgaattgaactatggggattccaaggttaatgaaaacagacatgattcctgtcctggagcaatagccgaaaagccaaacaatccaatattccacgttaagtcaataatgataaagtaagaggtgtgccttgaaagggaggattcaagaacataggcaatccgggaaactaaagcagcaaatacccctggtgctatttgtgttaggatctgagtgatgaacttagggattaactaagggagtggcactgggggaggaaatgcctccaggaccactagctgaaattcattgatgggacaccttactgaactcagaggttccacccataaagagaaggagagctatgtggaggtgggaacctctgagtatgctaacatgggtggcatgtgcagaggcccatgggttctagccaagcaaggcagtggtagtcctgcattcctttccatctttccaaagaacaggcaacccctcatgtgcctggctttgacttctcattcattaacttaggcctggatttttttctttacctctaactaaaggatgtttctggactttttcattcatcgttgtattgagatacaaaaaaataaaaagccttaaaactcaaattatcagtttcttcccatcacagtaattctcaacagtggcattgataagtggcatattacacatgtagaaaaatatcatctctaatcttaggacacttgcattctaaaatggcccaaaagtcatagctccacagtgggataacagcttccaaagggtcgaatccctcatgatgcttccatctgtagggtgccttgtcatttcctctcttcagctttccctcttctctggcctggtttaaagcaaggtctggtgaggaaatgaggaaagattgcacatcactgcaagtgaagctacttcaccagcatacaaaagggagagggtaaaatagcacttgtttctttccataagtttaaaattttctttcctttatttttagagttggaaaaaagcatggcagagaagagcgagggaggtagaaaatagaaaaaaggaaacactgaaaacagtgaaaacactggtaaagatcaaataaaggagtaaacgtttggaaacagaagtgtaaagaaaagggtctagagcaggaaaaatgagaaaagaggcccaaagaagggagatgctgtgggtaagattccaaatgacattgtcggtcagggttgggccaggagcctcctgcctggtggaaggaaacctgcagactctacctcggctccagccctcacaccgtcactgccagcgtatcctgatgtcctctgggttatttccaggcctcagtgagagccctgcagattccaggctgttcgtttcactgtcattccatagcttcagcacggctgtcccttcttcttcttttcagtttttagacagaggttgggcaatgcttgcatgagctaagttaacgtaagtcacaaaaacctcatggagatttgcagggcctagtgtgaacaagagggtgttgtccttatttctagccaaagcaaaagttagcactggtcagtctcttagagaagaaattatccctcgacgtagataaccacgaaaaggtcattgagaaagtcatcccatcttactatctctaacctatgtgggtgggatctgtggaatcatatctgtaataggacctagagtaccatggagccgtggaaccaatggctgttcttcaacttatgcctgctgcctttgggactagtcataggagatacagttactcagtttaaaggagagggtatgggccaatcccattatgctggctttcctgtccctcagagaaggtccacaatgaagtaactgccttggtcctcaaaaaggcccttcttgtcacatcctgcttactggctgtggggtatattcatgaggtggatagaaggaaaaagtggcatgtagagcttctggatcatatggcaactacatgtctcagttgtttctggttcttgactaaaaataacagagctcatgaagttggttctgggaagaacatacgacaactcttttgattgtgtatgcattgagaaaatgtggccctcttagagctttgctaggtagggctgtcgtggctgtgtctagactcttgagtggtgaagttgattagaagtgctctcttatcagttggactatgacatttctaaactggaaacgcacccacttacattttcctttctgatatctcaatcatattgctgcttgaagttacaattttcattgattttagtggaaaccgatgcccaaagtgctatctggattttctggtgacattttctgttgcaagttgtaactagatctggggacttccaggtctcagtctttagatagcaaagacacagatgatttgcacatgatttctctgtggttgcatccttatgagtgatttagatttcttatctttcagtcattaatgtgaattcctgaacattggaatgttgcatttaggtggtttttggtagtctggtacaatgagaatttgtctgaatattgattggtcaaaattgcatgtggccacaagtaagagaaaatccagctacaatttgtaagtaaatagaggtctattttacatatatgacaagacatttggaggcagatgtttatcagcattgattcagtggctcagtggggtcaaggcctttctcttctgataggggtgtcacagccgtgatcaacgcactcctatcaaggcaggaataatgtggaaggatgatggcagaacatatctacccttctttgaagaaagtgaaagctttcccagaaatcccttcgttagccattaggtcccattagctacggctagatgatggggccaccctagtttcaagggagcctaggaaagcagggaacagaattgtcccatttacttacatgcattgtaatccaagtcctgggacttccccaaagaaaaccaggatttcattaaggaagaaagagcggatgttatataaacaactaacagaataactgtaacatctcttttttgatctttgttattttgtttaaaaatttaagacccttcccgaatcatactttctgatttgttactgcgtcatgtatttaaggaggcaccgaaagccatcatgactgggtgtgctttgaaacacactatgttgcatagttgctggccaacagcatcttctttgctgacctatatgttcatttttccagatcaaccttttcggccttccttgtcccgcaataacagcgtacctaattactgcaaaaatgatgaaggggatatattcctggcagctgagtcctggaagcctgacgtttgtaccagctgcatctgcattgatagcgtaattagctgtttctctgagtcctgcccttctgtatcctgtgaaagacctgtcttgagaaaaggccagtgttgtccctactgcataggtaagaccaaggaaaaaaaaatccctcatctctaccagttgtcactaaatctgtattgacagccatttgctagatcaattaatatttttgaaactggttttttccctgcttgacatgtcacacagacccagtgtagcaacactgagcagaagaaagatatggaagatgtactcccaagaggaggtgctgtaagaataaataaatgaggccaggagtggtgtcacgcctgcaatcccagcactttgggaggccgaggcagacggatcacttgaggtcaggagttcaagaccagcctggccaacatgatgaaaccccgtctctaccaaaaatacagaaattagctgtgtgtggtggcacacacctgtaatcccagctactccggaggctgaggcaggagaatcacttgaacacgggaggcggaggttacagtgagccaagattgtgccactgcactccagcctgggtgacagagcaagactccatctcaaaaaaaaaaaaaagaagaagaagaagaaggagaaagaaatgttctctgagaatgtcatactgttacagcactgtcgtgttctatcggggtccttggccagttcagggttttcaatttcagaactctgtttctccagcctattttttacagtggttttttttttcttttattagacagattctcactctgtcacccaggctggagtgcagtggtgcaatctcagcttgctgcaacctccgcctcctgggttcaagtaattctcctgcctcagcctccctagtagctggaattacaggtgcctgccacctcgcctagctaatttttgtattttagtagagatggggacagtggtgtttttttccagatagaaacaccaagtctcatattagagcccacttagtgtataaagcttgctgctgccttgagatcaactaaatatgaaatattaatttaatctcccagttgttcctgtcttctggcacttaatggattctgtttcaaccacgtggttgtccctgtcagtggcctaggcacacagagtgaggcctgagtaactctagagccctcaccttcttgtgacccgtggtggtgatgcatctttgtgagcagaggatctatgtatattagcacctaacatctggagcaaaactagtcctatggacataagccagatgctgttccgaggtccaaaaggtgagacagctggcagttctatcaaggacagcccgtgttccctgggctttcaccctcttttaacgcttttgtgtccagtaaagctcaaagtcaaatgaaagacaatgacacgtcttaatcagatagtgcacctataatcagagtagcagatgaaaaagtttacagtctgtactaattgcacatttattgttggggattttccatgttttctaaacacaagtcattgcatatatctggagtgatagatggggaataaaggagatctggctacacagttttgtggcatttctgatagataagctgaggaatggtggccataactcaagctcatgaggacatctccctgtccttgtcttgtgacttctggccactagacagggccactctgagtcttttactctgcgtgttggtatatgagatggaaatgcctgttcttaggaattttacacagattttcttactgtaatggtcaaagagtaataaaagttctgttttaaaagctagatggccaaagagtaataaaagttctgttttaaaagctagattctctcttttaatagggttaccatccatataatttattcttcaaaccacgatgcttttgagagtgaaaagggggctgttaataattctgatgggacaatagtcatacatagatcaggagtgtcccaagcaaactggatatgtggtagccctgcattttagcaccggcttctctgtactctacccctaagctttctagctcctaagtggagcgaaaaatgtatcaaggcatatatccaatttagtgctacttaccttttcaaagagctgaccaaaattcacgcaacaaaatgacactgcctttggtgagatctaaatgaaagctataactaagctattctttcaggctgggtaaggggaaagtatagccaatatccccatagttatatatcaaaacttttttttttaactttttaagttcagaggtacaagtgcagtaaagctttaatactaaaggaaatagttcacaagtcaaccagggatacttatgtcatacttgggaaaccagggcccaggaggtctgagaattgcatgttaccttcagaggaaaaatctaacagcagatctctcgtgtgttgaaaattctcagattgttttgtgtaaatttattgttgttttgctacttaattgttaaatttgtaattagtaaattattcgactagtaaatttgttttcatgtgatagtagataatcatctctcacaaaaccaatttaacaaattcaaaattatgaagagaaacctgcaaatcgtagtattctgtagtctttctttttattttttatttttttgccttcatactttctattccaattcctgcatctagattatacattcttcattggtgtagaaaaaaaggaccagtttggctcaaatttgtgattttgattttaagttggactgcagcacttttgctaaattgtggttcatatgagctcgtaatggtatagtggacattttgattctgatctgtctccctccacaacttccctccccctcccaaactgatgcacgtataattttatcatataaacccatgacttagcttcaggggaccatgttgggaagacttaacatttgatgaactgtaaccgtgtaccttattcactcgttcatcttaataatttatatgtgttgtattattgaaatagtcattaagccctcttctgtctgcatcatatttactttgcaagtagcgttgttagataggccttcatcctttcttatctagccctgctatatctaaacatacgaagtcaagttcatgactatgatatagggatttcctgtctgactctccggtttgcgtttgggcttgttctcttatcaactaagaagtcctgacttccagtcagcttggtccctatataagggtgccaagcctggccagcacaagcacacccaaaggcagttgccagctgtgcttcattggcagagcctttatcaccatccagaggtcactgagcaaaggaaaaacatggaaacacaccatcaggcggcatgtcttaaagcacccaattgtttttccagtgggcaccaaagaccagtgctcgcattgtttcctggtttaggctttctcagttttaactcagattatcatctattctcaggatcttgtgtatctcactgttagaatgtacagactatctcaccccagcccacagtgctgacctcaccttggctgtagggctcttccatggatgaatgttctccctaattagtcaaatacagatctctaaaaacctcaaactcacaattaagggacctcttttattagtggtcaaaaaaaaagtatgcatgtgaagtatccttttttcctactgtaagaaaaatgaaaagtggtgattctaccaaaaatagttttctgattacaagtatttgtgttccttgtgtcaaattgtcaagtcactaatgagcaatgataatgcttctcttttgatgttcgagggcctcatattatgtgtgctaatttaataggatatgtaatatagacataattaataggattgatgattaattttgaaaagtgaacagctttgtctagtttcttataatatccatcattagggaattcattgttctactagaaagaaactaagtagtaattacccattcactttaatggaacatcttctgattccctaatttttttttgtactctggttttctaagtaaatacattcaaacttagattttattttcataagctgactataatgaagggttaaaggatgaagaacaagaatcaaaagttgacaagtatgacgcaggtggagataaaaggtctggtgggaattctgatgggtgaaaagagatttcatatgtggttccttgtaaacagcaaatgcctctgttatgacctacttagccatgcaagagtgtactcgtttctaaagcatcccatggccatttcactgatgacatgctacatgcctttctcaaaccttgccagagcaaaaattatttcagtgctttcagtgaagtctttatttcatgacttcaaggaggatagcagagaagtaaattagcagccctcataccacaccactcatatgcctgtggggatactcatatccccatatgagccctgaccacatcaaccttgctctaatgttcgtgttggtgatgcttctgcccatactgagtgccagactctggcagcttctggaggggggaccgtgagtctttcagtggatcctccctgtgtccaggggtcagtcattcctggtcagatattaaaaagaaaaagtactactttgatcgtaacgtctatcttaggttaatttccaggattttcaagcccacttcattgctgcatcatacctgttgactttggaagtcaagatgctcaggtatgtcccccagttaagccactctaggtgatcaggactgacgttgaataaatagctcatgtgttggctaagtcttaagtgttagtatgtagaacattgttttgaaaattatgacttggcaagtatttgttagtaactacgtgttattttagaagatatttcaaggtcagatttttaaagtcatttgttggctagaaattcttgagtcagtgtatctttctcacttcagaaattgtggatgattgtttgtgtttattatatataatataaatatttacttatacattatataaaataaatacaagtatatatgtggctcataacttccatgtgaactaagttaaaatgttctgattacatgccttctaatcagcgagtatcattgaagtgtttttaagtgtcatatatctttaaggatctgtgaaaatgagttctattataggtagatggtacactaaaaatttcttacaggttgtattaatacctctgtttgattagaagttagctatttttatatttatatatttactaatattcgaagtgggactttgccatggagctggcttagcttgtgttgtgactgtatttcttctcaactggctgtgatactgtcactgtatagtgatcttctccatagtgatcttcaactcgcaaatgattaaataatacttaaccttaatagggaaatgtctataccttatatcaagtcaatacattattccttttgcttagatttctgtttatttaaacataactctactaaactggtatcttagagatatatagcatctctttggaacatctgttggtcattgtgtatttaattcagcccaagaatcaattatagtaaatatttaattcaggcatctttaagctatacaacccatgaaacttaatgttacgcatttcgaaaccataatgatatgatggtgcccaccttcattggaacatttttcaccgctgcttctccagtgtattttcttaaaattaaaagcttctgcacattggaaagagaacttcccttggagccagagcattataatcacagctctgtcacattctagctttatgtctcggtgatatgatgtaaccctagttcagtttcctcatctataagatggcaataataatattgtcctgtgcttcacaaaagtgccaagaatattaaatgacataatgtacatatgcaaaaatactttataaacagtaaacacaatttaagtgtatattgattcagtagaattgctgctctcgtaacacagattgcagctgatctgagtaacattatcaaatagattctagtgtctcactgttaaatgtagcgtctggctttctacaagagaaatgcctggatataacatctcagtgatgagcttttcgaggccgagaatatcttagataatgctttggcagtgtacctcatcctgcctgctcccatcttaaaaagcccatgtcactttggtcactccatcgtaacccaggtagaaacagtgtgctttctgtagctcagctgtgttgtgacagggccttgcccacaaaccacactgttctttcatacctctagacattatcagaagtgagaaaatagggctcatttattttggtttatgttgagaggctagtcccatttgaagagtctgaacttactgtgcatgatccactgtgattcctgggaacagagtacgtggcatttatcatcagggcgcaccctcatagggagatgtatacctcctgcacattcttcagtgctgtcagttactgtggacctacacggaggcccaggttgtcacagttagtgctaaaaagattgaaacaaaagatgagaggtgtgatttgaaagaaggggaaacaggatgattttctgtgtattgtttagagagtataaaaatgaaaacattctggttgtcgtgcaccatgctaactttggaactggtctaaagttatcacaacaaaaataagcagtgtttgatttcagtttgtttgggtcttaccctatgccctaggaagcaactgatcttgctgcttccataagcagctttctcttctcacttcagtatcctttccaggcccccggctgtgtaaacagaaattcaagttgttctggttaacttgggaaaaacccctaagctgcatagtctttaggtgtgctccgctccagccccacgttcttaatttaaagagctctgctgcacggaagttaggctgctgcactgctatttccagagagatccaacagtatctgcctttctcttattttggtccaggaggccaaacctgattttgtaccctctagtggtcaaggatatgggggaagaccccatcacaagagggcccacctgataagaaccctctggagactgctggcagagtcttcttaacaggacttggactgtgaccagataaaacatcttctataggtgcagaaactggccaatctggaaggtccaatggcttctacgttaaggttttcttaacaagatggtataccccgacttttacatggattgcttcttttaagtcctaaaagaagttgtatttcttcctccttatttgggccaccttgatctttagttgtttctgcctgccttttaaaatgacatttttatatttccaaaatgatttatgtgaataatgtccatgtacctgtagatgcatcttggattgtaggccctactatgacatgagaccacatttaaagttgaaaataaaatgtttccttcaacaactatccatgaagtgcttaatcaacccataacaaatgcttaacacaaggagtaagctctattactgagaaattgtgtcctctgcatgcagtggttctcagccaaaagtgactgtgtttactagtttggtgagatttctttttgtagaactaggacttggaagcctgagcaatcacctatttctttctagtatgttgaagaaatctgataggctcttttaacctttataaattacttgcacttcctaccctaagaaataaatgaaataaaataaaacaaaaatggaattctaagaaaagccttaaactgtggccaaatctgctttcacagcaattaagattgaggcagtatggagaggtaggagtcagccgacatgacagcatgtacctcatttttttaaaagaaagatggattaagatcagatttttttttattggaagctaaaagttataaagtaaaatacccaaagatttaattaaatcagtaagcatttgttgcatttttaaccagaattctttaatcatttcctgacagaatgactgtgtattagatctctgcctcattgaaattgtctaggccccctgcatctgttttgagcaagacttcagttgagttccatcttttcattcttttacagtctgtaaaggcctggtgagtcagcgcattgaaaatcagtcatcatcttctgtctatgagttcttagtggcccgtacattattttctcagatccctgcatcattacaatttccatgtgtttaagtctcttctttatgttttttaaaaaaacaagtgaagccagtttctcaaacaggaggtgctcacattctatttattctccaagtgtggagtttgtgcccagcatgtgaccgacaatacagaatgaaaagcacatgacaagccagggatttcagtgtcttgttagaaagtgaaatgaaagtggtattttattcctttgtggcttagagagtgctgtaatgcattgttacaggtataaactaacatttttagaagtacttcccctattcttgcccaggtcagctatgtcattggtaatacttggctgccttttctaccgctcccctttctaaatctcatgttacccatagtatacatgggccctttgtatgcctgcctaaatgacttcactgaagttttctgtaaatccctcaaacctcaaacttaagaacccaaactgtaatatcatgttattagcaggaccagctgtctgcgcgtcttttccagacactgggctcatccatttggatatggactcccacaaagctgacgagaccctctgggtgcaggagcgtctcctgaggaccaaggccttgaatgccttgttcacgtctgcatccccaacacttaggatgacactcggggggccttgatctcaatgtgtgggaagaacaaatgcccccgttatagtactgtgttggcttgttttgcagtgagacttattctgagattaagagctgcatttagcttcttggccaccaggatcccagagtaaattacttttcaggactctaaatagtacgcaggagatttgaaagaactgatgcaatttctaaagcagcctgacttcctcccaggaggttactcccacaccaagcctctgacttcatgaccaccagatttagaaattgaagtatctatgtaagaagttgcctcctaggcagaaatcaagaaatccaactataacataggttagagtccattttggtttttatatccttccacagaggaaagaggaggaagaatctggagatgcgtttttggtttttggttttttgtttttttttttttccagaggctcatgtatatcctacatcatggtcagtttcagagcagggctgtgccaccatctcagtgactcctggaatactaaattggatctttgtagaggaagaaaataacacagttctagattttccctagctgttaattagttttatggcataattaaaatagctcaggagtaaaaacaaagtccagccttaacagcctgttaagtcttcttttcttatcttgaaaagaggtaagataatgaagtttaaacagttgaagaagttaaccggaaaggaattaacatttcaaggccttgccgcttcttcctcctcttgtgatatgaaccagaattgagggaaaataggcaggagggaacccacactgaattttccagactctactgctgaaagacattgtatatttttattgtaatcatatgtgatgcaagataatattgctcatatctgaatcccaaaagaaaagaagatgtttgtctgagcatcccatgaggtaagcagccccatggaaggaccagctgcatccagcaaagggctccaggtccctgacgtagttgacggtgatggcagaagtaaatctttgtattcttgcagagactttgtttctgaaagaggccaaaagtcatttcaaactgaatctgacggataagataggggccatagctgagaaaaataagtagcgaagccgatctaaaccaaggtgtaactgtgaaatagtaaccatcttctttgcacgtttcaaaattggccctggacgccatcgcaagaggaaaattccaaagctgtgcagcagcggcagtaccattggaagagtttacagcctaccaggactacttagaaggggatcatgtttatttggatatataacccctgattggtttgttttaaaaataaacgttattatgttagtgtcatacctcatggtttccttggaacattctcctctaatcctctttgagagagtgggagggagagattgtgaggggagagagaagtgttaaacagagatgttcctaaggaggaccaggaatcctaaattacctaaataacccacttggttatctccactccttgatagcactgtgtgaggtatgatgcagtcaggtaaaggacaatttatctttgaagacaaagataaattcgagtccccattttcaagagtcagtgagaagtaacagcttgtttgtgtggcactgattgatccttgtccgggcaagtggtccctccacaggttatccggcttggcacacaacagacagaggtgctggcggactgtggaaccagacccgctgtggttcccctcctcaccctgccacttcctagctgtgcatcttggacaactgattgaatcttgtgcctcatttttctgtagaattgaaacaataccctgacccattgggcaatggagatcaaatggcattgatgcaggtaacatgcttaacacagggcctggtatgtagtgggcattcagtaagtggaagttacgattattattaggtatcaaagaacaaaacttaattgtcagaataagcaaaccagttggaataataaacgtagcctttagagttaaatggcacaaccctgatagccacacataaactgttttggttatttttcgttggatattcccagtctttatttctacatccctcttcaggctgagtgcttaaaatacatttatatgtagtctcaattagattatgctgtttcccccaaaagactacagtgactattattttaatttatagaacctcgaattgcatggaatagctaccacatctccctttaaacctggtagcttccaaaacttcctgatggcgttttcgcaaatgggtccctatgtgtcattgaaggagacagtgtatctaggaaaagaaatgaggatactgagcaaggtgttggtggctcatgcctataattccagcattttgggagactaaggcaggtagctagcttgaggccaggagttcaagaccagcctggccaacacaatgagaccccatctccacaaaaaaaaaaaaaaaaaaccctaaaaattatccaggcataatggtgcatactagtagtcctaactactcaggaggttaaagtaggaggatcacttgagcccagaagttcaaagagctatgattgcaccactacactccagcctgggcaacagagtgagaccctgtctcttgagaaaaagaaaaaagttattggttttcccattgcctccaaggcattcagagtggttgttctttctcataatatcattttataaatattcttttagacagtgatctcatacagttactgaaagagtatttacataaaccctgtatgctgtagctcagcatttgatctttgatatttcttctgtggttttgatacatcagttgaaattattctacataggtcagtatcattcagaaaacaccacacatcatagccaggtgctttaggtccacgctcagtctaagttcttcccatcattattctcgtgtgtggagagaggaagggaaggaaagaaggaatgaaggagagagggaaggaaagagggtgggagggaaagggaaggaaggagagagggggaaggaaggaaggaaggaaaggagggagggagggtgaaaaggagagaaggaaggacagagggagaaggaaggaaggtgagggagtgggaaggagagaggggaaaggaaggaaggagggagggaaggaggggaaaggagggaagaatgagggagagggcaggaagggggaagaaggaaggaaggaaggagggagtgggaaggaaggagggagaaaaggatgggaaagataaggaaggaaggagggtggggaaggagggagggggaaggaggaaagaaaggatggaggggacaggaaggagggatgagaaaggaaggagggagggggaaggaaagaaggagaaaaggagggagggaggaggagggaaggaaagagggagggaaggggaaggaagttcagagtactacttaaattaggcatcattggatgattctgttcagccaatttgacacgtgcattttggataccttagtgaagtcgcctcttttaaggattccatattaatcaagaacttctatcatgcttttcggtatggaagggagggagggggaaggaaggaagggaaaaatacagacaggaaggaaggggacaggaagggagggagagagggaggggagggacaggaaggaaaatataggcaggaaggaagggaaggacagggagggagagagggatagggaagggagggagaggaaggaagggagagagggagggacaggaaggaagggaggaaggaagggagagacaggaagagggagggagggacaggaaggaaggaaggaaaatacagacaggaagggaaaggaagggaaggaaggaaggaaatacaggaaggaaaaggaagacaggaagaaggaaaaggaagacaggaagaaggaaaaggaagatggaaggaaggaaggaaagaaaaaaaaaagaatatagacagtatagaccactgcttggccttgagtcagaagagttatggacaagatggaatgaggagttttacctcctgtctggtttctttgtacggtaacactgttactcaaattttattcagtgatattgcattgtatgggccaaggttcatgtaaaatataatcagtgatactgctctatcaaacattgcttcttttcataaagaattctcagcaaaatagactctaaatttgatggccaaaactaatgtcctcaatgcagtgtccaggctcagtctaagttcttcccatcattattctcatgtgtatggagagaggaaggaaagaaggaatgaaggagagagggaaggagggagggagggagggagggaaggggaaggaaggagagagggggaaggaaggaggacaggagggagggagggagggtaaaaaggagggaaggaaggatggagggagaaggaaggaaggtgagggagggggaaggagagaggggaaaggaagttcagagtactacttaaattaggcatcattggatgattctgttcagccaatttgacacgtgcattttggataccttagtgaagtcgcctcttttaaggattccatattaatcaagaacttctatcatgagtttcttttgaaagcctccaaatgagtttttagcctaataactagtgtgccagaaaatttctgtggagcatctacaaacatagggaagtgcattttttaatagatactgaaaaattgatttctgattacaactagaactttccatgattacttaatgccccttgttgaaccttagacagcagtaatgagaaaaatgatagaagttgttgacaacataagagatgatgcatttaacactcgatctcagtttcttccttggacttgtttctaacaccctcccaatggattgagatttgtatctgtggagtaaaaattttacaatattaggccattattagtgccatttataaaggtgcatatgcttgagtattgtctgccctccttatccataaccacagattgaaaatatttttaaaaacatacaaatttcaaaatatagtataacaactatttacatagcatttacatcgtgttaggtattgcaagtaatctagagatggcctaaagtatacagggggatgtgagtaggtatatacaaatactacgctgttttatattagggacttggcacatgagcgtctttggattttggtatccatggggtcctagaaccagtctcccaagggacaattgtaattggtaagaagaaaatgtagagaccacagatcggtgagcatttctgtctgtgaccttcctctggaaaagctcagtctgaagcacaaactgggtcttcatagagaggcacttccagctgcctcagagcactcgctgcaaagcttcgggctgctcagagaaaatggctcctgatgccattatgggcttctcgtcgtgccctgagatgtgctgggttctgtttcttgtgtctattcaatgaattctgacccttcaagagcttcccagatgctttccaggaagaaccctgggccctggggacgactgccttcctaaggaactttccttctagatgcctttgtagtttttcatgtttaagtgacaagtagtgagtggcgctgcttgtagaatctgaacacaaaatgtccccggattagtaggtgtcatccagttatcagtctcgtgctcacacccccgccaccgggtttcgatttgcccatctctgctttgctgctggatctgctggtccttggggcctcactctgaaccacattcttgtgtgctagagggaaatttctgtgtgtgaaatgtggccactagggagtcagtaagttcaggtacaccaggaaaaggcgttgagtcccagagaaaggaaccttcaaggagaagcttggaagagggaggaaatgagtgtgacaagggaccatgggaagaaggagcagaatgtttaaactgaaatccctgtatatactgtacagacaaatagctctttttttctcaaaaaccagttttctgggggaaaaaaatggattgccatgaaatgaagctgtttttaaagtagaaatgtccttgtaggtgagagaaatctacgcagcatccctggaaaatgaaggaagtggttatctcggtgctgactcccactcaagggttgcagaggaaacctgctagttccttgtgatgttgccattatcactccttaccattcccctgtattgtttacaaaacaggaacttcttgaatccatctctgtaaataaactcagctggactttttatcaatctctttatctctttctagatgacagtctaaggacacttatctaacaggtaccattccctgccggttgtggtagtgaccaccctgtgctagcctcagtggccacaagatgagagccctgagggtcctcctaaggaaatgaaagactagggaaacaaaagtttcaccaagttccagaagtcctaaagcatactgtgattatacaaagctatcccttgatctctcacgtctaataagatcgtgtgcgttgtcacatcagcgactccatcatgtgctgttcttttcactagaagacacaattccaaagaaggtggtgtgccacttcagtgggaaggcctatgccgacgaggagcggtgggaccttgacagctgcacccactgctactgcctgcagggccagaccctctgctcgaccgtcagctgcccccctctgccctgtgttgagcccatcaacgtggaaggaagttgctgcccaatgtgtccaggtatctaagccaccatccttccatttgtcaagctgtaatgttgatttaagatgaaatcgaagcagagctcgacctgccccttctttcattcgttcacacggcccaagtagcgtgtcaggcccagttagcgcctccacccaaagaccctatgggtaacttggaaaactatgaccatcccgatgaggggcagattttggttccatgccagaattcctcgggttcttttcttctcatttgcattctctaaactttagtataaccaacctgttaatgacacctgccctattagactagcacagttttagtgcagtgttggactagcctagagaagatggtccaagatgggacccagaagggaagatgcttaaaagccattacactgtgaaaatatattagaaccaaagtggaagacctgcatttaaagaatatagttctggttcattctttttttacttcatcagttccagccagtacccataccatccacgcagccttctcccaagccctcagctgaactgcccatctctttccacacttaacgcaaccactgagtgtaccccagctggctgttgtgaatccccatgcctacatctttccccacgccccactctttgtgtctgctgcattatccctctcatagtttcaaacctaagtccttctcagctgcccagagcctcacctagcccttctcctagtttccatgcctgcatctcctgccaaacaattcctctttcccctgcgtctaatcccagaaatgtaagacctgagccctctccctggggactgacccctagacacacagatttcccggtggtatagaccacacagacccaagtgaaggctcactctaagatctcattgaggtcctcagcgagtcaggagcttttctgtcttacctcgattctcatgttttctcgcagcattatattagagaaccttgttgtattcaatacagggagctgggaaccatgccaattcacaagtgcatctgtactatgcagttgtaagatagggcagttgttaaacccaaagagtttaagtgagctctgcacatgttggccttttgtttaggcgttgtgcagactagccccaattgagcatttctaaaaatgtccatttatctcctaaaaaggataggatgttctgcaaggtaagggggtggaaccatttttcagagccttcagttgggttctctttatagttttccatatacacacttgctgtgtatatggaaaaagcaagtcttaagtgctttaaatgagaataagaaaaaatatatggttttccactggaattattttatctagtgtatattcacctatgtttcacaaatttcataccagtttccccagtaatatgcttttaatgatataaatgatgaaacttgaccttatttatttcacgaagagtcatttaatgccttttatgtgccaagcactgttctaggcactggggacacagcagtgaaccaaatagcagtgcacacggagcttacgttgtagtagggagaagccaggcagctaacaggtaaacagtaactaggtagccaccaagatggggatccggctctggagaaaggcatagcaagacagagaggctggggagaagtggggcaggcaggttgttttgtattatgtagaatggtcagggagcaccttaccaacaagatgagatttaatgaagagacccagaattgcagttctcatggggaacaggcagaacctctgggtatagccagcgccaaggccctggagtgggaacgtgctgtgcgtgttcaaggtagagcagtgttcaaggtgcatgttcaggaggagctgtgtggaggtaactcagtgagcatggaggaggtaagaggtggggcagagaggcagccacggccagacacaaagggtctcgcagatgagtgcaagattgtattgagtgagatgaaaccttggaaggtttggagcagggagcgacaggatctgacttacctttgaatgggatttctctggtgctgggttgaacatagactgtggggcatggaggtcaatagtgaaagcagagagaccaacttggagacttttttaagaatccgggcgagagatgacagtgacttggacagggtggtagccgtggaggtggggagaagtgggcaggttctgactatgccatatgagtcgcatcagtaggatttcaatgtatgcggggagtgagtggaagaggagccaaggatgactacgacattttggtttggggcatttttagcttgaaatagtcattcagcatcaaagtggagctaatgaatagacaaatatctaatctgggcttcaggaaagaaactgaaagtagatctacaaatttgaaagtttagccataggtggtttctagtctcaaggtttttaagccttgagactagatgagagcaccgaagggtaagaataaatagaaaagaaaagagagcgcaggaccgagccctgagaccttctgacttttggagactgagcaggtgcagagggcctagcaaaagaaatagagaaggagcaccaggaataaaggaagaagccaagagggtcagtgacatggaaaccaggtggagaaagggtttctggtaggaaagagtaaactgctcaatcaagcgccactgttagccacgtaagatgcgatgtgggaacagacttgtgcacttagcactgctgtaatgaacttcacagaagtacagtggtggaggcaaagtctaatcagagtgatttcaagaaagaatgggagaggtgaattcaattcacctctcccattgcgagttatggttatgcaactctcatgcagaccataagtgccaagttcatgaataagacagactgtgaagttgagggtccttggagggtttcacagagaaaggacatgagctagattttaaaggacagatgtgctgtcttcattggagtgaagaggataacccaaccaagacctgagatgggaaaagtcaaggccggtgcctctaaggtcaaggccagtgcctctggagcagtgagttttagtagcagtaggtaaggacagaaacagtagctttggcaaggatttttcaggccttaattatcaaatgaagagtgtagattttgttctttatagggaatggggaggcttatttttgagcagctgaatgacatgttcacaaagatgttttggggtaacctttgtgtaacagggtggtgtgcaggaaggactaaagcagagagagaccagaggccaggacagctgtaacaggcactgcaaatgtcctcggtgtgataacaaggacccaaattcaggtagtggtggtagaaatagaggtcaattcattctccttggtttgtgagtttgataagagagagtacagatattgctaacatccttgttcatcattagagatttctccagtgacttctcagttaagatttactattgggttgaaatttaatttctgttaactctcctttctgcatctgctgtattcctgatgaaacatttttctatctttaagcaaatactgcaatcagttgagcttttgccaccttctgtttgatccagtatgggctgccaggaaggctgtattcctgtcccattcttgcatcggttcattgtgtgatcttagtcaagactcaccaccaaagtttcacgcttccatttctcatctggatagcacatgccacctcccagaaatgctgtgaggattataccatctcagaaatgatggtgtgggagcacttcccggtctgtccagcaaacaagaaccttgcttcttcctttagacatagcaactaacattctgaatatcctctttctttacaaaacagtttcacctttaccatctttggatatgagtacagaacctatgagctgttaggtgattagcacctgtctctttacagaagaaactgaggctcaggaaaggtaagagggttatccgaagtcatggagctggttagcagaggatgagacccctgctcctaaattgacctcaggttccatctcccaaaaaaatgctgacctcagcttgtaagcaccaagcacctcgccccgtattccagaagaggacattttaaggaaggcaactcttagagatgaccagatgcctctgaaagtaaaatatatccccagtaaattatcttgagttcctccaaagcgcaggtcaagtatgagcacaggagcgattgtgaccgtgtgcccgtgatcttcgtggtagggctggatgtagctttgtgtaaatctccctggcactgtccatctgtaatgccaacagctgtaaagggctcttctagtaaataccagaagggttatattttagagtcttgggttgaaggcggtctttggccatagaaggcggcctgggtctaggcgtggaaacaaatagcattcccacttctttttgtttcaacaagcagttttttaactgaaagaattgttctttttggcaaaactgctcagaggcagcttcccttttatgttcaaattaaagggaaatgactctcttcccttggacttgaggactgtgaactggagctgtgcgtgttctgtgataaagaaggaggtgtgggtggattttaatcagagctgaactgagtggtggagtgagctaatacacaggacaggttatgagctgctggaagtaagaagtggctgtcaggcatcactcatcaggagagacccatgggggccaggattggtctcactcaaaactgtatgcccaaaaccagtgcctgccatgtaggaagtgctcaggaaatatttgttgaacaaatggtaatacaattaatcactgaagaagacatcctccttcaccatagacagatccttctaactttccctgctgtttccaagtagagcccctgtgggaagaggactcactgtcatgcctcagcttggtggagtttcaccggaaatctacccatatgcagggtcaaggcaaaagaattccaaagttacgtctctccctctcactcaggaaaaaacctgaggtggaactgaatcaatcccagctctggggcctctgcagaaacttttactacttagccattgacatttacaggtttgttggaattggtgtcgcatttgccctttacactgaggcctcagaaaccagtggcagttcggcccctattgtcataggaaggctcagtgtgaagccctggactaggcaggggaggggcagaagggtgtgtgtggcactgaaaggtgtcaagtaaatggcgacatggcttttctgcccatattcacccaggaaattcataccacacatgagagtttttcagtgggtgcattaaataccatccccctgcacacacctcccggaatcacctagtccagacctaccgaatcaggacctgtgagagtcagcacattttctaagctctttgggtaattctgatatgatttttaaaaatttgagagtcactggtttgtgctcaggcccctgcacctgcaaatggtaatgttttcagtaacttctatttttaattctcgagtttgcagggatgcactgaacctgtagaaactataattgttcccagttctttttatgtttaaaggttttataatataactaagaaagcagaagactattcttggaggcaacaagataacttgggctttggaatcacagaactgcatttgaatcccagctctaccacttactagatgcatgattttgagcgatttaacttaacctctctgggtttctttccctggctgggtacccagttaactcatgggggaagcttagcaagtactctcttctctatcactttcctcttctctcaaagtcatcttaaggtttacttctcaaaagcctgttaactttgagacagaaaacaatcactctgagcagaggggattattaatcctattttaatttatatacttatactgtatattttatgttggtctaaattaggctatggtgagtatttaggatcctacgtgttgagtaattgctttataaaaaaatcagtgaataatatggcaggatctgcccgaaaggaaatacgtgcatgacacaaacttttattgtcacattttgaaaacaggttctgaagaattaattgctttaaaatgtggggctagttgtcgttagctggatgaagtataaatacaaagaaatatttgtaggagctgagaaaagttctgattttttttttttttaaaaagacctgatatttgagataaataatattcttctgtttgttttatgttgtagtataatacctatctgatcaaactggataatgtaaatatatttactgaagatcagcttctaatctaaatggttccagtggtaacataatggacatctgagacttatactcatgaggtctacctacagtccattcccatttaggggaagagaaaggagaggaaatggccaagaagtccataagaagtggacagtgctttaactttttcaagttttgctaacatattttatgtaagttattcaatacccccatattaaagagcagcagctattaaacaccaacatttattagctgctggaaagtaataaataacttcagctagtccccttcagtttccataaaattataaaaccaacaccatttgacgtgaaaaagcagtttttgaccctggtggagtagagaattctttcatcttttaaatgttataagacatgtttctcctcactgcaaagctcgtgattctctagcatgagtgatgaatgatgtaaatggcagaaactgcatctttcatgtcccaggaaatgtggtcttgaattgagtgcaccatttggattgagaatacaaaagccaacaatacagcagcttcatcatctcttaggaaaaatgttcccttcttttagaaatgtatgtcccagaaccaaccaatatacccattgagaagacaaaccatcgaggagaggttgacctggaggttcccctgtggcccacgcctagtgaaaatgatatcgtccatctccctagaggtaagcattgaaggcagctgagatctgctagttttctatgtggtctacttaggtgttttctaatttttaaaatttcctatgagtaacttttaaaatgacttgctgaagtaaattcaaataactattcccgggcagacctgcttggctgaaacatatttacaccacacattgataaaataagtcagcaggtaactggattaaatgcctccttcctggccctctgtgctcagagactttgtgatgacggaaataaatggaaataaatatgttcctagtcataagagcctggtatctggaacttctaagccatctctcaaacgtatgtatatataaactttgtaaggagagtaatcatgaattagtcactgtctcttgtagattccgcactgagcatttgtacattaggttaccctctacttctgggcagttttcacttcatgtgagctaaacttatcacctatgttgatttttctagtcaccaggtttactccatgcctttttatcttgctctatcctttcagtctgtgcgtaataaagatgttattttgtctcccaatagctgtcactatttccttttctataaaagtagacctcttcttgatcagtagtataaacttgctcttagccgtgactcagtactgcctcctgtgtcctccaaccatattttccaaatcattgctatataacttatatttcttttggaagaagcaatattcattgcttgagagagattaattgtctgttactctagatattctaaacgttatgcttggatcaaaccagatgaccagaaagtcaaattcctggacctagtgtttttggctctctgtataattgttctgagtgtgctttagcattatgcttacattcattcagtcagtaaatattagtgcctgctgtatgccagaccctgttctagaggctagacttcaacatactgtaagtacgactattcttatgactgaagacctgtgcattgcatagtatctatgttataaagcccctaaagagaaattttctcatgcatcaatagcaagaaaatgtatgcttctcctaggcaactgatttgttttaacctaaaagacattgtgaatcgtattaaagactgatagttgtttccgtttttggctttggctgctacaaagctcaaagctaactttgatggcttggttttagcacagaaacagaactggaagactgaattttgtaaacagacctcacttgcagcttcatttttctttcaccaagaccttccttaatttatatcttattcttcttgtatgacacatattcctaaaactgctttctatttgatttggaatatgggaaagtaaaattcattcttttattcattgtatatttaaaatctgaattcatcaataaaatgttactctttgacatttttcttgatgctggaaaatatgtttctataaagttttattgccatctgcactggctaaaatgattaggaatgttttctacctcccattcctccctgctcccaccacccctccagaacacacacagaagcatatcatttaaaatctgagttttaaaccacagtgttacataccacaaagctctgtcacttcatgagctgaatttccagaacaatttaggagtaactccttttgatactgtgtgtcatgtgtctttaactaaattgatttttaatgcatttagaaaacctgactacaatgatttatttgaaacaaaacagaatataaaaataaggaaactttagggagtgccccctattggtatgtgtttaaccttatttttgtctgcaacattcattgtaagagagatattttaaaagaacataaaggtcatcattcataagtgcaaaactaaatgtagtcacctatgcgatataattcattaaggcagaaaaatgatctaataggcctaagcaagattttcaacaagtttatgaaaagtaagacaatattgcttagagttcagtgaaccagagtatcaaccaaaagaccaacttcctgattgattagttttaatctaattagtcttagctattaacactaattaattaatagtaaaagaacatactttgttctagtctcctgtttgccaataaatcagctaatgtttctccttcgaaatctgagaagaccatgtatgttaacagtaatcaaaatattttcatggtctaattcactttttcaaaatctacctaagcaccttcttatttccttgattagctagagccggcatcatcttacccaattattaagattctcactctgatttttttttttttttttttttttttttaacattcatccctaagcgctctgctctctactaagagctctttggatcaacattagattttaatcacatttttagcctcaaaaaactgggaagcaataaaaccaagttgctgatctctatttgcaatgtcattaaaataatccttaacaattctggtttaggtaataaatgcttataattttttttctcctagatatgggtcacctccaggtagattacagagataacaggctgcacccaagtgaagattcttcactggactccattgcctcagttgtggttcccataattatatgcctctctattataatagcattcctattcatcaatcagaagaaacagtggataccactgctttgctggtatcgaacaccaactaaggtactgtcttgcaaaagttagtctcttgaatgatgaatctaggaaaacttacactcatattgaaattgcttgaaaccttgtgtcttaaccagtgaagtttttactttgctcttcatagcctcaaatccataccaggctatagtatgaatcaaatacatagtacttgcccagggctggactgatcacaaggtgaattatccattatccattggttaatgaagcctaaccttacatggatccagttttctcgatgtactctgaagttttcaaatgaacaaatactcctggatttattcctaaatcattgtttatattagacattaaaacgtgatcacctggcatttcttagtcatcagtcaacttagaattgggagagaaaaaaagtcccaaagggatggagataatactcaggagagggctggaagatcatgagggtatacaaaaggcaaaaggaacaggtcagtgcaccaaaggcaagcaccaagtggaaaggtcgcaaaagatgaagaggtggtggaaagtaatagtagacaaggtagggagaggcagatttcacactaagggagaaaagatgtatgtttgttttcagtacaaacataaagggcctctaaatctgcctattttgaaagacaagaaaaaactgtattaattaagggaaataaatcataatcccttccaactctaattctaccttttgccttgagttggtttattttaatcataaaccttaagaattggaaacagcctgaacaattatgtaatgtaatttaccatctggttaacccttccatgtaaaaattctgtcctgcggttatcctgcctccgatttttctttgaacaaatgtacattgggcacagcctctgtgctgggtcaggatacagttgccagtgtccaaagctgggaaacagacccgctcataaagtgtatggagtgactagcaacacacaggctggcccagcctatgatagtgttgtacagtctgagtggttagaagtcatccctttgtttttaaaatctgcctaccttccactcattcttcagcccccttgaaacacaaggtctgcacttcaaggatttgaaatcatttcaccagtcttttttttttttttttcagttccttcatctccctatttgacagtttcttgacatttcaccttaaaatacagtttgtcagtgtccctcataaaagtatagttggtactagaacaagatgtgataatctgcatacaggctatcaatcaatgaattgtgaaactgttatctcacctgagttaggtactaaatttctgttcatttgagataatgtaaagcaactaattttttgtggttttattcctcctctcattaaatagccttcttccttaaataatcagctagtatctgtggactgcaagaaaggaaccagagtccaggtggacagttcccagagaatgctaagaattgcagaaccagatgcaagattcagtggcttctacagcatgcaaaaacagaaccatctacaggcagacaatttctaccaaacagtgtgaagaaaggcaactaggatgaggtttcaaaagacggaagacgactaaatctgctctaaaaagtaaactagaatttgtgcacttgcttagtggattgtattggattgtgacttgatgtacagcgctaagaccttactgggatgggctctgtctacagcaatgtgcagaacaagcattcccacttttcctcaagataactgaccaagtgttttcttagaaccaaagtttttaaagttgctaagatatatttgcctgtaagatagctgtagagatatttggggtggggacagtgagtttggatggggaaatgggtgggagggtggtgttgggaagaaaaattggtcagcttggctcggggagaaacctggtaacataaaagcagttcagtggcccagaggttatttttttcctattgctctgaagactgcactggttgctgcaaagctcaggcctgaatgagcaggaaacaaaaaaggccttgcgacccagctgccataaccaccttagaactaccagacgagcacatcagaaccctttgacagccatcccaggtctaaagccacaagtttcttttctatacagtcacaactgcagtaggcagtgaggaagccagagaaatgcgatagcggcatttctctaaagcgggttattaaggatatatacagttacactttttgctgcttttattttcttccaagccaatcaatcagccagttcctagcagagtcagcacatgaacaagatctaagtcatttcttgatgtgagcactggagcttttttttttttacaacgtgacaggaagaggagggagagggtgacgaacaccaggcatttccaggggctatatttcactgtttgttgttgctttgttctgttatattgttggttgttcatagtttttgttgaagctctagcttaagaagaaactttttttaaaaagactgtttggggattctttttccttattatatactgattctacaaaatagaaactacttcattttaattgtatattattcaagcacctttgttgaagctcaaaaaaaatgatgcctctttaaactttagcaattataggagtatttatgtaactatcttatgcttcaaaaaacaaaagtatttgtgtgcatgtgtatataatatatatatatacatatatatttatacacatacaatttatgttttcctgttgaatgtatttttatgagattttaaccagaacaaaggcagataaacaggcattccatagcagtgcttttgatcacttacaaattttttgaataacacaaaatctcattctacctgcagtttaattggaaagatgtgtgtgtgagagtatgtatgtgtgtgtgtgtgtgtgtgtgtgtgcgcgcgcacgcacgccttgagcagtcagcattgcacctgctatggagaagggtattcctttattaaaatcttcctcatttggatttgctttcagttggttttcaatttgctcactggccagagacattgatggcagttcttatctgcatcactaatcagctcctggattttttttttttttttttcaaacaatggtttgaaacaactactggaatattgtccacaataagctggaagtttgttgtagtatgcctcaaatataactgactgtatactatagtggtaacttttcaaacagcccttagcacttttatactaattaacccatttgtgcattgagttttcttttaaaaatgcttgttgtgaaagacacagatacccagtatgcttaacgtgaaaagaaaatgtgttctgttttgtaaaggaactttcaagtattgttgtaaatacttggacagaggttgctgaactttaaaaaaaattaatttattattataatgacctaatttattaatctgaagattaaccatttttttgtcttagaatatcaaaaagaaaaagaaaaaggtgttctagctgtttgcatcaaaggaaaaaaagatttattatcaaggggcaatatttttatcttttccaaaataaatttgttaatgatacattacaaaaatagattgacatcagcctgattagtataaattttgttggtaattaatccattcctggcataaaaagtctttatcaaaaaaaattgtagatgcttgctttttgttttttcaatcatggccatattatgaaaatactaacaggatataggacaaggtgtaaatttttttattattattttaaagatatgatttatcctgagtgctgtatctattactcttttactttggttcctgttgtgctcttgtaaaagaaaaatataatttcctgaagaataaaatagatatatggcacttggagtgcatcatagttctacagtttgtttttgttttcttcaaaaaagctgtaagagaattatctgcaacttgattcttggcaggaaataaacattttgagttgaaatcacacagtgtaacttgcaaaaagattccatctctgagatccgaaagacttttaaggttatcagtccaatgaacccctggtgtaacaagaagtcccgtgcttttgtcattaggcgggtctttcccaaggtatccttgcaaaaagaaaagtgtctcccagagtacagagaatagcgatgctgtttttagggagacaagaaacctacctgctgtcagaaacgtgctcatagctggtatcaaaattaacttgctacgcacaggaggactgtggtgggaaatcctacagtggttcgatgctgaagaagaaagactttaccgagcacgatcaggggaagcctaactgcaaagagactttttgagctgacaggaaaaaataaataggtatattttcatacattttagaagcatcaatttaagaatgagctataaacagaccaatgttgaatctcctttaaaaaaatatatccccctaaggactttctactatatcatataccctttaaagctacatttcttcagtacaaggcgtcatttttacaaattcaaattaatttaaattattaatattactgtgtaagtacatgtatctggggaaagggccagtaagttccaaataagaacattaataaaacaaggaaaccatctcgagtttctcatacccctagagatgatggctgaaatgccaagcaggcattaaacttcaaaccgcgcccctgcctttgcagtcatggtgtctcagttgctgagtggagtgaggaatatgttagccctgtttgttttgctcacaggtgtttaagtggaattgtgaaagccgcctgtagcaggtcctatatagactcttaattcattcatgtcgtctatgggaggggtctgcatggctgtttttgaaatgtctcacagccccagaaaaagagcaggacttacttctgtcattccacagcagctcagcatactctaataaacgtcctcctcttccccttcgtagcattctgggactaatcagggtttcatctgctcacatattgtagcgatgggttctgtgtggaattaagggaaagaatctagcactgtaaggaaaaaaaaaatacaacacaaaactcccaaatataaggctctcaaacatgtatttttacttcttaaaaaatttattaaatgccattgatttgactggaaccagcaaaagtgctcatgatattgatgaatccataagtagctgtatctagaattcatacttaagaaaaacacacaggcatgaataaaataggacacagtaatgagaatgggcagttctgcagtgtacactttctcaagcacctcagaggacacacacttaaagtacaattcttcacagacacatgaagcagaacatttgaaaatcaaaacttaaatacaagattctaaaagtgaatggcaatttaatggttaaaatttgaccagtggtgaaacaagcagcaagctacaaaatccatcaccaccaacagtttcaatgttagcactaagtattaaaccaaagtaatgcatattctggttttgcttcttcaagaacagcccgtttattctgtttcaatctctctgaacaatactggtaggtaatagttacactgacaattctcacaaaaaaacagtgttggttcttgccatcactgaatttatagtataaatctcccaaggctttaatctagttcatcagtgcagtttagataagaaagccataaaaacaaatgggcatactgtcagttaatgagaaatacaactgcacatgcacaattaatattactctctcttaatctactaagagaacagtttattagtagatttaacaaaaaccatctctagaattcaaaatagtgcccatatttccgttggttctataatataaagaattagtgtagtcaagatctgttaatactgaatcaaacccaagttcaaatgtgctgagtttccaatagcaagaagggtaatggtagccagctctcagaataatgctgtcggaaatctagcttggagcccaccgcagataaagttgctgctctatgtaggacacagaactagaagaaaaagagaacttttagctacaaatgtatattttgtatacatttacacaaaacatacattttacatgtacatttaaaaaccattaagtaatgagaactaaatgttaatgcaaagatctatgtagcaattttttaaaggttttaagaggctatacccaacaaggatgagttctctcaacacacattagaatttcccagaaatgagataccaaaaggccatgtctcttagggtgccacttggagatagaagcccctaacattcgccctataccatgaggcttgtgacacaacaaacaggatccctagggaagtcaaagaagggtgcaagtttctgcacacatttttattcctaactagcagcacggcagcagccacgcgtacattacttcagaatcagccttgggtactactgtcaaggcagcagtggcggcaggctgcagtggggtcattaggcaggtgcgagaaagagaagctcaattagcccatacagtgcccaccctactcccttttctcaggccaaatgagaccacttttctaccttctttcacttctgacatttgcattaaaactaagtggtgtatttaggcagccaagccacactctcatctgtgttaaaacaacaacaaaccacccaaaaaaggggaaggagtattctccccttgagcaatatccccctcccgggcaaagtgtcgtattattggtccccaaggaagaggaacagttaaccagctgtgaactttcaggatgggtggaaaagagcattttcaatgacccgacttccccaccttcccacacacatttgggtaaatacatctccacattgcactcccgtcttcattttctctgactacagtctccactgtagtctaaatccttgctgcttttccacccagtcctcacaatacaaagccaagacaaaaccacaacacatgcacacagacagctcatcagaagcaggtacagtatagatagaactgggcttacagacaggagccagcggcccgagcatgaggagcagaattagatgggtgctgcttccctaaggcatgcggtataggtaggttcacaattatagtcctaggttttcagagtaaagaattaaaaatcatttttccccagaggactctgttctttgggtcataacatccttccatgcagttaaatgctaaaatagctagagaatgcttcagaagctcattctatctctggccctcatagaggcctaggaacccgatataattaaaatttaagacatgttctttatgttcgtctcattcctgtttcacatctagaagaacgaacctcagaacaatccagctttcataccaatgctagcacaacacaaaagcaaacaaagatgtcaggtattaaaaaaaaaatttttcagaattttatagggagaaaaagtcctccatcagaaaaaaagcttattttttaaaatgatgtcaactcagtctgttctactccagtgtcaacccactagtgtctagctcatgcttcttactctcaccgcatcaagactcttacaagtgaaatgtgtgattcactttgagcaccctgtgtatactactgaggttcccctttcatgacactatggtttaagaaaagaccatcagaggtttctaatgtctcagaaatcttcatcttccttgtgctcagctaactttaatggagaagagagagaacccagagaagaagactgttactagaagaggattgctctcaaaatttgatcaaacactacaaagatgcattttgtgatgctttcaaaatctggtccctgaatacctgctactttaaaaaaatatttcatcgtaaagtattaattttgcctctaattaagttcttccgtcccttctttatcatccaaactttgctcttttctcggcaaagcaactcaacctctcactcttcttttgcctcatcaatattcccaccctgtgtgagcctcaccttgcctctaagatttgtggctgctttttcactttcctgggtttatgcaagtccattctttttatttccccgcttccctccctgtgtcttacatcagtccctttcgtattccctttggcactgttcacagatgtgactcttccttccttcatccgtcctcactaatgatctgtcctcctttccactgtcctcaagatgacagagaccacccttctcaaatttcccagtgccaatctgccaacatctgatacccacatgattatggtgccatctcactaattttcttctactacctctcttgatgtttatagtttaactgtggagattatttccaacccagaacctccaataaaacttaaattatataaaaccatgatatataatgttggtagaagtcagtcatgtagctaatcctcaccctgcataataagattaatgaaagttgtgcattgggaagttactgtctaatgtattagcaaggcgatgtatttactgactaatccaaacctcccagccatcgcacctataccattataaaactcacctttcagaatataatcagttaacaagctcggaactttttcactgtcctccttcatggcacgaagaactgcaaaatagaagaggggaaaaaagacaacaattaaaaatttagatcaaaaatattatttaatttcaatcattgtggccttaatcttccttaattataggatataactgactcatacaaattataggtgattttcctgataaggggatacaacaataaaggcccaataatttattttagtggagtaagtccacaagaatttattttcggtaagaatatcccacttacctgagagttgcttccctgatttaaaatttccaaacagtggagacaaaaaaagaggaactgggttatttacaaggagccttcgctctgtaataataccggaaagtgggttactataatgtgcacctcaatgaactctgtgcagcaagaaaacctcagtgctgcagatcaagcaaactagagaaactcttaaagaaatggacagctataccctccaacaagcgtatcctgtcagactccttagaaactttcaaagaaaagacccaaatgaagaacagacttccatgaagcagcatcgggcatctgcctggctgttgcctcctctgcactagggagaaacctgggagaattagcctcattctaatttgacaaatttatcttctaagtaaaaactaaaatagaaaaagcagccacctagtataacgtttttcttttttaagctagaccattcaggttgagataaactcacaaatattatactttaacagagattgccaactcaaattttctccaaagcatcctggtaaaaatatttcactgtttttccccaccaatacgacaaggcaaaatagtgtaactgtcaaatcagccttcctgggtttaaaccctggctctgccacttcctaattgtgtgacgctgagcaagctacttaaccacttttgcaccaagctcttcatctgtgaaatgagaataataattagatttaatctcaaaggtttgttatgaggactaagctactaattcagatataaaggtcatatcatagtgcctggcacatagtacatgctatgtattaactgtaactaacactactcaaattatttaaatttttattaactattattattgcacccaaaatcccctaatagcttttatcaggaagactatatatccataaacactgtgactgtctccacagggctcttcttttggaaagaaaaggagctttggacccaaatatgtccagagattccaaactgtgacaacctataaagacatctcgatgctggaattatgatgactttagtttgaccaatgaagtatttgttcttgatctgagaagctgaggcctgccagtaattcctggcttatgagcaatatttatgttcccttctttagagggctaccatgttcagtatttctgcttccaatcatgtttaaaattttttctaacttctaaataaaatcacataccaaaaaccagcatcattaaaagtataattgcctgggaattaagagatccagctctgtaactaaccatccccctgtgtgatcttggacacatataacttaagttcttcctgaaaataagagggctagctacccagttaatctcttgattttttatttcagactggctggcatcacttgatttatccatatttaaatataaaatttttaaagaattattcaccaaaggaaagaataaaagctccaagttagcaggcagggagctaagaaataagacacttgcttctactcttaggttttccttgcccattcctcttaaatttccaaaataagtatcatcatccatactcatccatgtgatgctctttcatttggttcccccctaattagcaagtatcataaatatttaccataacaaagacctaacagatcagcaaattcaatccctccattttaacggctaattgatagtaacttagccaaaatcatacatatattaatctatttactgtgaggtaaatagaacaaatattttttatcctagtttttcaatgtaagcaaaagagagtaagtaacttccaaggatatccctgaaaataacagggatagaaccagaattcaaggctcatttgcggccatcataagagatactcaatatcatgtatatttaaatctaacaattttttttttaaggcaagccccttgaaggtgcattatctttgtctgctttgttcactaaagtatcccaagtgcccagatcatggcctggtacagagtaggccttcactaaatatttgctgaatgaatgcatgttcttaaaacatcactgtcaatttatgttctacctataactactacctcgggttctacattcataagaaataaaaagtgtttaccgtaaatctttcctattcagttactgacaatcatagatatataagatccataaggaattttatttatgataaatggatatgttcttaaacatgtaagagatgatggagatttaggttatgctttttcccaaaattttagctcataaatatttcacaaggtaagaaaaacagaaaaagtacaaatcaacactagagttactgttgtatttaatgtcacagccatttttggcttcattcttataaaaataaacaattatatgcatcatttacatcctaaactgacaaaacactaacaacaaaatcagccaactaaagtcaggtgtttaccaatcagcaaaaggaaatcaggtaatagtttcattttgtctttgctcactttttgttaatatttgaagatcttcaacagacggtggtccgttttttttctcataaggaatgactgtagtcaaatactgccaagtttaaaaaaaaaaagtgtcacttaaatcggaattaccttatctgcaaaaaatttgatactgttactagaaggtctatctgataatataaaacacaagctactttggtaatgaaaacacaggtattgtatgggaataaagttatcttactatctcagatggagctcatttttttttgcccacctctatttgcttcatacaaacctaatgtcaacagaaacaaccacctttttgcatttcagttattgaaaatttcataggactaagtctgaggatggtttactcaatttgttcatttttaaagtgaagtattatctcacattctacttgcatatttttcaacacattttaaaaatagcaatttaaactaaaaacatagttttaacagttctgcacaataaagtaatttccaacagcaaaataattctgtttcagaccatttttattctggttgaacaaatggtccacatatataacatgacaactttgaaaaacacacactagcttctttcagaagctaacaaagacacacttaaatcgttttagaaatgcgttactattattttaaattattgggtaagtcattgtaaacgtttttaggcattaaaggagaaaagttaaagtagagaatggcctaaggggaaatgaataatgaaaattaatgtctgaaattgagataaacttcctagttcactacttgtaaaggctcacaagtaacagcgccatgtcttttaactaatcccatgaaagcataatccataaatgattgtccagattttcctgttcttaccatcccaccaaaaaaatagttccgtgcatttcacatatgctcatatagaaagccagtggtttttacctggaatctcttagctccacccattatttaacctcgtgccctaaatctcagctctgtggctaatcctcactgagtgatcttatcctgcccataactgaaaaacaggataaagaaagctgctttacagtaactggatccctaagtccagaaaagtggtaaaactgcatagttcaatctctgagacacgttaagtgtcccaccgtctttttgacgtagacttcttgcaggtgatgcccaattgtataatcgaatgtttctttgtaaagaacaacaacaacaaaaggccagaaatgatgtcctcctggcttcactctgcatgtgtgaggcaacctggagaggcaccaggcggctgcaccctggcccgctctctggctacctggctgcatcttcaggcctccctgctccactgacagtctggaagattccttgtcttcttttgaggttgagagaggtgagaggcaacggaatgaaaacaaaaactcaaacatcccttcatggagctcattgatgagctgcaaatgtcagtgtgaggcttccctctttaataggaatgatctcccttccggagaaacacttaactacctgcagtaaaaactccaggcatttgatctaggcgttcttttgctaaacttcctacaagctacattttgtacaccttcttaatctgcacagaagagctaacttaaagacttttctttttcaaggtgaaaatttcatatagtgaaaggtaattttaagcatacccattaatgtgaatgtttcccatgttcatgatattccttcaatcattatacaaaaatgtgaataaaaagcaaattgctagatacttgattatatattcatatctgtgtataattttgtataaataatgtcgcatgcctcgtttggcagacaactgagttggctgactatgcaatacaccttaaaaacacatgaatttcatttaaaggaggtaagatacactctatacatatttttgacctagaactctagtctcaaacataccgacatctggccttcttcccccaaaaatgacatcttgcgacttagacttttagaattagagtcacatattttagtttagttattttcacaagcagattttctacacatgcaatacattatgttaaaatgttaatatttgtttaaaactaagagtgaaaaatggagctataaaacacgtcttaagaatgcatttaatctattgtcgaatttgaaaaatgctttttcctcaaagggaaattctgttcattatcaagactataaatataatgaacttttataataaacttttatttctctcgttaagcaatggtcttagtaaattagtaaactaccagctttcaggatcttcacttacacagaaaatgaaaaagcagagaatgaggaaaataaggataaccgagcacctgtttctctccacctgaatttccaaaggtgtggcggaggccattctgaatgacatttgagatcccttccatgctgaagcgctaaaggcggcaatatacggcccagaagaaaaggacagagaaagaagttcaaagtctattagtaagaatgtaccatgatgacttatgtgcccaagaggcaagcagttagaaaatgccactactcatccagataaagcacataaacccatgctctttttaaaatgctgttgcttccatttctttgcaagttaaatgcaaaagcaactgtttttatgctactatattcatgcaggcatttttctgatgtagctaattgttccaatgtaaatgttgtaagttgtacacatatttgttctatacaaaatttactgtgtaatttttaagatactttttgatattatttacctacattttatcagaagtctgaaaacttaagatgaacagtatgcgtattttcagcctaagtttgtataattctaccatcagtttggagaacattaacataacatttagcaaatgaaaatgctgttacttggagagctgattattgcttcccactcactcttcgggccacctgccactgccttggtgcagaaatgcgaactagaagatggcatacgcttcctggagagcagagtggatcccatgtgccagccaggcccccaaaaacttctccaaagacttttccactccgtttctaggaaacaattctactttctttctcccagcaacctccaagacttcctagaattctttgtactgaaaagggagtatttttttcctaaacaacttatcttgatttgtaaccagtctacaatgtcatcaagcatagtaaaaagcgtctggtggcacctctatggcggctgagtcaaaggagtgagatggattcttacagcatgactaattaaggggaaaggcttcgtgaaaaggaagtgaaggcctgactcacttgatggttccttcccctggaattttatagaggaaatttaaatcagtaaacacatttgaggagtcaacataaagaatattttaccaggccccaaggggcagaagaaaggaaaccaagggaatggtcatcaagaaatacatatagtttcatccagtggttctcaaagtgtagtccagggaccccctcccacccaactcctgccaagaggtccctgaaatcctctcaggagttcaggagttcaaaaatgttttcttaatactactaaaatataagttgtcttttttactctcattctctcatgacttacagtgaaatattccaaatgacagactgaatgcagaagcacatttgtgaatctagctgtctttaatcaagccagatgttaatgagattgacaaaaatgcacagcaatgatattttttcatgattttgtaaaatattatttttcataaatatatgctctttataatgaatttatttttggtatttttcatgaatttatatttttaattttatcacttttaatttgtaacatggctaatattaagtttcttggggtccttgataaattttaagagcgtaaagaagtcttgataacaaaaagctaagaaatgccaacaggctgaatcactgagggagctatgtgcttctgtatcagtcatgtaactctatggagttactgaaaatctgagttccaaattttactaccttacaggagactgtacaaatatgcctctcctcctaaaccatccaacttccctacctagcctttcccagatttgcaagccagttttgcttcagcaagaatcaaatgtctagtcaagatactttgctgactactcttcacttcactgaaagcataactattagctttgatggaggaggctagttataaaacaaaaacctacagaaaactatttctgtaaatttttccaatgctatcataattcattcatattttttaagcagattatcaaatgagataacatcttaggcttcagagtatataataacaattatgagaaactattctcaaataaccaagtcagtttattttttaaattattttcataaaatatattttctttcaaatgtgacaaagagaagagtacttgtttttaagtacttagtctatattacctggctccattatctatgagcatgtttaagctagatacaaattcataaaatctaaagctagataaaaagtttcagaatccacctatcaggaaactaagacacactttctatttggaaagcacattccaaaaacactagctttgttttcgcaatcagaaagccaattcctgtcactagaaaaaacaaaagttgatgcagtttcaatttcgtaacatgcagatgtaatttaggttttctttattaaatgtgtggttgcagacattactgagccatctcaactactgacagcctgactacttgtgaaagatggcttttgtgccaccagaattttaggcttaggggaaattagtgaaaatgcaaccccatgggaagccaaggtaacctggaaaaacaaaactaacagctgatgccagtgaaagaaggtaaagtaaggaatgcagcagaacctctgtccttgctgctgatggctgctgagtcagtggctgcagctgacaagaccctactgtccccagctctttcactggcaatgaaccagggaagcaatgtgcagcatgtacagttcaatcgcctcttgatccattggaaaattacagaacaaggaaatcagaaggttctacaggaaaaaaaagaaaaaaaaaaaaaactaaaatctacgtctgagaacgtgctcctatcaaacgcttcagttgcaatcaactcctacctccccagaagtcaggcagcatcaatattctccctccactgcatttccaaactctccctctctactagctccttcctgacagcatcccgaaattctcaaaccctcaacctctttcctttcccaaggttttcctgaaacagctcttcccaacatcatttatttgatctggaagaccacggccacttttcagatctctgagacatccaggaatccctcctccctgaaccgcttccttggattcagagacaccacactctcccagatttccctcaccccaaccctcctgctctctagttgcttcttctaagaggggccactttcttcactcatcccttaaatgccagtgttccctaggatcttgtgcctctttcttgactcacctctcagatgctgctgtgcctctggattctgtccctatttaattatcatgcaccccctctgggtattaccaatcaatagcttcatcttctgcttccataaattgatagctccactttactaagatcagtaaagtgctaagaacagagactggcacatggcaaagctcagtacatgttagctatctttactgtaatttccctgagcttcactctgcatgtttaatggccaattggacatctgtacctattgtatgtttaatggcctattgacaagcctatgttcctgtctatatttaatatcaatatttctaaaactcatatccaaaactgaattcaatgtcctcttccccaccaaaacacaaacaaaaaaatttaaaaaccggttcctccttcagcattttattctcctcgttcattcatttcctctttctttcaaaaaacatcctgagccagataccattccaggtattagagattcagagtgaacacatcagccaaggcccctcccaccctcctgaccttacattccagcataagggggcacaaaaagcacaacacgtaaatgaagcgaatgctgcagataactaacacatgccctatccctagctccagcaaggcgattaaaaactggatgcctactttctactcggacgccagagaaaagctgcctgaggagatgacatctgagctgaaatatgacgtatacacccatcctagatgagccacaaaggacaatggacaagggagatcttctcagagaacaaaaccaaaagcagccaaccgggccaactcgggagttcacgccacagctagtgtgcaggaggtcttgcaattctcattcaatgggatggaacacagcatctatggaatatgtccattctctcctcctttttataagatgttattgcagcaaccctgtcttctctcccccgttgtgtgccaatgtgttgcaatggctggcttaactttcagaccataggttgacggaaaagagagacatcccctcatttgctggacttgaagctagaagcaggtactgctgacaagatttacatacctccctttggggaaggggcacatgtgctttatctatgtttgccctcgtcaacaatcaatgacctgaccctaactcctcccttctttggtgtccgaaacaatcaacctcaccaatatctctgaaattcaactatttatatttccatccctactttcacttccctggctcaattcttacatgaaatcgctgcaacagcctcctaattaacttatctccagttgcctccttccaattagttctccttgaaaccactgaagttctcttccaaaacagacaaacccaaacatgtaactacctgacctaaaatccatttttggttctctaaaccctttaaacaaaaaccaggtgcctcagaatgtcgtacgacgccatccattttccagcttccactgtgcaatttccatagcctcttcttgagtttcttgccccctcaccttctagctttcaccataatgagcagcctgcatttccccagatgtccctaactgtcccctccaagtggtggcacacaccaccccctctgctgtctgtgcctgttccctcctccttctacctgacctccgggtgcaactcagccttcccagacccctaaacctagctaggggcaatagtaatatatgtccaccttgaccacagaacagagccaggctcagaaaacactaaaaacgtggtagttgttttgaatatagcaattatcacaccctgtacctaggtttctccacgttgacactactgacatttccagtcagatcattcttgtcacgggggtcagtgtagtggggtgggatctccactagcacctccggtctctgttcaccaggatgccagcagtaccacccccatccttccccaccctgcccagttgtgacaacaacaaatgttttcagacattgactcatgtcccatggggggcaaaattggcctggttgagaatcaccgcactaaagcacattggatggttcatcattcaatctgcaacccatgggcagcacattcctggaaaactgaaattggttctacatccttaacacccatgccagggacacaactgtggatcaattaatgtttgcctaatagtagtataagaaaagttcaggagatggagaccatcctggctaacacagtgaaacaccatctctactaaaaatacaaaaaattcgccaggcacggtggcgggcacctgtagtcccagctactcgggaggctgaggcaggagaatggcgtgaatccgggaggcggagcttgcagtgagccgagatcgcgccactgcactccaccctggacgacagagcgagactccgtctcaaaaaaaaaaaaaagtaatcaagatatttttaatggggaggtagagtgcacaagatctaaagagaaacaataaagaaagaaaaatgaaaattctggtcaggttaatttttcataaattcaactcaagttctcaaaatccttaaggacagaaaaaaaaaaatgtcagatacttctttcatatgctccaaaaagcaaaaaccagaccagtatgtaggaggcatctgactgatagtcagtgacttaacctgcaaaacgctacagcgatcattaccaataccagtgggatacttccagatttctgtatgaaaccaggaatcatagctcaggcaaaagtcttagaatcaagaaatttttaaacggtcaacttggacagaaaagtgctgaattagaaatcgaagatctgggttctttcccagctttgccactaattgtgtgacaggagggcagtcactttactgccaaggcctgttacctcacctgtaaaacagatgattaaatcatattaactttaaacgtcttcttatttgtaaatcctacgagtctatggattaattcaatcaaaaagatccattattaagcaaattaaaaacacacacatacgcatagacacacacacactctctctctctctctataggactaaataaatgagtgctccagaatggcagaactgcacagccagatgatacattcagagtccagtggcttcattttcttatgaggaaatgactacattctgaagggagagacaggtcttaggcatctttccatccccgcagcttgcatagtgcctgggccatagcagtcatttttaaacgtctcataagctgaggctgtgacactcctaacaccagaacccaagagccttagagcctatgatcgtttcaccatatcatgaggtgtcttgacttcttgcaggagagaaagaaaaaaaaaaagcccaaaataagtggagtatgaacagaataaagatgacaggacagaacatcaagttatttttcagaagagtgaacaacggagttctggaaaagtccactgaagaatctagtctaggaaagtaagatgagattaatgaaataatcttgttggcgtggtttataaaacataaaacaatggagtgactaagaaatctcaaaccccggccaggcacggaggctcacgcctgtaatcccagcactttgggaggccgaggtgggtggatcacctgacgtcaggagttcgagaccagcctggccaacctggtgaaacctcatctctactaaaagtacaaaaattagccagacgtggtggcgggtgcctgtaatcccagctactcgagaggctcaggcaggagaatcacttgaacccgggaggcggaggttgcagtgagccaagatcgcaccattgcactccagcctgggcaatagagcgagactctgtctcaaaaaaaaaaaaaagaaatctcaaacccctagctaggataatcaaagagtagcaagtaggagatcagtgaactagaaggataaaggaaaagagagaccagggcagtgagaccaggaagaaacaggaaacgagctgtgtagagcatactgtgcattctgttttatagctgccctgtaaattccaaaaaataacacacccttttggaaggcaaaatgaattttaaaaagataaaacctcagaggcaggttaaatatactttttagtaaacgtcacctcatttagaaacactacatttacaaccttgagagcagatgcggtattattaggtgcttatggtgcttaactgggccagagggaagattttctctatgcttaaattttataagtaggaggacaaggaaagggagagacagaaggggtaggggaggagggagacagagtgggagggggaagggagggaagcatttctttgataacatttctcaaggttaaagtaccaaagacataccaaagcgccaacagaactaagtctcagggttatgaatgctgaatgaaatgaaggacattaaagatttgttactaaataaataagtaaataattttttaaaagaaaagaaaaaacaatttgttacagtttaatttaaataactgcaataacgcagtatatcagaaaacccaatcctccctccatttaatctaccatttccaagtttgaaataaagaatccaagtgttcaaattcaaagtgaagaactggtgaaaattctgaatctgaagttattttgtaattgattcatccatttcccactacgtctttaggaaggagttaatagtgctataaaatgccccctctcaggatggaatttttgataggagcccatttgtgagcagggaaatgattaagcattacagtatttactttattgttgccctcactactgacaaatgccaaagtaatgtggcaaggacggaggaagagggtattcaatacacagcttcaacaccagtatttacgctgagaatactcaccactgcctcgtggttgtttccttccctggcataagtatgtattgaaagtctcaaaatcagtccttatctggaaacttttctcagacaaaaccagtagcaacaatgtataaacaggatatagatttataaaaattcaccaaaatctgaaagacgaagaaatgggccaagatccccaaggcccatttacaacatccttgcaaagctcagaaaacgaaaattcaagccaaggatccttccatccacctctaaataactccacatcctcattccaatgcatgctggttctgtgagctaaggtccctgttaagcttttgtttactcatttatgaaatggaaataataacaataataccttctttatagagttgttgtgaaggttacatggaataatccatgcaagtacctagcaaagtgctcagcaaatatcaatattcaaaaaagtattggctataattcctaaaaataaaaaggatagaataatattttagacacaactcccaaagagaaataaccacacctttctacttttctccagaacagcaaaaacagcatttcaagttcttctaatataaataaaattgcagctgagaaaaaataaatccccgattatagttcctagctgataggactgaaaacaacataaagagacattactatctatgactaagcacagaatcagcaaaaaagcttaaacagaaaacaagttaacacttaaataattcggtctttctgaacaataaaaagaaaagagctagagaacactatgctacataaaagtgaacaagaatcagatacagtgctgcagtttgttagttcttctgtggtatcttaaatatatcagcttcttctacacacagcatattcaccagttcaaccagcttcacagaaagcaacatccaagacagggaaaagcaagacaacaaagggctcaggaaatttacactattcccgctatcaaacttgtttctcagcctcacctgacaccaactggtacagatttctaactggccaggaaatcattttaaaatctcaatatcaaagctcaatgacagaaaaaaggtttgaaaaagcactcaaggaatgcttttcatctatttctgactcttactctaatctactcttacttcattaatattctttatactcaggaggttcaaatgaaagcaaaatgaaaacataattattgttcctgataaatcacgacactttcaatagcttgaatatgattttcaaacattataaaacagtaggtttaatttttaataaattaaaataatcaaaatgaggaaacaagtgtaaaaaatttagagtaaaaatattcaaatagttaagatattatttaagatgtaaaagtaatatcttgttttaatacttcaaataattttaatgtgaattataaagcagttataaaagcaaattctaccaaaaatttttttaaaaaaacagatctaagtaaattagaaaatatacattataccaaagcagatacacacttgaaaatcttcaatattaaacaactgttatatgagtttatttttatggcagaaaaaatataatacaaagatcttcaaaattagcattaaataatttaatttttatctttgaagatctttttaaaattttttatgtaacttaatattaatgtggaaactaaactaattattgccaaatattttcaaaaccactaaaactagaatataataattgatcttggcaattttagaaattccttcctgaaacataaatactctaagtacagtcatgtgctgcttaaaaatgaggatacattctaagaaatgagtcaggcaactttgtcgtatagaccatgacagagtgtacttacacaaacctacataattgtatagtctactccatacttaggctacatggtatagtctactgctcctaggctacaaacctatatagcctgttactgtactgaataatgtagacaacagtaacacaatggtaagtatttgtgtatctaaatatagataaacatagaaaaagtacagtaaaaatacagcattataatcctgactccatcatctatctatacgcagtccatgactgaccgaaatatcactatgtggcacaagactgtatacaagaagaacacaatttcctggcacattacagcttttatgtgaacttgtttatattaacaatgacctctctaacacataaagaagtcaagaatggactcctgatttttactacattaactgatggatcatgaaagttcactattaccagcctaccaccaaaaaccattgcagaaaacaaagtgtagatgataaaaacatatcgaaaactgatgatgacatatatttctctaggtaatattatttttcataaaacaaatttgttccacatctaaagtaattcataattcataggtttgaattattaaaataatagccattatatagtcaagtttttctccaccctacaatgaccttctatcatgctaatagtaattcttagtaaatgctttgcactaaagaaaatgcagcaagatactatcaaatatcaccaacaaattattgttaaaatgtgtcaatatttacattcaagaatgcgtatcagagccgggcacggttgctcacgcctgtaatcccagcactttgggaggccgaggtgggcggatcgcttgaggccagtagttcaagaccatcctggccaacttggtgaaaccccatctctactaaaaaaaattagccgagtgtgctggcgggcgccgtcatcccagctactcaggaggctgaggcaggagaaccgcttgaacccaggaggtagaggctgcagtgggcccagatggcaccactgcactccagcctgggcaatagagcaagaccctgtctcaaaaaaaaagaatgtatgtcaggtagaatttagtatctcaagcaccactgcttagataaaggggaaaaaggctgggcactgtggctcactcctgtaatcccagcactttgggagtccagggcaggtggatcacctgagatcaggagttcaagacaagcctggccaacatggtgaaaccccacctctactgaaaaaaaaaaaaatacaaaagttagccgggcggggtggaccacacttgtaatcccagctactcgggaggctgaggcaggagaatcgctggaaccggggatgcggaggttgcagtgagccgagatcgcgcccctgcactccagcatgagcggctgagtgagactccgtctcaggaaaaaaaaaaaaaaaaaaaaaaaaaaagataaaggggaaaaaaactcatgccttttccacttctcctctaaccttcttttaaaaccacattttatcactgtgtataatacaacatttttattccttttgtttgtctccatatttagagaacactggtctacctgctcactctctttacctagccaccgggattcagacacacacagcacagaggtctgctgttagacaagaagctgccacacgtagcttggagattggctggccaaggtgtcactatcactcaggctgctgctgaaggggccccaagaaaaggaacaattcaacataatctcaagataaaacaaagtaaccttttaaatacaaactttagaaacattacagtactctttttatctatgcaaactcacttaactggagttcataactttttgttctactttttaattttactaagtctaaatcagagattggcaaactttttctgtcaagagccaggcattaattattttaggctttgtaagccacacagtctctacggcaaccactcaactctgtccatatagccccaaagctgctacagatgatatataaatgaatgaacatagctgtgttccagtaaaactgtattcataaaacaggtgaagagttgatttagcccttggacagtagtctgccttgacaatccctggtttaaatcatctgagcaaatgtgctgttaaaaaaattccaaattaaaaagaaggggggaaaaagccaggtccatgttgttttaaacagaagccccaaacaaaggctatcaatcatattataacatgagctgagtcacagaaacggagcaatgtagctgtgaaagaaaatatatacaagaaagagtgtatatcatctaagccctagctctcccccatccttcagcaattctctccctaacccccgaaaagcaataaattagggtaatgtgattctttttacagttttttcttttctctactaccgttagtcactgattgctaatatcccaaaagttgtccgtataaactttttcagggttgactgacgcagttatgcatttttgatggtggagtgtaacacagtagaaattctctcttcaaagttcaatgtcattatggcaaacagaaaagactatcgattcctatcttctcaacaagacttagcataaacaaccttacatgtgacattcaattcaaagatttgttactagatactcagagggtaactattccattttcatacatataagtttactaagttatgatgctaagcaggtaggccataatgcccagacaactgcagataacactagatgaacagcaactactaaattacaacataacctggtgttgttcaacctattcttgtattcatgagaactgctactgaaattcaatgacctgtgaatgtctgatgtaacagaagcctggctcccccaataaaaatccccaatagaacaataataattcaaatactacaaatctaaatcctccgggattcaatctcctgtacactgaagtttcaattcaacaaacatgcattaagtgatgtgcgaagaacaagaaattaggtgaggtgctgggaaagcagtgtgaatgagcctttaaagagcttgcactctgttagaagagaggtttaagccaatgattacaacacagtgtggtacttcaatatcacaagtatgtgtaccctcacaaataaatatgaaaacacctcataacaggcatataaacataataggcaactcataaaagaatacaaatggtcaacagatcaaacccattgtttgcctgtgcagtgtatattcaaaagctcttaatatctcctgttggcgggaggtgtgggaaaatggtcactcttacgctctactgggctacacttctacacaataatttgaaaagctggtcatttaaagccatttaaaactctatattctttgacttggaaattctatcagtttcagtgagtggataaactagttttgctaaccaaaagaaaataattcaattttaggaaaatggtaactttggtttaatagtataaatttcagactcctacaagatatccaaagggaattgtctagtaggcagttggacatatataacaattagcatttactcatggtgtttgctatgtttgctaatcttatatacattatttcatttaatctctccaaaattcaaagccgtctgtatgtaggacgaagattcaaacacagctcttaacccaaagctcttagtcaatattctattgtcttagacaatattcactgtccatgggtttgacacctggcagaaagatccaatatagaaatatatatttgcaagtttatctttcgttcactcattcattcagcagaaatttattaggtacctaaggttggatctacgaataccgagaaagtaaagttaaatttcttatcattagggacataaaacagagataggcatgaaaacaaaaaattgcagtatgatacaacagtgataatagaaatactaaagaggagtaacactaacccctctaaaaagagagagtagtcaactctgcatcggacagagtcatcaaggaaggttctaagaaaggaagacaatgcttggccatgattttaaaggatgagtgagaaaaaaaaaaaatcccccaagtggacagaagcagcaggtaaggaatttgattccagaagaagagcattgaatataaagaagtgtcacccaaaacagcatggtcagcacaaagaaatacatgtaggtcaccatagtgataaacagacagtgccctttaaccactctctaaccccccatcctctgctcctccagatgctgcaaaaaaggacagaggaaatataaagcctgccactctcttgagttgcacttcccaaagaggtccactcctttaacctcctcttcaaacggagaattggaaagggactaggcaggctcccttgtcaatgaggagaagcagtggtgtagtgacactctccaaaacagcttcccaacagcatcaccatctaccacctcacccagcctatggttttcttcatggcctttatttactactaaaattccatcatctattcattttttccttgtgtattgcctttctccgtcattagactataagctccaggaaggcatgggatgggcctcatctattctattctattcaccactgtggtttttctgttttttgtttgagacaaggtcgggctgtaagtggagtggtgtgaccatggcccactgcagcctcaacctcctgggctcaagcaatcctctcgcctcagactcccaagtagttgggactacaggtgcatgccaccacacctggctaattttataatttttattttgtaaagacaaggtctcactatattgcccagtctggcctcaaactcctgggctcaaggaatcctcccacctcagcctctcaaagtcctagaattaccatcatgagtcatcctgcccactgtatcttgaagaacacctgccacaggaaagcactccacaaatccttgctgaatgaatgaatattgtttcatcttacccaacatacagcattatggttattttaaacctaaaactccaatcaaaatcatatttcacttttataagataatactttctgtaacatttcacatattttcatggtctaatgaaattttccaatgctctaaatagcatccctatgccctctattttttttttcaccacaacaaatatttaaaacaaaatctgtctccaagtttaactctgctctatacccactccaatatttcattagagtatctttggaccaaagagaacaaggtaacaattttagattaagtggtatgccaactacaaattgatgtactgcttcagtgaaacatacatgaagaaaaatggaagctattctatacttaacgaaaaacttcaagtcctgctaataaaacaaaaatatctcaggcaggagaaaaaaaaaagtgacttatgttattggaaaaacaggtaacatatgacaattctaaggaggtcaccattttttaggaattagtatcactgataatagcaaactcatagagaccaggtcttgccaagactgcatgtgatataaaatgcttggtaaaatgtttggcaagctcctggaatctgtttatccaactgcctatttcactttgggtttcttttgagcaacctaccactattttcagaatcacccttccagcctacttgtgtcacagataggaaggtctttccctggcattttaggctttttattttttttttttgagacagagcctcgttctgttgcccgggctggagtacagtggagcaatcttggctcgctgcaacctccgcctcctgggttcaagcgattctcatgcctcagcctcccgagtagctgggattacaggcatgcgccaccacgcccaactaatttttgtattttttagtagaaacggagtttcaccatgttggccaggctggtcttgaactcctgacgtcaggtgatccgcccaccttggcctcccaaagtgctgggattacaggcgtgagccaccgcgcccggccgcattttaggctttaaaaggatacaggaaactagtactgcaagcttagccgtgccattactgaactgattaaaatttttgacacaaattgtaaatcaggcaaaatgcaacttcaaaagttcaaatattatgaaaaatatttactgttactatgaatctatttcaagaccaatgaaggctgaagtaagacctaactgttgccttgccaaatccatttctcaatataaatgccatgtaaaattacacaatagatttactctaaccctttttacatgggagttacaaaacgaagcctttaaacccctctagggataaatttacttttctcagccaagtgttaacagcaataaatggaggatttacatgtaatccctaaaagcaaataggcagaaattaccaaccatgctatgactttttaactaagcattttatttaatctcacttgcataacagggcaatttaaagggtgccagttctaaaaatatgagatgcaaatgcaaaatagtgtccctaatattttaaagcaaattttctaggattgtatattcaaacaaatgtgggttggttttgggtttttttcagagtactcactaggaataactaaataaacacctattcaatcaatactgccatttcttaaaaataatagatacctgagaacttttttcaaagtcagtgcataagcaatgtcctttttttttttttgagatggagtttcgcttttgttgcccaggctggagggcaatggcacgatcttggctcaccgcaatctccgcctcctgggttcaagcaattctcctgcctcagcctccagagtagctggaattacaggcatgcagcaccacacccggctaattttatatttttagtagagacggggtttctccatgttgaggctggtctcgaactcctgacctcaggtgatcagcccacctcggcctcccaaagtgctgggattacaggcgcgagccaccgtgcccagccacgatgtcctttcaaaatagatacaaatgaacattacactgaaaaaaatggatttattcataggctaattacagcataataaatgagctatatggtaagactctttttgtgttaactgctcattggtggcccaccatcctagaactgtatttccaggattccatcagcatctgcttaatgagatctatttctctgctaagtattctttagataagtaaatcagactttatcaaaaacagaactcatattattgcaagccataatagctagtttgtgatttgtaagaccatgttattgatatcacaaattaaaaagagatgtcccatttagaaaaagagatccctttacccaaccatcatactctaaaaataaaaccaacatttcttcacacacaaacaaaatcaaggtgggaatacacaagacttcaacacaaaaaaatcttatcaaagggtcagcgtttcagatgttctaaacttgttttcaccagtcagaaatagtctagtctgccaaatactaggccacatggctgatgtcacttaccttcttgtattccaacctcactgaaaaatcaggaggaacctgtttacaaacaatttgtgccttgagcagagttctgatacctctaaataaaccccttctaatttcttatcacacaactcgtaagagttcagcaaaaataagaaaaaaactactagccaaatatacataaccactcttcacattttgatgtggtaaaaatgttcacttgctaaagcttcttttcttcaagacattctccttttttgccccctcttccttccacttacatccttgctaaacatttcagtattattcagataaccagtacaccctagtcaagaaaacgactttctgaagaagctgagcacagcggtattctggaataaaatcccactgggctctgattagaagtgttaacactcctgcccatgtacaacctgtcgcacctgccaccagccccaaaggctgggactaccacagaacctgtttccagtgttcgacgcctcctgcaaaacatcacttactgtgccgggcatatgacttctctcattcttcccattctgagagctgccattttttagtttctttttcttttttgctgtttctttgtgctctttctgtttgttttgcacttcaataagaacagaaataaagctgtttttcacttccttttcaaactccagttcatctcgtaaagccaactgctgcaccagctcctcagagtactccttaatggcagtctcaatttcttccaggatttcatttaactcagacactgagagccttttcactcctgtgaccaaaagcaaaatacagcagatattaagacaaaaacatttcaaggaagcaaaacagagtagtcactaggaatgactaaataaacacctatgtaatcaatgccaaagagcaaaaatcatattccaagcaattaaattgactgtgggtgatcttctcagaattctacaacttctggagatcagatctgagtagaggtaagtgggcaggtgagtcacttctcagcttgctggcaagaaagtctaacaaaagtttttacttgtgcaaataaatcattgcatgaataatacttcagtcaagactgtgaaggcttgtacacggaaaagaacaaacacaaaagtcgagggaaagtacagaatccacctgctgacaaaaaactgcaagccgttcagcagggttctgggatatctctgaacaggaaaggagttgatctgaaagaattaaactaaatatacacttaattacataagtcctgatctgtgaattttgttgaaattggtgatatggtttgtatctgtgtccccacccaaatctcatacagaaatgtgatgctggaggtggggcttggtgggaggtcactggatcatgagggcaatttctaacagtttagtaccatccccctggtgctgttctcatgacagagttcttatgagacctggttgtttaaaagtgtgtggcactccccccagcccccttcctcctgctccagccatgtgaagatacctgctccagctctgcctcccaccatgagtaaaagctccctgaggcccccccagaagcagatgctaccaggcttcctgtatagcctgtggaaccattagccaattaaacctcttttcgtataaattacccagtttcaggcattttatagcagtgcaagaatggactaaaaaaactgggaagacaaaagggaacaatattccctgaaaccccatttcagtcttttctcagcacttctgccccttgtgacagataggacactgttaaagtcccaacccacagggcctcagaatgtggagagggggtctttaaagaggtaaattaaggttaaatgagggcatcaggataggccctaacccaacatgactggtattcttataaaatagggtgatcaggacacagtaggaagaccacgtgaagacatagggaaaaggcagccatctgcatgtcaaggagagaggcctctgaaaaaaaccaaacctgccaacaccttcatctcagacttctggcctccagaactatagaatataaattcctgttgtttaagccacccactctgtggtactttgttctggcagccctagcaaaccaatacagattttagtatctgtatcaggtatcaggactgtatttgggagtcaggacgttaacactgtttagcccatacctacaggaacatggccaaatcagaccatctgaaagaatttggtctgtctgaccatctgtatgttgaagccatacaacccaaaggtctttaggtaactaagctttggactgggcatgccataaagataaaactaggtgacaacacgagttgagcagatacagaccccatcagtgcctattcaaggaagggaccagtcatatggcaatgattagatacacaccttccaaccagcctcaggctgttcacaggctggttatatttattcagacatttttcatgaaaatcaactgtagagtttctagagttcattattctcacatatgtcaaacagatccatggttcccaaaattcttcatagtaacacacaagactatttgtacaaacaggaattgcatttgacaaataattactgaatatctattctacacttcaaatatgatggggtttcttatagactcaattgtgtcctccccaaaattcatgtgttgaagtcctaaccccaagtacctcagaatgttacagtatatggtctttaaagaggtaattacattaaaataaggtcattaggatagaccctaatccaatatgattgctgtccttgtaagaggaaatttggggccaggcaatggtggctcacgcctgtaactgcagcactttgggaggctaaggcgggcggatcatgaggtcaggagttcgagaccagcctggccaacatgacgaaaccccgtctctactaaaaatgtaaaaattagccaggcgtggtggcgggcacctgtaatcctagctacttgggaggctgaggcagaattgcttgaacccgggaggcacaggttgcagtgagctgaaatcatgccacttcattccagcttgggccaaaaagtgaaatcccgtctcaacaacaacaacaaaaatgtaaatttggacacaaacacaaacagaaggaggatgaaatcaaagctttctggagatgatcatactatacatttgatacagacaaaaagcacagaaatcattgatttcagcaggctcccttactctcttcataactgccggtactagacctcttgagagtttgaatttcctgggaaagcattgaaagccgatctgactgtgtaggggtttcatcatcttctgggtccggtgattcctgcatcatttcttcaatttcttcaataaccttcgaaaacacacacaccactgttaatcaaatatacaaaaggaaaatgatctatctggaacacagtgctcacctaaggcacccagagcagaaatgcactgaattctccattaaccaatggtgttcaggtgtggatgctccaaataatcaaaatttttactgtaggagtgaacatggtttatcaagaaaaaattacaatatactaaacacaaacctaaatagaattggatttactacgtccatcatgattcagaaggccctaacatgtcttgcaaagtctaggtaatcgtgctacaaacacataataatttacttcagacacaccagagctagatcatacagtaatcgttagaagaaagcaaataacagaaaatttaccatagacatacaagtgctcaatttaaaggtatctcatcaaaaattctgacataaaatttataaaatacaatagcacaaaaaaagtatatataaatgggaaattacctctatgacagcaaaatattctttcaacagcagaaaaataattttatatattaattcaacgaaaaaaagggattttttaaattactcaaaaagtagaagtccaaagagaaaaatgctgtgaaaagcagaaaaacttcagaaatacatttgactttaaacaatgatctactgtctagtgcagtgctgctcaaatcttacaacagtatcttgcccttttccagattctaaaagttgagaaggatatagaactcagcgaaaatgtaaaggaaacccaggaaaattactcaatagttagaaaaaaggacctaaagttaaaaaaaaaaattaaacacaattaaatgaaggagtaagacatcatgagcatatttccatgctttatgaattaacaagcttaacaggtaagatttccaccaaggaaaaacaaaggcaaatctgaaggagatgggattatgttaattataagaagagtctccaaaacaggaaatataataaggtacaatgagccactcaaggatcctacagaatctgttattctaactcttaaaaaaagggagagtttacggtattaggcaggtcagtgaggggacaatgaattctcaaggtcatgtctatccctagattaccctctacctcaaaacaaccttccaacctactattaccttgcttttttaagcaccacattcttcccacgcctagaacaattcaaccacaaatatgactaaggaggatccaaataacacaattttaatgtaaatttttaatgtactcctcccaagcttgccataatgtatctccttactgatctcatctttccagcctaaaaatagagtgtggtagaactcacagtccgagtagccatggaacattttatttcaggaagaagttctggcatcacatttcaacaatacaacagaggtgggaagagtattcagaaaatgagaaagctgattcgactggttttaagtgaatacagggttgaccttattagcgcattccacgggaataatgctcacttctttctggggcacacaatatgttactttaatacatgctaatgctttttacccagggttttgaagatactaaataatttctacacagatactttacagtttgtccgtgtttgggtaaatctaaagaaacaaggaaattcacaatatttttctggtttggggttaagcaacaacctttccttggtaccttgctataatcttcaacaaggcctctgttggaaaccttcccaactaacataatcccttctgcttcagatcacaaatacttatttttctctgtggaagagttaactattaagcctgtataaccagaaaaaaataggaaagataagtaaaccaacagccatcatttactgtcataacaagaagccgtttttcagctctagagtctcctttccttgcgttgctgaggatctcctctatacctggtctgccgtgaagaggggttcatcattaacacaggagacgatgattgagtgcatatccagctgttctctcagctcttcatcatctgatgtatcaaagagcaaactgtcacttacctaaaaacaaaaatacccatcattaaaagcaggacatcctcatcaaaacaaagttaacagctctgagtaaaagaggctgcagagaaaagcaactactaagagccttccctcaagagggagaaattattacaatcactctgtaccaggcaatgagtatatattcatcttgaacagaaatgagaagaatgtagaataaatatgaaatcactgagatgctgcataagactgctataaaagctgacagatatgcagaaaaaaatacggtattcattagcaagtcatagggaattacagtgaatagaagggagaatatgggcagggttagcaacacacactaagattggtagacgttaacattctaaagaaaacataaaagttagttacttgcaaactaacttctaatatctgagtaaaagatgatcaactccctgaaaggcgggatctgtccatgagcgtcacacttagcccttccaattgcacattccttcttaacaaaaaataataaccctaggttccaaaaacatctttaaacctaactaagctggtgattcaccactcacctcctcaccatcttccaccctgctctgcgctccaggaggacgacctttatggaagacatcaaaggatgcccttgctgtctggcttccaggtgggttaaaccccattggcagacactggcagactggaaggtgggatggtgaaggctgggcatgtattttgctgtcttcctccctgtcagactgtcatttgttgactatggctcttcaccaaagccatagctctgattagcagacttctcccacaaggccaatctcaacagtttatggtaatttctccctctccttacctcttcatgcccaggactgctaaagtaccagtttctgttgccagccctgggggattgcaccacatcaagtttgtttcccttaaccctgcccacaccaatataaacagccttagagtttagtaccagtactgattgtaaaaactttgcctgaaaaaactcagcagattaaaatgaacaagggaacatctgtctatcatctacctatctgtcatgacatgactattcaggtgttgaatggaactgaaactagaactctattcctcaggaaggattagcacacactgagtttccaaagaataaatgggcaacaaggattacgtaagaagccaccatgtcattctattacatagtgtagaactaacatgataaaattttacctggcaaaattatttatccatgcagaggatatatgtctaaagctgaggacacaatggaatggatgtaggttcctactgcttccctagttcttcataacatgagcatctgaagtttgcaggtgaacacagcctacagagtaagaaacctgcacgtgagaagggccaagggaagaagcactggcacactgactttccaacattaggctgggagaagggccccatcaacactgcacggtccacctacaaccctataatgcaactccaggctcctgcgcagtgacgacagcccttctcattttatttcttactgcaccatcagcctagcaaaggcctggccatgaccttcaacacagcatcatgaactaagaacactgtgtggaaaaaaggagaatctaaaagcttccagggagggaaaaaaaaatcacattaaaaggatcaggaatcaaaatgtcaagtgaattctcaatagcaacaatagatgctagaaaataatcgatgtaacttccatgtttggagaaattccatcctagaatcctatatccagctaaaacaagtaggcaggggctaggataaagacattttcagacatacaagttctgaaaaaatttacctctcatgtgccctttctcaaaaagctaccaggaggaaaatgaaaaagaaaaaagatatgtggtctaataacaagtgacaaagagaattctcgtaatgatagtaaagtgaaaatcccagaatgatgactgtaaagctacactagagagtaacattcagattagaatttttattgcagagagcatggagaagagggagaggtgggtggggagggagagcagaaggactagatagattacctagtgcggtccatttactaaaatgagttctacggctctattgaggctgaactggtcagctaattataaactaaataaaccacaaaaaggcaggtagtatcctaagaaaaaacctaagtagaaaaagagaaaatgtaaacataatatatcataatgggtcaactgtgcacatttaaatagtaaatataaatgatgaagattaattcaaccccagatgttatgtaattacattgggaagatggggaaagggaagtttttgggagggtatagtgtcagggattggcaaaggacagaagagagctaaaccttcaccctctgggtagaaaataaataaagtctaaaattgagaaaataatatcaagtaaaatggcatgagcatgttatctgctaaaagaaatagctgatatcatttaaagtggccacctctggtaaggagaaatcaagtggagcagagactgccttttcatttaagtcctatagttctaatttactttttaaactatgacagctgttcctttaataatttaattttttaaagaaggagaaagatcaagagactaggctcttgatgagaggggatgtatgatttctatactgtagaagatgaaaatgtggcacactgtgatcacaaaggcatgtcgataccatggagtagacctaccgattagtttcatcgatccttacacttcgaacacttcacacccccttcccaatcactcttcctatgttgcaacttgaggaccatgattttgttttatttttccccttctggcttataaatactaaaagttttaattttaaaattaatccggggtgggcacagtggctcatgcctgtaatcccagcactttgggaggctgaggcgggtggattgcttgagctcaggagtttgagaacagcctgggaaacatggtgaaaccccattgctacaaaaaattagccaggcatgatggcacatgcctgtagtcccagctattcaggaggctgaggtgggaggatcacttgagcccaggaggtggaggttgcagtgagccaagatggtgccactgcgctccagcctggacaacagagccagaccatgtctcaaaaaaaaaaaaaaaaattactcctaaggaagcccaggttgccatggctcacacctgtaatcccaacactttgggaggccaaggtgggaggatctcctgaggtcaggacatcaagaccaccctgagcaacacaggaagacctcgtctctacagaaatatattttcttaaaattagccaggcatggcggtactcgtgtgtagtctagctactcaggaagctggagcgggaagatcgcttaagcccaggagttggaggctgcagtaagctatgatggcgccactgtactccagcctgggcaacagagggagacactctctcaatctatcaatcaatcaaattgcttctgtggaagacattatctttttcttatttctactcttaaaggtataaagatgcatacaaaagtccctgtcctgaaagaaatgcacatggaaggagaaatacagcacagaagatgttcttaagctgaaatgaatgataagcattctatcatataagtatattcaagaatggcaccagatttagaatagggttatggccaaaacacatgagtaataacagtaaactattataataaatttccatgacaacagaaatgatcccagatcatctttccagagagagagccaagtccattccccacagagatggcatatgctaagagctggaatatctttcaggctttgcaaactagccctggctgtcatgggtatcattattcactcctcccttcagcattaaatgtgccttctctttgccaagcattcccatcactccttccaatgccagggttagatacagacctggtggtactgtttccctgtataaaactgaagatacatcaaatggaaaaaatgtgcccacgtaagaatttgaaagataccagttgccttactctaaaaaagacatatcaaatttagaagtgtgccatcttaatcttcaatcaaagaaaaatttaaaactgcaatctagcaaactagttttcctgaatgtttttctctttttaatgcaaaaaccattcttcttttgtcaaaaaaaatttctatacacttggttttataagtaaaataatctaaagaatgctttcaaagggtaaattttacatagcttagtcacggcacgaacagagcaccaggtggcaatggtaaatacagtcactttgccagattaaaaaaaaaatgcttaattatataccatgtaatagaatgacgtgatgacttcttacatagtccttattgcccatttgtttttcagaaactcagtgtgtgctaatcctccctgagaaacagagttctgatttcaattctattcatcaccagaatagtcatgtcacaacagagagatgataggtgaatgatcacgtgttcactttcatctgctgagtttttccaggtaaggctgtttttttttttattttttgagacagagtctcgctctgtcacccaggctggagtgcagtggcgtgatctcggcgcactgcaacctctgcctcccaggttcaagcaattctcctgcctcagcctcccaagtatctgggattacaggcatgcgccaccacgcctggctaattttgtatttttagtagagacggggtttcaccgtgttggtaaggctggtctcaaactcctgaccttaggtgatccatccacctcagcctcccaaagtgctgggattacaggcatgagccaccgcgcccagccaggtaaggctttttaatgtcagtactagcattaaactctacgtcattactaatcactgccttggccatatcattaccgtggcattgaaaataacattcaaaaggcagcaaaagggagcaacctcccaagatgcaatctaagaacaatacaagacatacagcagtccctcggtatccaagggaaatttgttccaggacaccccaatagcaaaatctgcagatgctcaagtcccttatataaagtggggtagtatttgcatataacctgtgcacatccccctataagctttaaattatatgtaaattacttataatacctaatacaaggtaaatggtttatagttatattgtatataactatacaatatttatattataaagttatattgtatcggttttcggttttttattttcattattttcaattgttgtgttgttattttattgtggggtttttttttcaagttttttaatccacagttggctaaagcagcagatgtgaaaccagagaatatggtgggcccgctgtacatttagtcaatgaaattggattaaactgtctcactcacgctgctaatgggcctgactttgaaactatgaatggaaactcttctatgctattttttaatatgtcaaaaaagtagtacccatggactggttttggtgcattctgcattattttaaataacatagaaaatatttttttaaaacctttctatcacgatctctggccctacagtttcactgacaaggctattcacttattcactcaataaaaaggtatcttcaaacttactatgtgccaggaacagtatagttactataaagacaaatacaaatacctgccgggaagtcacaatctagtgacagacccagaaacatatgattaacaagagaaggcagtggtaattttagagacagggacaaagtgatctggggactagcacccatgagacagcaaggctaaaccccgtggcacagataacaagtcctttcaaagttcacaaccccacaagtgccatcagttcccctagaggggagtgtgttttccttccgtgcaggaatttaggccatggctaaatgaccatctgtcagagatgctggaggtgaggattccccccaagtgagaggctggattaagtgtcctttaaagccccttccaactctaaaattgtataattccatgagatcagcaaaggctaaaacagtaataggaagcttcagagaggaagggaaacttgaactaagcccaaaatgatagccaggacctaagtaaacaagacagagcaaaagatccctcattttattccttttcattaaatatatgccaggtcagtctgcaaagcttaatgggattaatgactggcacagtcaggaagatttccatagctactgaatactgggaaatacagccagaattctacattttactagaaaataataacagtaggcttttctgatcacatatgtaagaaaatccttttaacaaaacattaacaatactatgtaaaatagtgacaggcctactgcactatattctcaataatcacataattacacttaatgaaatatagagcacgcaagaagatctggcatgagtttacattattatttgataaggaacttaaacagccaggccctgaaacttagataatttggatatgtttctcatcagatttaaaaaagcttaacactgtgattttccatttcaagtaattctcaacccttttctgcctccctacctgtcccaccactcgtgctcacacttcttagtcaagacatcttcactttacaataccaggatgtacacaggagaccccaagaaaggtaagttagccaagaccgtattttaaaagccaagaactaaaatatcttttaaaggttctccagtattcacaggaatacacagtctcctgacaacatatcatgtctagcaggtcactacactcattaaaaagttaactccgtgttgagattccaatactctcagtatattaaaccaaaggctagcatttttactgagggtttcagtgcaccaaattttactgagtgtttcagtgcatcatcactgccaggtgcagtggctcacacctgtaatcccagcactctgggaggtgaattacctgaggtcaggagttcgagaccagcctggccaacacagcgaaaccctgtctctactgaaaatacaaaaattagccgggactggtggctcatgcctgtaatcccagctactcgggagtttgaggtgggagaatcgcttgaacccaggaggcagaggttgtagtaagccactgtactccagcctgggcaacagagtgagactccgtcaaaaaaaaaaaaattgtgatggaaatttagctacacataaaaaatgagtgtgctggagaagaactggaggaatgtgccagcaaggtgatggccctacagccaagacatcaagacagagccacccaaactgctataatttcagaaatgagaggcaggtcagtgaatctgtgttaagcagaaatgctactgttttagttctattatcagcatcagttattcaaacactattggttcaattcctaacttacccctttttctgagaggttcagagtaagcaagtgcaaggtcctagtatgcgatgacttccagtctacaggcatcacattcccataattatctgtcagggcattccaaatccttaaaaagaagaaagctacaatcaatgaaaattaacattctgtatgtctttcttaaacaaatattcagtgaaagatgaacagcaaatgtcaaaggaaacagagaaaaacagacagcacattgtttctcagaaaaacatcaacaaagtagagtctcctaaacaaaaacgaggtgaaaaatcacataactgggctgacaagaagtcctaagggaaggtgaagccgtacagaaaactgccaataggcagtaggcaacacttccattatattaggtgctaggcactgttctaagcaatttacatgtattaactcatgtaatcttcaaaaacaacattagaagggggaaccattattaacctcattttacagatgaagaaactgaaacacagggcggggaagaaatgtttccagggtcacatgaataataaatacaactgtgcattacacttatttttcttctgtaacttcaaacaaacagaccatttcaaaaagtgaaaaatctctctcaaacaaaaggtttgttatcctttctggagaaagaattcgctctcaatgtgagaacaggatttaatatctaatttgtaataaagaagctaagcactaaggcagatacaacaaaaaggagaaagagagggagttcacaataaaacacacccaggctctatccaatgcagttacctgaccttattacccaacagcattacagggaggcaagagggtcaaatggtaagggcatttgactgagactagggaaacaaactctcatctccatccttcttcaaataacgagtcattggccaggccccttaacctccctaggtatcctctgcccttctataaatgagagacctggacaagaagcagatactccttccagctccattactctaagcattaattcaaatgaggtgtattgaagagagtcccaaaccacaccagataagaacaccaaactcaaatttcacaaccaaaattcaggtttcaataccaaagtaataatcagcacaataaaacatgatgttttatgaaaaactaaagttcagagatacaagtgacttgaaatctaattgggatacgtaaaatcaaacactaaacatacaagctacttactagctagaggtatacacaaagatgtcatgtagaaaaaaacaccctaaaatgtttattaggtatctaattgtgaataagcaataggctttctttccaagtgtgtaagacactaggatacaaaaacaatcctggctggggcataaacataagaatgaattttttttttaagttccggggtacatgggcaggatgtgcaggtttgttacacaggcaaacatgtgccatggtgatttgctgcacctatcaacccatcacctaggtattaagcccaagaatgaaaattttaaaatacagacataacatagttaacaaatagggattgggcgctaaaaagaagcaataggactgcaacggctaaaagcataacatcccaaatgatgtttggctttaaaatgcacgttagggatgggcctggtggctcatgcctgtaatcccagcattttgggaagccaaagtgggaggattgcttgaagccaggagttcaagaccagcctgggcaacaaaagggagccccacatctctacaaaaaaaaaaaaaaaaaaaaaattggccaggcctgtggcatgtgccgcagtcccagctacttttggagggtaaggcaggaggactgcttaagcccaggagctcaaggctgtagtgagctatgatggcaccactgtactccagcctgggagacagagcaagaccctgtctctaaaaatatataaataaaataaaaaataaaattagccttaataaaaatgtgaacccaaaaatctctagagaactaactcatctacccagcaaagctcccatatgcacagtccattcctattctcctctctgttggaatatctcctctaatgccagtgaagtagaattagaggcaatgtctgtggactactaaatttgctgggtttctgtggactactaaacttgctgggtttctggctcataccttcctggataagaaattttcaaacactgaatgactgtatagtccattttcatgcagctgataaagacatacccaagactgggacgaaaaagaggtttaattggacttacagttccacatggctgaggaggcctcagaatcatggtgggagacaaaaggcacttcttacatggtggcagcaagagaaaaggaggaagatgcaaaagcagaaacccctgataaactcatggacagcggccctcttctcacaaccccactaggcagtgccccagtagggactctgtgtgggggctccaaccccacatttcccttccacactgccctagcagaggttctccatgagggccctgcccctgcaacaaacttttgcctgggcatccaggcatttccatacatcttctgaatctagaaggaggttcccaaacctcaattcttgacttctgtgcacctgtgggctcaacaccacatggaagctgccaaggcttggggcttgcaccctctgaagccacagcctgagctgtactctcgcccctttcagccacagctggagcagctggtacacagggcaccaagtccctaggccgcatacagcaggcagaccctaggcccagctcacgaaaccacttgttcctttttgggcctccaggcctgtgatgggaggagctgccatgaaggtctctgacatggcctggagacattttccccatggtcgtggggattaacattagggtccttgctacttacgcaaatttctgcagctagcttgaatttctccccagaaaatgggttttttttttttctatcgcatagtcaggctgcaaattttccaaacttttatgctctgcttcccttataaaactgaatacgtttaatagcacccaagttacctcctgaatgctttactgcttagaaattttttctgccagataccctaactcatctccctcaagttcaaagttccacaaatctctagggcaggggcaaaatgccaccagttctctttgccaaaacataacaagggtcatctttgctccagttcccaacaacttcctcatctccatctgagaccacctcagcctggattttattgtccatattgctgtcagcattttgggaaagccattcaacaagtctctaggaagttccaaactttcccacattttcctgtcttctgagcccttcaaactattccaatctctacctgttccccagttccaaagtcatttccacattttcaggtatcttttcagcaacgccccactctactggtactaacttactatattaggttattttcatgcagctgataaagacatacccgagactgggaagaaaacgaggtttaattggacttacagttccacatggctggggaggcctcagaatcatggcaggaggcaaaaggcacttcttacatggcggcagcaagggaaaatgaggaaggagcaaaagcggaaacccctgataagcccatcagatcttgtaagacttattcactatcatgagaatagcataggaaagaccagcccccatgattcaattacctccccctggatccctcccacaacacgtgggaattctgggagatacaattcaagttgagatttgggtggggacacagccaaaccgtatcactgactatagacctaatcctggcaggaatttaagcaggatacactagcaggtgaagacagtccagaatttgaggagtttgctttgtctgctgatttgctccttcttaaacaaggctataagaaaaaggcaaatgggatggaatatttcacttagaagtgcctgtcagtgagtttgatcttccaagaaaatgaaagccaactaacagtctccaccaaggtcaaaacaatggtagttggaaggacacagaggcaactctagtgaaagatttctagaattctgcagtcaagacatatgaactgccttcatctttatcaccaagtattacaaccagtcgtaaacaacggtcaggacagctcttttgcaaggaggtcaaagtcctgccaacatcgaatcctgcagaatactcttataagtaaaacctcagtacgtaaatacaatccatatttaaccaaaacaaaagctgaggctcagagaagttaaatgaagtgccaagggtcggggagggctttggggtgattcaagcacattacatttacggtgtactttatttctattattacactgtcatatatcatgaaataattttacaactcaccataacgtagaatcaatgggagccctgagcttgttttcctgcaactagatggtcctatctgggggagaggggaaacagtgacagatcatcaagcattagattctcataaggtgtctgcaaactagaaccctcacttgtgcagttcacaatagggttcacgctcctatgagaatctaatgccgtggctgatctgacaggaggtggctcaggtggtaatgcaagcaatggggaggagctgtaaatacagatgaggctttgctcactcactcagccactcacctcctgtagtgtggcccagttccagtaccggtctgtggaccaggggttggggaccccttgacctaaagcacagcaatatctgagtaaaacaattatcaattatatctagtgaaaagggaactggaacagactatcaagcaatgatgagtatgtttttgcaatataaaagggacaatgccagtgatgaccagctcccaactcccggaaaaaaagagatttcatatgcattcccaagtcaagagacatgcattaccaccaacatatcatctactaaataccattaacaagagcgacaaaatatttttaagcaaaggctaaaataacctactctcctgacggtctaagtgaaacaaaaactcttaacgatctacgtacaatcctctaattgatttaagtcagctactcttgaaaaacccaaatacataatacatctacactaatttttaaatccagaatgtgtcctgggtttagtgattcagagtatctaaatctacatatacataaaattatcttctctttgggaacaggcttccaaaaatgtcatcttttgctactgacggcatgcatgtgtgtataaaatccaattataagtgtttcccttctctacacctgggcagaacactgtactgaggaaccaataaaaggagatggtctccaaacacaggtgggcctgcaccactgctcagccatgtttacaggccccactcccaaggctgtctttacaagcttcctaccttattcctgataaatctgtttgtttcacaaaggaaaggagacaatcaggctggaaactcctttccgtgcccgtgactcctgtcctgtctctcaaaaattcttccctaacctctaagagtctctccatcccatcaatgctctgaaaatccattccttcccatgtcctcatttttgagacaaagtctcgctctgacacccaggctggagtgcagttgtgcgatgatggctcactgcaaccttcgcctccaggactcaagcaatcctgccatctcagcctccgggcagctgggtccgtgggaccacggggcatgcgccaccggacttcactaatttttttttaatttttttgtaaagaccagatttcacgatattgcccagtctggtctcgaactgctggaagcaagccatcctcccaccacagcctctcaaagtgctgggatcacaggtgtgagccaccgcgcccaatcttattccactcattttaccttcagcctctccggaggctcctctccccctatatacacaacatgctcaagtccctttactctcaccattcctatttaccatcttttgggggtaaaaccatggtacctaattacaactcttacttaaccaaattataattgcggctcaggtggtttaaaaagtgccctcaggaactctgcgcctcacctctcccagctgtgataaaaccccgtgaacctcctatcattgctcttaggtgattctgtaattattaatattacttgtgtatgccttggtctccccaccagaccatgcgatcgttaccatcagtaagcagggcccttcgttttcgtctctgtggcggctcgcactctaccagggctcccgggtgggtcccacagattcctgtgccctaaatgctgcctcgcacgttggtacttatgcacaggcaatatactccacctagaacgttagacttttttccacctgccaggcacactcccactcatcagtcagatctcgtttgcacatttctttataaagtcgttccttactctccccaagacacacgcttttaagtctctcacatttggtacatataaccattgcagcgctaattacatccatacatgtatttgtttacaaatctatctcccatcctacgttgtgtcctaagtgggagggacagtgcccagtcgttttggtgttccctgtgcgaagcagcgcctggcactcagcaggtgcttaataaatgcgacttgagtgaatgaatggcgacacacgtgccccaggaggtgccccaggaggtgccgtctctaactatgggctctgcatgggcgattcccttctaatacaaacgagggtttggtttgcaggaaggagggcgggaggtaccgaggcggaggttttcagggctcgtggcggcggggggcaggggatttaaattgctgggcgagccgaggccgacggccggaggaaggaggcgagagggcggggactcccgcgtccgggcggaaggagggcgcagggaggagctgcggccgtagggctgccggtcgggcgaggggtaggggaggctcccgcccactcccgccggggccccgcactcactcgtccccctgcaggaggctgcgctccgtgatgggccgcacggccgtcctcgggggctcggcgcccggatccgaggggcggaagcacaggctcagcttctcctccaagctgcaggccggggccgggaaaccgtcggcgcccccacccgcctcggcccccgcctccgccccaggctcggggctcgcgttacagttctcctggtccaggaggctccgggccggctcctggaactcatagaaatcctgccagtccccgtccgccgccatcgccgcccggagcagtcgcgcgccccgcccaggccggcccagcccgcccagcccggccccgccccggcccgaagccccgcccccgcccgctaccgtgctgacagatcccaggctgtcccaaccctgggtctccggtggcctgagtcttcctggagttgaacgcggtgctactagaaagccaagaccttaactgccttgagtcacttcctatattctctatcatttaggaataacttccctgttagcttcccttattagcaacttggcctaaatgtggctaaaataaaggacttctttaaacttacgacctaatatcagattacgccccgaaagtcgttttccccaaggtaacctgctcctttcctaacttgccaaccagaataacagccagagtcaatgggaaatgtttaggtggtaccgaagttcattcctcaaatattttacctctcacgtgcaaagcactggctagatcctgcagaacatacaaagataattatgccagttaacatttgcaaagcacttagagcaatgcctaatagtagataccctatgtgtatgttataactaatacatgggtgccccatacacagggcttacaatgtcggagtgataagagtaacaagaaattgtttagacctcataaaaactaagtgtgattgggcggttcagttttgcaagatgaaaagagttatggagatggatggtggtgatggttccacgacagtgttaatgtgctgaatgccactgatctatacacttacagatggttaagatagtaattttatgtttattttactacaatacaaaaaaattggagtaggccaggcgaggtggctcacatctataatcccagcactttggcaggcccaggtggacggatcgcttgaggtcaggagttcaagaccaacctggccaacatggtaaaaccccgtctctactaaaaatacaaaatctagctgtcaggcctctgagcccaagccaagccatcgcatcccgtgacttgcacatatacacccagatggcctgaagtaactgaagatccacaaaagaagtaaaaatagccttaaggatgacattccaccattgtgatttgttcctgccccaccctaactgatcaatgtactttgtaatctcccccacccttaagaagtttctttgtaattctccccacccttgagaatgtactttgtgagatccacccctgcccgcaaaacattgctcttaacttcaccgcctgacccaaaacctgtaagaactaatgataatccatctcccttcgctgactctcttttcggactcagcccgcctgcatccaggtgaaataaacagccgtgttgctcacacaaagcctgtttggtggtctcttcacacggacgcacatgaaatttggtgccgtgactcggatcgggggacctcccttgggagatcaatccccctgtcctcctgctctttgctccatgagaaagatccacctacgacctcaggtcctcagaccgaccagcccaaaaaacatctcaccaatttcaaatc

SEQ ID NO: 23217 - DNA, 1366 bp, Homo Sapiens
gtgctggacgcggacacatgatccgagggaccctgctgggtggaactaagaaagtccagcagactgtgcacgctcctgtccccactcacaggcccacgcagcgaggggggcccctcttctgtgtgcgtctggaaggtcgctgcccagggaggaaatgcctttaaccggcgtggggccgggcagctgcaggaggcagatcatccgggctctgtgcctcttgctacttctcctccacgccggctctgccaagaatatctggaaacgggcattgcctgcgaggctggccgagaaatcccgtgccgaggaggcgggcgcgcccggcggcccccggcagccccgagcagaccgctgcccgccgcctccgcggacgctgccccccggcgcctgccaggccgcgcgctgtcaggcggactccgagtgcccgcggcaccggcgctgctgctacaacggatgcgcctacgcctgcctagaagctgtgccgcccccgccagtcttagactggctggtgcagccgaaacctcgatggcttggtggcaatggctggctcctggatggccctgaggaggtgttacaagcagaggcgtgcagcaccacggaggatggggccgaacccctgctctgtccctcgggctatgagtgccacatcctgagcccaggtgacgtggccgaaggtatccccaaccgtgggcagtgcgtcaagcagcgccggcaagcagatgggcgaatcctacgacacaaactttacaaagaatatccagaaggtgactcaaagaatgtggcagaacctggaaggggacaacagaggcactttcagtaaagcaacggcaagcagctaggttgcaagaacattcctctactttctgctaagccttggaaacagttgggaaaagtagtttgaccctcacagttcacattcagctcagcagagcaagaccccagagatgcttagagacaggacacctggccatcaaacccagtttggcccagcctggttgggtgactttgtgggagccacttaacagctctgggtccctgttttaccatcctgggagcaaggccctgcagctccacgagacctttaccccgggaagaagccgccgcccatgaaagcatttctgaagcccctttctaagacaaggctcagcatcttgatatttttgacagattcctcccaagtctggctctgggaggtatgtacccatctcaaatgttcccaagataaattcatccttcaggaaatggaaatgaacttgcttactaatgtgtgattcctagttgtagccaccggatgtgctgaggcctaaatgttagcaggtgggaggaggccacagaacaataaaaacaaccaaataaaaaaaaaaaaaaa

SEQ ID NO: 23218 - DNA, 1366 bp, Homo Sapiens; identical to SEQ ID NO: 23217

SEQ ID NO: 23219 - DNA, 2660 bp, Homo Sapiens
atggtggtggcacaccccaccgccactgccaccaccacgcccactgccactgtcacggccaccgttgtgatgaccacggccaccatggacctgcgggactggctgttcctctgctacgggctcatcgccttcctgacggaggtcatcgacagcaccacctgcccctcggtgtgccgctgcgacaacggcttcatctactgcaacgaccggggactcacatccatccccgcagatatccctgatgacgccaccaccctctatctgcagaacaaccagatcaacaacgctggcatcccccaggacctcaagaccaaggtcaacgtgcaggtcatctacctatacgagaatgacctggatgagttccccatcaacctgccccgctccctccgggagctgcacctgcaggacaacaatgtgcgcaccattgccagggactcgctggcccgcatcccgctgctggagaagctgcacctggatgacaactccgtgtccaccgtcagcattgaggaggacgccttcgccgacagcaaacagctcaagctgctcttcctgagccggaaccacctgagcagcatcccctcggggctgccgcacacgctggaggagctgcggctggatgacaaccgcatctccaccatcccgctgcatgccttcaagggcctcaacagcctgcggcgcctggtgctggacggtaacctgctggccaaccagcgcatcgccgacgacaccttcagccgcctacagaacctcacagagctctcgctggtgcgcaattcgctggccgcgccacccctcaacctgcccagcgcccacctgcagaaactctacctgcaggacaatgccatcagccacatcccctacaacacgctggccaagatgcgtgagctggagcggctggacctgtccaacaacaacctgaccacgctgccccgcggcctgttcgacgacctggggaacctggcccagctgctgctcaggaacaacccttggttttgtggctgcaacctcatgtggctgcgggactgggtgaaggcacgggcggccgtggtcaacgtgcggggcctcatgtgccagggccctgagaaggtccggggcatggccatcaaggacattaccagcgagatggacgagtgttttgagacggggccgcagggcggcgtggccaatgcggctgccaagaccacggccagcaaccacgcctctgccaccacgccccagggttccctgtttaccctcaaggccaaaaggccagggctgcgcctccccgactccaacattgactaccccatggccacgggtgatggcgccaagaccctggccatccacgtgaaggccctgacggcagactccatccgcatcacgtggaaggccacgctccccgcctcctctttccggctcagttggctgcgcctgggccacagcccagccgtgggctccatcacggagaccttggtgcagggggacaagacagagtacctgctgacagccctggagcccaagtccacctacatcatctgcatggtcaccatggagaccagcaatgcctacgtagctgatgagacacccgtgtgtgccaaggcagagacagccgacagctatggccctaccaccacactcaaccaggagcagaacgctggccccatggcgagcctgcccctggcgggcatcatcggcggggcagtggctctggtcttcctcttcctggtcctgggggccatctgctggtacgtgcaccaggctggcgagctgctgacccgggagagggcctacaaccggggcagcagggaaaaggatgactatatggagtcagggaccaagaaggataactccatcctggaaatccgcggccctgggctgcagatgctgcccatcaacccgtaccgcgccaaagaggagtacgtggtccacactatcttcccctccaacggcagcagcctctgcaaggccacacacaccattggctatggcaccacgcggggctaccgggacggcggcatccccgacatagactactcctacacatgatgcccgcccacccgggctgccccgcctcagccccagctgccctggcgtggccatgtggctttgcccagcctgctgcaatccaagagagcaaggaagagaaattccatgggtgactttcctctgcagaaagcaaagtttggggagggctgacgattttgtagaacacaacagtgacaattttttttaaaagaatagaaggcaggagggggaattcgacattgttgaagacataatttataccaagttatgccagttggggagggaaggactaaaaataatattgcaggcagggctgggttgggtttttttttttcccccctgaactggaaggatactacctgtacaacatctgtggacacctcatgctctgttcaaggccatcacaaaggaaccgcccagggagaagcagccggctctcaaagctcccacgcagctctcccgccactggccactcgctggcgacccgatggaaggttttcaggctcctcacaaaggagagagggaagaaaagatcttttgccctggagatatggtcctgaaatctctcccctggcttattccataccatttcccttgcagatttgcagaaacatggcatctttcactgcattctttgaacaatcatgtagtcgatt

SEQ ID NO: 23220 - DNA, 5546 bp, Homo Sapiens
gtgatgagatataatgcatcctccagtccatgcacgcttcctcttgcaatttgggcatcattcctcagtggaaacctttaaaccctgaaatccaggaaaagaaaataaatacattatcatggacctgagggatttttacctgttggctgctctgattgcctgtttaaggctggattccgcaatagctcaagaacttatttacactattagagaggaattgcctgaaaatgtgcccataggaaacataccaaaggatctgaacatttctcacatcaatgctgccacagggaccagcgccagccttgtctacagactggtttctaaagctggggatgcccctttggtgaaagtatccagcagcactggggaaattttcacaacctccaacagaatagacagagaaaaactctgtgctggcgcctcatatgctgaggagaatgagtgtttctttgaacttgaggtggtgatcctccccaatgatttcttcaggctgatcaaaataaaaataattgtcaaggataccaatgataatgcccccatgtttccatctcctgtcatcaatatttccattccagaaaacactttgatcaacagccgctttccaattccatcagcaacagatcctgacacaggcttcaatggtgtacagcattatgaattgttaaatgggcagagtgtttttggactggatatcgtggaaactccagagggagagaagtggccacaactgattgttcagcaaaacttggatagagaacagaaagatacctatgtgatgaaaatcaaagtagaggatggaggcactccacagaaatccagtacggccatactgcaggtcacagtaagtgatgtaaatgacaacaggccagtgtttaaagagggtcaagtggaggtgcatattccagagaatgctcccgtaggtacctctgtaattcagctccatgccactgatgcagatataggcagtaatgctgaaatccggtacatttttggtgcccaggtcgcccctgcaaccaaaagactctttgctttaaataatactactgggctgattacagttcagaggtccttagatagagaggagacagccattcacaaagtgacagtgctggctagtgacggcagctccactcctgctcgagcaacggttaccatcaatgtcaccgatgtaaatgataaccctcctaatatagacctcaggtacattataagtcccatcaatggcaccgtgtatttatctgagaaagatcctgtcaatacaaagattgccctaattacagtttcagataaggacacagatgtgaatggcaaagtgatctgttttattgaaagagaggtcccatttcatttgaaggcggtatatgacaaccaatatttgttagagacctcttctttgttggactatgagggcaccaaagaattcagctttaaaattgttgcctctgattctgggaagcccagtttaaatcagactgccctggtaagggttaagcttgaggatgaaaatgacaacccaccaattttcaaccagcctgtaattgagctgtcagtttctgaaaacaaccgacgtgggttatacttaacaactattagtgccacagatgaagacagtgggaaaaatgcagacattgtttatcagcttggaccgaatgcctccttctttgatctggaccgaaaaacaggagttttgacagcctccagagtatttgacagagaagaacaagaacgattcatttttacagtaactgccagggataatgggacccctcccctccaaagccaagcggctgtgattgttactgttctggatgagaatgacaatagccccaagtttactcataatcattttcaattttttgtgtctgagaatctgccaaagtatagtactgtgggggtaatcacagtgacagatgcagatgctggagagaataaagctgtgactctttccattctaaatgacaatgataattttgtgttggatccctattctggagtcataaagtcaaatgtctcatttgatagagagcagcagagttcctacacttttgatgtcaaagccactgatggaggacaaccacctcgttcctctactgcaaaagtaactatcaacgtcatggatgtcaatgacaacagcccagttgtcatttctccaccgtctaatacttcctttaagttggtgcccctctcagccattcctggctccgtggtagcagaagtttttgcagtggatgttgacactggaatgaacgctgaactaaagtatactatagtgagtggaaacaataaaggcttattccggattgatccagtaacaggtaacattactctggaagaaaaaccagcacctactgatgtgggattgcatcgtttggtggtcaacataagtgacctggggtaccctaagtctttgcacacgcttgtgcttgtattcctttatgttaacgacactgctggaaatgcctcctatatctatgacttgatccgcaggactatggagaccccgttggacaggaacataggggatagtagccaaccctatcaaaatgaggactatctaaccatcatgattgccatcatcgccggtgccatggtggtcattgttgtgatcttcgtcaccgttctggtgcgctgtcgccatgcatcaaggttcaaagcagctcagaggagcaagcaaggtgccgaatggatgtccccaaaccaggagaacaagcaaaacaagaaaaagaaaagaaagaaaaggaagtctcccaaaagctctcttttgaactttgttactatcgaagagtccaaacccgatgatgcagttcatgaacctatcaatgggacaataagcctgccggctgaactggaggagcaaagtataggaagatttgactggggcccggcacctccaacaacattcaagcctaacagtcctgacctggccaagcactacaaatctgcttctccacagcctgcttttcatctcaaaccagacactccagtttccgtgaaaaagcaccacgtgattcaggaactccctttggacaacacctttgttgggggttgtgacaccctttctaaacgctcttccactagttcagatcacttcagtgcctcagagtgcagttcccaaggaggcttcaagacaaagggccccttacacaccagacagtcgcagcgccgtgttacgtttcatctccctgatggctcccaggaaagctgcagtgacagtggtctaggagaccatgagccggtgggtagtggaaccctgatctcacaccctcttcctctggttcagccacaggacgaattctatgaccaggcctctccggacaagaggactgaagcagatggcaactctgatcccaactctgatgggcctttgggtccccgaggattagctgaagctacagagatgtgcactcaagagtgcttggttttgggtcactctgataattgctggatgcctcctggcttgggtccatatcaacaccccaaatctcctctctcaacctttgcaccccagaaagaatgggtgaagaaggacaagcttgtgaatgggcacaccctgaccagagcctggaaagaagacagcaacaggaaccagttcaatgaccgtaagcagtatggctccaatgaaggccatttcaacaatggcagccacatgacagacattcctctggcaaatctgaagtcttataagcaagcaggaggtgctactgagagtcctaaggagcaccaactctaagaaaaggctatatgggacctaataactttaaatagacatgctaataccgtgtgcgtcagagctttatgtattcaatagatctctacaactatgccccttctagcagggatacctataactttgtgttagcaccatggagaatacaatgtttttgcaacatatgagagaagatagttctagccatgcaattttgtttactagaattgattacactctccagagatctctccattgtgcaaattttttttattattgcattttattttgaccctggactgctgctatgaacaatagaatatgcatttggaaagtaagaaagtttcatggattagagtgactgaaaaacatatccagttagaaaattgtgcttttttttttttttttttttgtcattgatttgtgctgggactgctatacttgacattatactgcaaacaaaacttaaagagataagcattaaacctattgtgctgttaacaacgttagtggacacttgtaagtcaatcagtgttaaagtatttgtaaatagaagcaagctattattaacaacttttgtgtacttataatgttcacctaaaaatgttgtagcataattctgtgttttatggttgcttctgtccttctttttatttacctctttgttgttatttttgttgcttctttcagtgaggtgtttctgtgttagtagtctgtcttgacacacattgttcaaacaatctcaagcacttgtgtttaaaaaaggttctgaaatcttgcttctcatatgatagcttatgatgccggaattctgtaaacaataaagatgaaagaaaaaatgaaaactttatacaaaaaaggacttctgcaaaagcttggaaattcagaacctattttttatcatcttattttcaaagtaggcaaaagcaaaatcacttaattagcaccattaagtgagagagtaatggaaaacggttatccaccaaaagtgatataatatcctgtacttgtcactcatgtaaaactaatgtatcaaaattagcatatatggaagaaaaatcactattcaaaaatagtttcaattgggcaaatgtgtgtctacaactttgttgaaatggcacagtctgtgttgatcctcatatacaataatgttgttgtaacacaagtgttattagaccatagccacaaaatatttaatgtgttgtgccttcatgatgtaacagaacattctccaggtagggtagttgggggaaataaagggataaatctctaattattgctgtttaactgtttgttatcatagttggtcaatgcctggcaggtaccagcatattgtcacttaggtcaaaccaataaagtggcaactaatgttaataagatttcagttgcacgtgcaaacaaatccaaattcgaacattcttagaaggtttttgttaaggcatgacagatgatttaaacaaataaatagcatgcaacaaaatgtctttattgaaagaagtggaagttatcttaatgccacggttcaccatcaatttaaaagtaaaaaaaccaaaaaaaaaacaaaaaatttaaaaaaaaggtttgctaatctgatagttaatttgttcttaccaaaaaataaaattactttgtaaatagcagttcacatttttccacagtataatggaaaataatgggtaggggtgcattgcttattgaagtacatttttgtcggtttgtgaggggtgtttgatgactttgacagaataaatatctaaacaattatccttgttactgctttgccagttctacgttatttacaattattcagctcttgcaataaatgttctgaattaccaaa

SEQ ID NO: 23221 - DNA, 3046 bp, Homo Sapiens
ggaatttcgagtggtgttggagcgccggaggctagtgggtggctgacccccagcatcctcgagagcgaccatggactccctggccgagtctcggtggcctccgggcctggcagtcatgaagacaatagatgatttgctgcggtgtggaatttgcttcgagtatttcaacattgcaatgataatacctcagtgttcacataactactgctctctctgtataagaaaatttctgtcctataaaactcagtgtccaacttgctgtgtgactgtcacagagccggatctgaaaaataaccgcatattagatgaactggtaaaaagcttgaattttgcacggaatcatctgctgcagtttgctttagagtcaccagccaaatctcctgcttcttcctcttcaaagaatcttgctgtcaaagtatatactcctgtagcctccagacagtctttaaagcaggggagcaggttaatggataatttcttgatcagagaaatgagtggttctacatcagagttgttgataaaagaaaataaaagcaaattcagccctcaaaaagaggcgagccctgctgcaaagaccaaagagacacgttctgtagaagagatcgctccagatccctcagaggctaagcgtcctgagccactctcgacatccactttgaaacaagttactaaagtggattgtcctgtttgcggggttaacattccagaaagtcacattaataagcatttagacagctgtttatcacgcgaagagaagaaggaaagcctcagaagttctgttcacaaaaggaagccgctgcccaaaactgtatataatttgctctctgatcgtgatttaaagaaaaagctaaaagagcatggattatctattcaaggaaataaacaacagctcattaaaaggcaccaagaatttgtacacatgtacaatgcccaatgcgatgctttgcatcctaaatcagctgctgaaatagttcaagaaatcgaaaatatagagaagactaggatgcgtcttgaagctagtaaactcaatgaaagtgtaatggtttttacaaaggaccaaacagaaaaggaaatagatgaaatccacagtaaatatcgtaaaaaacataagagtgaatttcagcttctggtggatcaggctagaaaaggatacaagaaaattgctggaatgtcacaaaaaacagtaacaataacaaaagaagatgaatctacagaaaagctatcttctgtatgcatgggacaggaagataatatgacctcagtaacaaaccacttttctcaatcaaagctggactccccagaggaattggaacctgacagagaagaggattcttctagctgtattgatattcaagaagttctttcttcatcagaatcagattcatgcaatagttccagttcagacatcataagagatcttttagaagaagaggaagcctgggaagcatcacataaaaacgatcttcaagacacagaaataagtccaagacagaatcgccgcacaagagccgctggaaagtgctgagattgaaccaagaaacaagcgtaataggaattaatgtgggcttttgctgacttttcaaatgcattgattagaataccgtacttttggttgccacagatagattttctatttataaatgcccaaggaaagatgctaaattctaaatattacggttagctgatattcattcttttctgcttttccagaggggaaaaatgttacaaaatatccttacttggtcagttgcctcctgcctctaaaacatctctctctaaaaatactgacatttcacacaggtaccagctttgcagaggaggtagactctttggcactttggcacagggatttggtttggtttggtttggtttgataattaaatttcagatgtccttaggccattctccttctcttccatggagaatccagcctcacaaaaggattctttcaacttctttattgcaagaaacagttgagttaaatgtttgtttttggaaaggcgggatgtcagttcacatccttggtgtgtgtaagtaccgatgcacgccaccaccatgcctgtgttacagcagctccatgatggttgttgcccgaggttaatgtagttgtttgttagacctgtgtcttacacatttctcagagtaggatattagtattataatttaaagctacgacagtcacaaagtcacaataacttagaaacattgcgcatattcttctgaaatagcacttaaaaatgattagtgtcagtattttttcacttgggtcaatcaaatctgtaacactgaatccaagctattaaacaaaaagtatgcaatgaatgaattttgtaaatgaatagagagtatcagtttacaataatgttcttaaaacagtatcctctggatagttgagtatgggttagaaatcattgaaatggattggtcagaaattgctatctgtgtaaaatgtctaccagtagccagatgcttccagagttcttaatgcctctctggcatttcagagccagcatcccccaactcccacccctctgccatcacccagcccaaacacatcagctttcaaatgagatgatagtaaatgcggcaatgttaagacaagaaatttatgatttgccagattcaacatttatgacctccccttccaaagactgtctccgttgaccttgtctttttggtatgccttggggtttctgataatgtgtggagtctcattatggctgagagtttagtgttttcacagtgaagtgcagacatttgatttctttatgagttccctgtgttagaaatggctatagaaaaatttgtcataataatttcatttgcatgaaatcctgaggggtgcattaaggaaactaaaagcaccacttaccaaatctatcggcagaactgatgtgaggtaagtgagcatgtcaaacaaaataggagctcacatggatatatttatgtcactgagttgtcagaaattatgtcaaaatgaaaactgtttgtttcatgacaaattatatagtctataaattaaactggaagtaattattaaaaaaaa

SEQ ID NO: 23222 - DNA, 5970 bp, Homo Sapiens
ggcgcggggagctgtgggcggcagctgcgtctcctgccaccgccctccctccgccacgatgccggggatcgacaagctgcccatcgaggagacgctggaggacagcccgcagacaaggtctttactaggtgtatttgaagaagatgccacagctatttccaactatatgaaccagttgtatcaagctatgcatcggatttatgatgcacagaatgaattaagtgcagcaacacacctgacctcaaaacttttaaaagaatatgaaaaacagcgttttccattgggaggtgatgatgaagttatgagctctacattgcaacagttttcaaaagttatagatgagcttagctcttgtcatgcagtgctttcaactcaacttgctgatgccatgatgttccccattacccagtttaaagaaagagatctgaaagaaatactaacattaaaggaagtatttcagattgcaagtaatgatcatgatgctgcgattaatagatatagccgtttatcaaaaaaaagagaaaatgacaaggtgaagtatgaagtaacagaagatgtgtacacatccagaaagaaacaacaccagaccatgatgcattatttttgtgcattaaatactcttcagtacaagaagaaaatagcattgttagaacctctacttgggtacatgcaagctcagataagtttctttaagatgggttctgaaaatcttaatgaacaactggaagaatttttagctaatattggaacaagcgttcagaatgttcgcagggaaatggacagtgatatagagaccatgcaacagacaatagaggatttggaagtagccagtgatcccttatatgtgcctgacccagaccccaccaaatttcctgttaatcgaaatttaacccgaaaggctggataccttaatgctaggaataaaacaggcttggtgtcatctacctgggacagacagttttacttcacgcagggtggaaatttaatgagtcaggcccgtggggatgtagcaggaggcctggccatggacatagacaactgttcagtgatggctgtggactgtgaagacagacgatattgttttcagatcacctctttcgatggaaaaaaatcttcaattttgcaagcagagagtaaaaaagatcatgaagagtggatctgtacaataaacaacatatctaaacaaatatacttaagtgaaaatccagaggaaactgctgcacgagtaaatcaatcagctctggaagctgtcactccttccccatctttccagcagaggcacgagagcctgcggccagcagcaggacaatctcggccaccgacagctcgaaccagcagttcaggatccttaggatctgagtctacaaatttggctgccctctctctagattctcttgttgccccagacaccccaatacagtttgacataatttctcctgtgtgtgaagatcagcctggccaggcaaaagcctttggccagggaggcaggcgtacaaatccatttggagaatctggaggaagtacaaaatctgaaactgaagattctattcttcatcagttatttattgtccgattccttggttcaatggaggtgaaatcagatgaccatccagatgttgtttatgaaactatgcgccaaatcttagctgcccgggccatccataacatctttcgtatgacagaatcgcatttattagtcacttgtgactgtttaaagttaattgatccacagacacaagttacaaggctcacgtttccattaccttgtgtagttttgtatgctacacaccaggaaaataagcgcctttttggatttgttcttcggacatcaagcgggagaagtgaaagtaatctgtcatcagtctgctatatatttgagtcaaacaatgagggggaaaagatatgtgattctgttggactggcaaaacagatagctttgcatgctgaactggatcgtagggcatcagaaaaacaaaaagaaatagagagagtaaaagagaagcaacagaaagaactcaataaacaaaaacagattgaaaaggacttggaagaacaaagtcggttgatagctgcttccagtagaccaaaccaagccagtagtgaggggcagtttgttgtccttagcagtagccagtcagaagagagtgatttgggagaaggaggaaagaagagagaatcagaagcataagcttatacttttggtagatattcccccttggaatttgacagtttctatggtgaaatggcagaaggtaacaactatgttgaaatatcaaggaggagattaagctttatatttgcttatttgttgtagctacattttaaaaaaaagattgaacttgatgacttaggtttgcattgatcttttttcccccttaaacataatgtactatgtattaacatctaaaggaaacctgctcatctccctgaagcagactgctgaggaattacatttgctcaagaattttttccgtcaaattgtgaacttttaattcttgcattgtaattggctgtgtccataagaaatcatttattcttcaggcttagacattcatggatatgcttttctttcattaggaacattttgctggtgatgaggaagcatttagctgaataagtttaaagccctttatacagagaattctacaagtttgcaaatattttaacaatattaaatgtgcaatagaacttttataaaataattagaacagagattttacagttaaggtttcaaattgtggcaggtggtactgttgatctcagggtactttctgggattgctcacatttctctaatgtactgcacttgatgccagtaggaaagaagcttaagtgtcttcagttcaagattgatagagcccttggcattttattatcacattcttagttctcaggttgggacttcaattactgctgcagagcagtagtggttaaaaataagatattggaatttattaaaagatttttgttcaatacattttagattaggattgacaagtaaagatactgctatggaatgatacattgtattttctgcattgtgtgaaatagtttttattgaaagtcaagtgacatttcaaaagaagttctataacaattatgtttcatgcttaaagtaaaaattcccagagtttagtttagaaaatgtaatcttttaaatttcagactgatatattcccagtattttcataatgccatgttttgataaagtactgaatcaccactttatatccacaaaggcaaataactaatgtatgataatagaataatttgcactaattattgtaaatatgtctactcttcaaatgagtaaaaggtccaattttgtgaaagattgaaaatgaattgaatgcctagtagagtataggagaagttgaccaaggaaggatttaacctggtgccaaggttaaaataacatttctctactgcctattgtttatgttaaaccttaattttttttctgtaatcacttttaacactgctaatagaaattatgttttcatgtgtttcacatgaaaaagtatatatatacaaagttaatatagtgggtaaaatactttacatagtcacacatttacaaatttttcaagaggttagccactaagactttaataattttacaagggaaaaagcctttttttttctttgatatacagttttttcttcttagttctgcattagaaatggcatctgttttaggtctcaaaatataactcggctgtttcacactgtatatgtacattgttttctgtaggaataggataatgatatataggatcatgatattccttctatccatgtgccaaatgggtgtaatgtttatttactgatgctttatgttaccaaaacatacagtaaaaaagtagaaatttatgaaatacttttgataaaaagtttattttgtgcttaccaaaaggaatgctttcacaatagtgtatcagttcttttgttttgttaaagttggaatttattctgttgccagcatttaagtagtcatggcaagtcctgtttttaagaccttttggagactggagctttctgttccattaagtcttttgtttatactacaaattgtcacctcacttagttcagatgaaatctgttactctacaaggaaggtgttcatcattaggaggcagctttactaagctggtgctttgcatggtagcaagtgctgccctttatcagcaccctgggtcatagtgtaggctagagttaaggcactggcagacttagggatgctggacagacctgtagttcgttttaagtcatgttcacaggaatttctacaataataaacccatcatctccataggtcagatcgaagtgcattccaatgctaaatagaagttatgagtgggtttaacaattttagatgattcagcttttgttccattactgttgaactatatgaactattccattactgcagagatttaagtatctgttttaataagctctttttgttatttaaaggctgcccatgggtttctgcctagtggtaaagctgattgttaccctcctttgaaatcccttctagttctgagatgctttgagggtaactggattcgattttgggatatcttttctcacattcagacttacacttaatggtgttagaaatcaacaaaactcctttttaaaaagaaaagatattaagcctgcctacttctacaatgcattctgttacctatttgaacagtatgtttgtaactatggcaatgaagtcagtagataggaaaccagttattccttctacctttaaaaattttgagaacttgccaaccagggattaaagctattatcttgaacagagtccctaaagctagtctagtttttgccacatctgcaatgattattgtttaatttcaaaagaatcctcaggctctacaatctaggggtggtaaatgtgtttccactatacttgggaaaaggtcagtaggatgtgcatcctagggaagataaaatcgtatatggtaaaggcatttgagttaattttgcattatatctaggaaccatattatttaaaatttgaatcctattaatgctgagagatcctaagagctagtatgttgtaaaacctgccacctgaataaaatgaaaaaaaaaagtgtttttttgagacagagtcttgctctgttgcccaggctggagtgcagtggtgtgatcttgggtcactgcaaactccgcctcccaggttcacgccattctcctgcctcagcctcccgagtagctgggaccacaggggcccaccaccgcgcccggctaattttttgtatttttagtagagacggggtttcaccgtgttagccaggatgttctcgatctcctgacctcatgatccgcccgcctcggcctcccaaagtgctgggattacaggcgtgagccaccgtgcccggccctaaaatgaaattattaatgttggttctgaaacagcctcttagcattcagattgtattttaaatacttaaacacaccaattgtagaaagcaaccctttatttttagcaagtttggtttactcttctcccatgagattttgtctttctacattaactagtaagacataaagatttgaaactggaactatattatactttttaaccaatctctgtggcttcactcatgaaatttacttcagttaatatgagactgggggttaagttgtaactaatatgcaaaattgctttgtatatttggtgattttgtaatgtaagtgaattgattcttatttcactgatactattaatcatgcagtgtacaattcaaaatcatgcaatgtttcactttagaattggatttgaagaactcgactttatgtgatcatggtattggtatacatgtggggtggagaacttattttttcattttgtcacaataggtatatactgacaaggcttcaggaaaaaagttgttagaagattttttaatgtataataaagtccatgatttttgtacagtgttttttaatg

SEQ ID NO: 23223 - DNA, 5213 bp, Homo Sapiens
aagcagcccgcggaccggcagcaaaggaacgtgcgaacgcgtgacgccgcccgactggctcgcgctctcccgtgccccggcgtcctccgcccgctcatggcccgggccgccgcggacgatcggcgctgaggcgggccgcgtggagacgtgaggcggccgccgtggccctcacagtcggcgtttcgccgcctgcccgcggtgcccgcgcacgcctgccgccatcgccttcgcgcctggctggcgggggcgctgtcctcccaggccgtccgcgccgctccctggagctcggcggagcgcggcagccagggccggcggaggcgcgaggagccgggcgccaccgccgccgccgccgccgccgccgcgggggccatgaccgtggagcagaacgtgctgcagcagagcgcggcgcagaagcaccagcagacgtttttgaatcaactgagagaaattacggggattaatgacacccagatactacagcaagccttgaaggatagtaatggaaacttggaattagcagtggctttccttactgcgaagaatgctaagacccctcagcaggaggagacaacttactaccaaacagcacttcctggcaatgatagatacatcagtgtgggaagccaagcagatacaaatgtgattgatctcactggagatgataaagatgatcttcagagagcaattgccttgagtttggccgaatcaaacagggcattcagggagactggaataactgatgaggaacaagccattagcagagttcttgaagccagcatagcagagaataaagcatgtttgaagaggacacctacagaagtttggagggattctcgaaacccttatgatagaaaaagacaggacaaagctcccgttgggctaaagaatgttggcaatacttgttggtttagtgctgttattcagtcattatttaatcttttggaatttagaagattagttctgaattacaagcctccatcaaatgctcaagatttaccccgaaaccaaaaggaacatcggaatttgccttttatgcgtgagctgaggtatctatttgcacttcttgttggtaccaaaaggaagtatgttgatccatcaagagcagttgaaattcttaaggatgctttcaaatcaaatgactcacagcagcaagatgtgagtgagtttacacacaaattattagattggttagaagatgccttccaaatgaaagctgaagaggagacggatgaagagaagccaaagaaccccatggtagagttgttctatggcagattcctggctgtgggagtacttgaaggtaaaaaatttgaaaacactgaaatgtttggtcagtacccacttcaggtcaatgggttcaaagatctgcatgagtgcctagaagctgcaatgattgaaggagaaattgagtctttacattcagagaattcaggaaaatcaggccaagagcattggtttactgaattaccacctgtgttaacatttgaattgtcaagatttgaatttaatcaggcattgggaagaccagaaaaaattcacaacaaattagaatttccccaagttttatatttggacagatacatgcacagaaacagagaaataacaagaattaagagggaagagatcaagagactgaaagattacctcacggtattacaacaaaggctagaaagatatttaagctatggttccggtcccaaacgattccccttggtagatgttcttcagtatgcattggaatttgcctcaagtaaacctgtttgcacttctcctgttgacgatattgacgctagttccccacctagtggttccataccatcacagacattaccaagcacaacagaacaacagggagccctatcttcagaactgccaagcacatcaccttcatcagttgctgccatttcatcgagatcagtaatacacaaaccatttactcagtcccggatacctccagatttgcccatgcatccggcaccaaggcacataacggaggaaaaactttctgtgctggaaagttgtttacatcgctggaggacagaaatagaaaatgacaccagagatttgcaggaaagcatatccagaatccatcgaacaattgaattaatgtactctgacaaatctatgatacaagttccttatcgattacatgccgttttagttcacgaaggccaagctaatgctgggcactactgggcatatatttttgatcatcgtgaaagcagatggatgaagtacaatgatattgctgtgacaaaatcatcatgggaagagctagtgagggactcttttggtggttatagaaatgccagtgcatactgtttaatgtacataaatgataaggcacagttcctaatacaagaggagtttaataaagaaactgggcagccccttgttggtatagaaacattaccaccggatttgagagattttgttgaggaagacaaccaacgatttgaaaaagaactagaagaatgggatgcacaacttgcccagaaagctttgcaggaaaagcttttagcgtctcagaaattgagagagtcagagacttctgtgacaacagcacaagcagcaggagacccagaatatctagagcagccatcaagaagtgatttctcaaagcacttgaaagaagaaactattcaaataattaccaaggcatcacatgagcatgaagataaaagtcctgaaacagttttgcagtcgatcatgatgacaccgaacatgcaaggtattatcatggcgataggtaaatccaggagtgtatatgacaggtgtggccctgaagcagggttctttaaggcaattaagttggaatatgcaaggttggttaagttggcccaagaagacaccccaccagaaaccgattatcgtttacatcatgtagtggtctactttatccagaaccaggcaccaaagaaaattattgagaaaacattactagaacaatttggagatagaaatttgagttttgatgaaaggtgtcacaacataatgaaagttgctcaagccaaactggaaatgataaaacctgaagaagtaaacttggaggaatatgaggagtggcatcaggattataggaaattcagggaaacaactatgtatctcataattgggctagaaaattttcaaagagaaagttatatagattccttgctgttcctcatctgtgcttatcagaataacaaagaactcttgtctaaaggcttatacagaggacatgatgaagaattgatatcacattatagaagagaatgtttgctaaaattaaatgagcaagccgcagaactcttcgaatctggagaggatcgagaagtaaacaatggtttgattatcatgaatgagtttattgtcccatttttgccattattactggtggatgaaatggaagaaaaggatatactagctgtagaagatatgagaaatcgatggtgttcctaccttggtcaagaaatggaaccacacctccaagaaaagctgacagattttttgccaaaactgcttgattgttctatggagattaaaagtttccatgagccaccgaagttaccttcatattccacgcatgaactctgtgagcgatttgcccgaatcatgttgtccctcagtcgaactcctgctgatggaagataaactgcacactttccctgaacacactgtataaactctttttagttcttaacccttgccttcctgtcacagggtttgcttgttgctgctatagtttttaacttttttttattttaataactgcaaaagacaaaatgactatacagactttagtcagactgcagacaataaagctgaaaatcgcatggcgctcagacattttaaccggaactgatgtataatcacaaatctaattgattttattatggccaaactatgcttttgccaccttcctgttgcagtattactttgcttttatcttttctttctcaacagctttccattcagtctggatccttccatgactacagccatttaagtgttcagcactgtgtacgatacataatatttggtagcttgtaaatgaaataaagaataaagttttatttatggctacctatgtgtttgtaagcaggtatattgtatattagtgtattagtaatactagataaatgaattttgtctggggattaagattggatagttaatagattaatacaatcttttaattctgctctaatgctagcaaattggaaaatgtttaagtctttgacacttaaatttatctatatttttaacaaagttcttgaacttagtatggcaccggaacctgttttgaattcagtcaggtttttactcaagtaagtggtgttttttttaagtcaaactacactgaaacttttatccttttcttagattaatcttactttttaaatgtatttacaatatacagcaaggtgattatttcaagagaatcccaaagtacttgaataagggctattgtaaaatttaaaagaaatatttatatatacacatatatacacatacacacatgtatatatatattcttcataatggaggacaatgttttgcaatatataaatcattctatttttgtaaattgtatatcactttaattgaaaatgttctctactaattaatactgtgaaacaaaattgatgttgtttaactagaagttatgagtatcttaactgcctttattccttttcaaaaagaaaaagctgtagaacattttgtagatgaaactactgtttaagattaatgaattaatattgtgaatgaaaatcaaaatccatactttaaaggtaatcatgttactaaccacctatttttgaattcataaaaatttctttataaatgatgttttgtgaacatagtaaaatagaccattatactatgtgtatgtttgatacagcgtcgccaaaactagtgttctttattagtgcctctcacaaaagatcctggatggaggagtaagatgaaatattatgctattatatgatgctgtttgtaaaggtattaatgtactagtaaggtgttaatgacaaggaattagtactattcctgttgtaaagttagattttgcatattgtatctatcaaaatatgtttgggtttagattttaagttgtctactgagcagatttctgcattggttttccagtcctgttaaaagtttagaaacttcatatgtgtcatcacagcttttgtaaagaaagtatccttaatattttatgacattct

SEQ ID NO: 23224 - DNA, 1311 bp, Homo Sapiens
caaatcatgaaggacaggtggatcaatgcagggcatgaagaagatgaactcaaaccatttgttgaaccagagctagacatctcagaccaaaaaagaatagatattatggtgggaatgggatattcacaagaagaaattcaagaatctcttagtaagatgaaatacgatgaaatcacagctacatatttgttattggggagaaaatcttcagaggttaggccgagcagtgatctcaacaacagtactggccagtctcctcaccacaaagtgcagagaagtgtttcttcaagccaaaagcaaagacgctacagtgaccatgctggaccagctattccttctgttgtggcgtatccgaaaaggagtcagaccagcactgcagatagtgacctcaaagaagatggaatttcctcccggaaatcaagtggcagtgctgttggaggaaagggaattgctccagccagtcccatgcttgggaatgcaagtaatcctaataaggcggatattcctgaacgcaagaaaagctccactgtccctagtagtaacacagcatctggtggaatgacacgacgaaatacttatgtttgcagtgagagaactacagctgatagacactcagtgattcagaatggcaaagaaaacagcactattcctgatcagagaactccagttgcttcaacacacagtatcagtagtgcagccaccccagatcgaatccgcttcccaagaggcactgccagtcgtagcactttccacggccagccccgggaacggcgaaccgcaacatataatggccctcctgcctctcccagcctgtcccatgaagccacaccattgtcccagactcgaagccgaggctccactaatctctttagtaaattaacttcaaaactcacaaggagaaacatgtcattcaggtttatcaaaaggcttccaactgaatatgagaggaacgggagatatgagggctcaagtcgcaatgtatctgctgagcaaaaagatgaaaacaaagaagcaaagcctcgatccctacgcttcacctggagcatgaaaaccactagttcaatggatcccggggacatgatgcgggaaatccgcaaagtgttggacgccaataactgcgactatgagcagagggagcgcttcttgctcttctgcgtccacggagatgggcacgcggagaacctcgtgcagtgggaaatggaagtgtgcaagctgccaagactgtctctgaacggggtccggtttaagcggatatcggggacatccatagccttcaaaaatattgcttccaaaattgccaatgagctaaag

SEQ ID NO: 23225 - DNA, 2679 bp, Homo Sapiens
aagaattcggcacgaggccgcaatgtctcttgacagcggcggcggcgcagccggttccgggttcggcgcggggcggggatgtgaatcccgatggagcggcccgaggaaggcaagcagtcgccgccgccgcagccctggggacggctcctgcgtctgggcgcggaggagggcgagccgcacgtcctcctgaggaagcgggagtggaccatcgggcggagacgaggttgcgacctttccttccccagcaataaactggtctctggagatcactgtagaattgtagtggatgaaaaatcaggtcaggtgacactggaagataccagcaccagtggaacagtgattaacaagctgaaggttgttaagaagcagacatgccctttacagactggggatgtcatctacttggtgtacaggaagaatgaaccggaacacaacgtggcatacctctatgaatctttaagtgaaaagcaaggcatgacacaagaatcctttgaagctaacaaggaaaatgtgttccatgggaccaaagatacctcaggtgcaggtgcagggcgaggggccgatccccgggtccctccgtcgtcgcccgccactcaggtgtgctttgaggaaccacagccatcaacatcgacgtcagacctcttccccacagcctcggcctcttccacggagccttctcctgcagggcgagagcgttcctccagttgtgggtctgggggtggtggcatctcccctaaaggaagtggtccctctgtggcaagtgatgaagtctccagctttgcctcagctctcccagacagaaagactgcgtccttttcgtcgttggaaccccaggatcaggaggatttggagcccgtgaagaagaaaatgagaggagatggggaccttgacctgaacgggcagttgttggtcgcacaaccgcgtagaaatgcccaaaccgtccacgaggacgtcagagcagcggctgggaagccagacaagatggaggagacgctgacatgcatcatctgccaggacctgctgcacgactgcgtgagtttgcagccctgcatgcacacgttctgcgcggcttgctactcgggctggatggagcgctcgtccctgtgtcctacctgccgctgtcccgtggagcggatctgtaaaaaccacatcctcaacaacctcgtggaagcatacctcatccagcatccagacaagagtcgcagtgaagaagatgtgcaaagtatggatgccaggaataaaatcactcaagacatgctgcagcccaaagtcaggcggtctttttctgatgaagaagggagttcagaggacctgctggagctgtcagacgttgacagtgagtcctcagacattagccagccatacgtcgtgtgccggcagtgtcctgagtacagaaggcaggcggcgcagcctccccactgcccagcacccgagggcgagccaggagccccacaggccctgggggatgcaccctccacgtccgtcagcctgacgacagcagtccaggattacgtgtgccctctgcaaggaagccacgccctgtgcacctgctgcttccagcccatgcccgaccggagagcggagcgcgagcaggacccgcgtgtcgcccctcagcagtgtgcggtctgcctgcagcctttctgccacctgtactggggctgcacccggaccggctgctacggctgcctggccccgttttgtgagctcaacctgggtgacaagtgtctggacggcgtgctgaacaacaacagctacgagtcagacatcctgaagaattacctggcaaccagaggtttgacatggaaaaacatgttgaccgagagcctcgtggctctccagcggggagtgtttctgctgtctgattacagagtcacgggagacaccgttctgtgttactgctgtggcctgcgcagcttccgtgagctgacctatcagtatcggcagaacattcctgcttccgagttgccagtggccgtaacatcccgtcctgactgctactggggccgtaactgccgcactcaggtgaaagctcaccacgccatgaaattcaatcatatctgtgaacagacaaggttcaaaaactaagcatccagaggccctgagcagctttcagcactggaggtgaagagagcgtgtttttaaaatacagagacaagcacgtcaaggtgttttcacagccccctgagggaagggacgcagggtctccgacaggtgctctggggtgactcttctgtggagctttttaccctctgagtgagaccctccccagagccccgggggccgcagcccgccctcctggtgagcgctgggcagggctcgtggtggcatcagcagcagagacgaagcctttctgtaacatgcggccgtcccgccgagaggggcagttttgctcttttgtacattttccgaaactacagttaaagcagaagtctgttttcaggaaaagtttcaagggagaagggcaagtttatcaaaaacattgtttcaggagaagggagcataagtttacagcctacaggacgtacacaatatcctgctgctgggaaaaccacagcattttatctattttttattttaataggtttggtgcttatcttctaataagatttaaatgtcacaaactgtagcacaaataatataatttataatttacaaattgacaaaaaaaaaaaaaaaaaa

SEQ ID NO: 23226 - DNA, 2170 bp, Homo Sapiens
ctcaggaactgctcaaacctgtgccccaaagatgagggcccaagaggacctcgagggccgggcacagcatgaaaccaccagggacccctcgaccccgctacccacagagcctaagtttgacatgttgtacaagatcgaggacgtgccaccttggtacctgtgcatcctgctgggcttccagcactacctgacatgcttcagtggtaccatcgccgtgcccttcctgctggctgaggcgctgtgtgtgggccacgaccagcacatggttagtcagctcatcggcaccatcttcacgtgcgtgggcatcaccactctcatccagaccaccgtgggcatccggctgccgctgttccaggccagtgcctttgcatttctggttccagccaaagccatactggctctggagagatggaaatgccccccggaagaggagatctacggtaactggagtctgcccctgaacacctctcatatttggcacccacggatacgggaggtccagggtgcaatcatggtgtccagcgtggtggaggtggtgattggcctgctggggctgcctggggccctgctcaactacattgggcctctcacagtcacccccactgtctccctcattggcctttctgtcttccaagctgctggcgaccgagctggctcccactggggcatctcagcttgctccattctcctgatcatcctcttctcccagtacctgcgcaacctcaccttcctgctgcctgtctaccgctggggcaagggcctcactctcctccgcatccagatcttcaaaatgtttcctatcatgctggccatcatgaccgtgtggctgctctgctatgtcctgaccttgacagacgtgctgcccacagacccaaaagcctatggcttccaggcacgaaccgatgcccgtggtgacatcatggctattgcaccctggatccgcatcccctacccctgtcagtggggcctgcccacggtgactgcggctgctgtcctgggaatgttcagcgccactctggcaggcatcattgagtccatcggagattactacgcctgtgcccgcctggctggtgcaccaccccctccagtacatgctatcaacaggggcatcttcaccgaaggcatttgctgcatcatcgcggggctattgggcacgggcaacgggtccacctcgtccagtcccaacattggcgtcctgggaattaccaaggtgggcagccggcgcgtggtgcagtatggtgcggctatcatgctggtcctgggcaccatcggcaagttcacggccctcttcgcctcgctccctgaccccatcctggggggcatgttctgcactctctttggcatgattacagctgtggggctgtccaacctgcaatttgtggacatgaactcctctcgcaacctcttcgtgctgggattttccatgttcttcgggctcacgctgcccaattacctggagtccaaccctggcgccatcaatacaggcattcttgaagtggatcagattctgattgtgctgctgaccacggagatgtttgtgggcgggtgccttgctttcatacttgacaacacagtgccagggagcccagaggagcgtggtctgatacagtggaaagctggggctcatgccaacagtgacatgtcttccagcctcaagagctacgatttccccattgggatgggcatagtaaaaagaattacctttctgaaatacattcctatctgcccagtcttcaaaggattttcttcaagttcaaaagatcagattgcaattccagaagacactccagaaaatacagaaactgcatctgtgtgcaccaaggtctgaaaaatgacttccaggaaaggaagcatggtatataacaggaaaagaaaactacatggggaaccagaagacctaagcctgaaatcccagccctgcccctaactaacttctgtgtaaactcagataagtcacctttctctgggattcaaatttttgcatcagttaaaaaaaaaggggtgggggggaatgggccaaagtctgagtcttagagacttgtaccaatgttatgctatgtctctaaatctttactctcctaagtagacttgtcagcatctaggaagaacagctagaaattttcctctgtgatattttagactgcaagttgaaaaaaaaaaaaaaaaaaaa

SEQ ID NO: 23227 - DNA, 2593 bp, Homo Sapiens
gcagagcgggtggtgatcttcagcaagagctactgtccccatagtactcgggtgaaagaactcttttcttctttgggagtcgaatgtaatgtcttggaacttgatcaagttgatgatggggccagggttcaagaagtgctgtcagaaatcactaatcagaaaactgtgcccaatattttcgtgaataaagtgcatgtaggtggatgtgaccaaactttccaggcatatcagagtggtttgttacagaagctccttcaggaagatttggcatatgattatgatctcatcatcatcggtggtggttctggaggcctttcatgtgcgaaggaagctgccattttgggaaagaaagttatggtgctagactttgttgtcccgtcacctcagggcacatcctggggtcttggtggcacttgtgtaaatgtaggttgtattcctaagaaattgatgcatcaggctgcccttttggggcaggcattatgtgactcaaggaaatttggctgggaatataatcaacaagtgaggcacaactgggagacaatgacaaaagcgattcagaaccacatcagctctctaaactggggctacaggttgtctctgagggaaaaggctgtggcctatgtcaattcctatggagaatttgttgaacatcataaaataaaggcaaccaataaaaaaggacaggagacttattatactgctgcacagtttgtcatagcaacgggtgaaaggccacggtatttaggaatccaaggagataaagaatactgtattactagtgatgaccttttttctctgccttattgccctggcaaaacattagtggtgggtgcctcttatgttgccctggagtgtgcagggtttctggctggctttggcctagatgtcacagttatggtacgctcaatccttctccgtggcttcgaccaagaaatggcagaaaaagtgggttcctacatggagcagcatggtgtgaagttcctacggaaattcatacctgtgatggttcaacagttggagaaaggttcacctggaaagctgaaagtgttggctaaatccactgaaggaacagaaacaattgaaggagtctataacacagttttgttagctattggtcgtgactcctgtacaaggaaaataggcttggagaagattggtgtcaaaattaatgagaagagtggaaaaatacctgtaaatgatgtggaacagaccaatgtgccatatgtctatgctgttggtgatattttggaggataagccagagctcactcctgtcgccatacagtcaggcaagctgctagctcagagactttttggggcctctttagaaaagtgtgattatattaatgttccgactacagtgtttactcctctggagtatggttgctgtggattatctgaagagaaagctattgaagtatataaaaaagagaatctagaaatatatcatactttgttctggcctcttgaatggacagtagctggcagagagaacaacacttgttacgcaaagataatctgcaataaattcgaccatgatcgggtgataggatttcatattcttggaccaaacgccggtgaggttacccaaggatttgcagctgcaatgaaatgtgggctcacaaaacagctacttgatgacaccattggaattcaccccacatgtggggaggtgttcacgactttggaaatcacaaagtcgtcaggactagacatcactcagaaaggctgctgaggctaggcctgctgctgtttagttctccttgtcatattctcatttctctcaaagataagaatgctctcggataaaatgagcctgtgctcatgacagctgctctgttactcagggaccagtgcagggctgtcttacgacacttagatgagaaagtagacaaggaaagaggacagcagtgggcatctgccttgtggtcttgctgacagcgagaagcagtgggactgcttccttgacgccttagcttggagccccgttatgaggtgagccaaggctgactctcgcaagccaggactgagcttccctcggaaagacctttgagtggcaccattcacctaagttagcttttctggtcgctattgtttttatcccctttgctttgttgtttctgtgaaaatatattttcagttaagaaatgctataaagtagtggttttctagtgcgtgggcctagaattcacacatgctcactggtgaacagtgtctgtgggctgctgtgggctgcatttggatagctgtctgcattagcaggaagctgtacacactgtgtagggttagtcatctcttttcttttttgaggcacatttaacctactgtcaaaacgctgactcatgcttcaccctcacactcactacttggtggtgataaccttgaagctattctcccctaattaatatctcgagactgagcaaaatatctcatgtaagataaaagtacttgaattgctttttcatgttcatcttaatagtattatttccaaaagtttttaatactgtattatgtgaaatctaactaatttatctgtgaaataattccatcacagtctgtttaatgatgataaagttccataaatgaatacaggt

SEQ ID NO: 23228 - DNA, 6820 bp, Homo Sapiens
ggctgctaccttgaaatccaagccctaaaaatgccagcttctttggacttagaagatgacctggataaatgataaaaattaagaaagagattttgaagttttcttattgtcctcttggcatatgcttctggaataatattcaccatggttttggatgaccttccaaacttagaagacatctatacttccttgtgttcatcaacaatggaagactcagagatggattttgactctggactagaagatgatgacacaaaaagtgatagtattttggaggattccacaatttttgtggccttcaaaggaaatatagatgataaagacttcaaatggaaattagatgcaatattgaaaaacgtgcccaatttgttacacatggagtccagcaagctaaaagtacagaaggtggagccctggaacagcgtgcgtgtgacattcaacatcccccgggaagcagcggagcggctacggatccttgctcagagcaacaaccagcagcttcgggatttagggattctctccgttcagattgaaggggaaggtgctattaacctggctttggctcagaaccgaagccaagatgtgagaatgaatggacccatgggagctggaaattcagttaggatggaggcgggatttcctatggcaagtggtccaggaataataaggatgaacaaccctgccactgttatgatacccccgggtggaaatgtgtcatcttccatgatggcaccaggccccaatccagagctgcagcccaggactcctcgccctgcttctcagtcagatgcaatggatccactcctctctgggctccatatacagcagcaaagtcatccctcaggatctttagctcccccacatcacccaatgcagcctgtctctgtgaacagacaaatgaacccagctaattttccccagctgcagcagcagcagcaacaacaacaacagcagcagcagcagcagcagcagcaacaacagcaacagcagcaacaacagttgcaggcaagacccccacagcaacatcagcagcaacagccacagggaattcgaccccagtttactgccccaactcaggtgcctgttcctccaggctggaaccagctgccttctggagcccttcaacctcctccagcccagggttctctgggcacaatgactgcaaaccaagggtggaagaaggctcccttgcccggcccaatgcaacagcaactccaggcaagaccatccttagccacggtacagacgccttcccaccctccccctccatatccctttggcagccagcaagcctcacaagcccacacaaactttcctcagatgagcaacccaggccagttcacagctcctcagatgaagagtttgcagggagggccctctagggtcccaactcccttgcagcagccccacctcaccaacaagtctcctgcctcctcaccctcctccttccagcagggatcccctgcatcctccccaacggttaaccaaactcagcagcagatgggaccaaggccacctcaaaataacccacttccccagggatttcagcagcctgtcagctctccgggtcggaatcctatggttcaacagggaaatgtgccacctaacttcatggtgatgcagcagcaaccaccaaaccaggggccacagagtttacatccaggcctaggaggaatgcctaaacgcctcccacctggcttctcagcaggacaggccaatccgaactttatgcaaggtcaggtgccttcgaccacagcaaccacccctgggaattcaggagcccctcagctgcaagcaaatcaaaatgtccagcatgcaggtggtcaaggagctggtcctcctcaaaaccagatgcaggtgtcccacgggccgccaaatatgatgcagcccagcctcatgggaattcatggcaacatgaacaatcagcaggctggtacttctggggttcctcaagtgaacctcagcaacatgcaaggccagccccagcagggcccaccatctcagctgatgggcatgcaccagcaaatcgtgccctcccagggccagatggtccagcaacaaggaaccttgaaccctcagaaccctatgatcctttcaagggcccagcttatgccacagggccagatgatggtgaaccccccgagccaaaatcttgggccctcgccccaaaggatgaccccacccaagcagatgctttcccagcagggcccacaaatgatggcgccacataaccagatgatggggcctcaggggcaggttttgctccaacagaacccaatgatagagcagattatgaccaatcaaatgcaggggaataagcagcagtttaacactcagaaccagtccaatgtcatgccgggaccagcccagataatgaggggaccaactccgaacatgcaaggaaatatggtgcagtttacgggacagatgtcaggacagatgctgccccagcaagggcctgtgaacaacagtccatctcaggttatgggcattcagggacaggtcctgcggccaccagggcccagcccacacatggcccagcagcatggtgatcctgctactacagcaaataacgatgtcagtttatctcagatgatgcctgatgttagcattcaacaaaccaacatggtcccccctcatgtgcaggccatgcagggaaacagtgcctcgggaaaccacttctcaggccatgggatgtctttcaatgcacctttcagtggagctcccaatggaaatcagatgtcctgtggtcaaaatccaggcttcccagtcaataaggatgtcacgctaacgagcccattgttggtcaacttattgcagagtgacatatctgcaggccattttggggtaaacaataagcaaaataataccaacgcaaataaaccgaagaagaagaaaccccctcggaagaagaaaaatagtcagcaagatctaaacaccccagatactcgcccagctggtctggaagaggctgatcagccaccgttgcctggagaacaaggaattagcttggataactcaggccctaaactgccagaattttcaaaccggccaccaggttatccttctcaaccagttgaacagaggccacttcagcagatgcctcctcaactcatgcagcatgtggcacccccaccacagccaccacagcagcagccacagccacaactgcctcagcagcagcagccaccacctcccagtcagccacagtctcagcagcagcagcagcagcagcaacaaatgatgatgatgctcatgatgcagcaggatcccaaatcagttaggcttccagtctctcaaaatgtccatcctccaaggggccccctgaaccccgactcccagagaatgcccatgcaacagagtggcagtgtgcctgtcatggtcagtctgcaaggacctgcctccgtgccaccatcacctgataaacaaagaatgccaatgcctgtgaatactcccttgggaagcaattcaaggaaaatggtctatcaggagagcccgcagaatccttccagctcgccactggcggagatggcctcactccctgaagcaagtggcagtgaagcaccatctgtcccaggaggcccaaacaacatgccttcacatgtagtacttccccagaatcagttaatgatgacagggccaaaacctggaccatcgcccctttcagcaactcaaggtgcaactccccagcaaccccctgtaaattccctgcccagctctcacggccaccacttcccaaatgtggctgcgccaacccagacatctaggcccaaaacaccaaacagagccagccccagaccctattatcctcagacacccaacaaccgccctcccagcacagaaccttcagaaatcagtctgtcaccagaaagactcaatgcctccatagcaggactcttccctccacagattaatattcctttacctcctaggccaaatttaaacaggggctttgatcaacaaggcctaaatccaacaactttgaaggccatcgggcaagcaccttcaaatcttaccatgaatccttccaattttgctaccccacaaactcacaaattagattctgtggtagtgaattctggaaagcagtctaattctggagcaacaaaacgggcaagtccaagcaacagtcgcaggtctagtcctgggtccagtaggaaaaccactccaagccctgggaggcaaaattcaaaagcccctaaacttactctggcctctcagacaaatgcagccctattgcagaatgtggagttgccgagaaatgtattggtcagtcccactcctctggccaatccccctgtacctgggagctttcctaacaacagtgggctgaatcctcagaattctactgtgtctgtggctgcagttgggggtgttgttgaggataacaaggagagcttgaatgtgcctcaggacagtgattgccagaattcccagagtaggaaggaacaggtaaacattgaactaaaagcagtccctgcccaagaagttaaaatggttgtccctgaagatcagtccaaaaaggatgggcagccttcggatcctaacaaacttcccagtgtcgaagagaacaaaaatttggtgtctcctgctatgagggaagcaccaacatcgttaagtcaacttcttgacaactctggagctcccaatgtgacaattaaaccccctgggcttacagatctggaagtaacacctccagtagtttctggggaggacctcaaaaaagcatctgtcattcccacactgcaggatctgtcttcttctaaagaaccttctaattccctaaacttacctcacagtaatgagctgtgttcatcccttgtgcatcccgaattgagtgaggtcagttctaacgttgcaccaagcatccctccagtaatgtcaagacctgttagctcttcctccatttccactcccttgcccccaaatcaaataactgtatttgtcacttccaatcccatcacaacttcagctaacacatcagcagctttgccaactcacttgcagtctgcattgatgtcaacagttgtcacaatgcccaatgcgggtagcaaggttatggtttctgagggacagtcagctgctcagtctaatgcccggcctcagttcattacacctgtctttatcaattcatcctcaataattcaggttatgaaaggatcacagccaagcacaattcctgcagccccactgacaaccaactctggcctgatgcctccctctgttgcagttgttggccctttacacatacctcagaacataaaattttcttctgctcctgtaccgcctaatgccctctccagtagtcctgctccaaacatccagacaggtcgacctttggtccttagctcacgagccacccctgttcagcttccttcccctccttgtacgtcttctccagttgtcccttctcatccccctgtgcagcaagtgaaagaattgaatccagatgaggctagccctcaggtgaacacctcagcagatcagaacactcttccctcttcacagtcaaccacaatggtttctccccttttgaccaatagtccagggtcctctggcaaccggcgaagcccagtctcgtctagtaagggcaaaggaaaagtggacaaaattggccaaattttgttgaccaaggcatgtaagaaagttacaggctctcttgagaaaggggaagaacaatatggtgcagatggagagactgaaggccaagggctagacaccacagctccggggctcatgggaacagagcagttatccacagagctggacagtaaaaccccaacgcccccagcacccactctgctaaaaatgacctctagccctgtgggcccgggcactgcctcagcaggacccagcttacctggcggtgctctccccaccagtgtacgctcgatagtaaccactctggtaccctccgagctcatctccgccgtaccgaccacaaaaagcaatcatggtggcatagcatctgagtcacttgcgggtggcctagtggaggagaaggtgggatcccatccagaacttctacccagcatagccccgtcgcagaatttagtctcaaaggaaacttcaaccacagcactgcaggcctctgttgccagaccagagctggaggtaaatgctgccatagtctctggacaaagcagtgagcccaaagagatagttgaaaagtccaaaatcccaggccgaagaaactcccgaactgaagagccaactgtggcctctgaaagtgtggaaaatggacatcgtaaacgatcttctcgacctgcttcagcctccagctctactaaagacataaccagtgcggtgcaatccaagcgaagaaaatccaagtaaacaagcaggactgcgacttgatacttggaaatgtgtgtgacttttacaaagagcaattttgagctgtgacttttttaaatcaatttctgtacagttagtaattttaataatgtggcccttttcctagtccctgcaacctgtttcataaagtgcaatggggaaagcaggactgttgagcccttttggtgttgcgagttgaagttcaaggtttctaaaatgttgtcttgtattgaaaggagctaatgccattataaatgttactagttttcacatttcctaagcagcctagagtacagggtgagcatttttagatctcctaatgtattgtgccgtggaagtactgtgtgtgaatagcagtagtgggggcaaaagcaatcttctcatttggaaatgttgtaaataattttattatatagtgttttggatgtatttgttgtagaaatggaccagtgaataaagagaatctaaggatttgtacaatgtg

SEQ ID NO: 23229 - DNA, 3972 bp, Homo Sapiens
atggcgagcgactccccggctcgaagcctggatgaaatagatctctcggctctgagggaccctgcagggatctttgaattggtggaacttgttggaaatggaacatacgggcaagtttataagggtcgtcatgtcaaaacgggccagcttgcagccatcaaggttatggatgtcacaggggatgaagaggaagaaatcaaacaagaaattaacatgttgaagaaatattctcatcaccggaatattgctacatactatggtgcttttatcaaaaagaacccaccaggcatggatgaccaactttggttggtgatggagttttgtggtgctggctctgtcaccgacctgatcaagaacacaaaaggtaacacgttgaaagaggagtggattgcatacatctgcagggaaatcttacgggggctgagtcacctgcaccagcataaagtgattcatcgagatattaaagggcaaaatgtcttgctgactgaaaatgcagaagttaaactagtggactttggagtcagtgctcagcttgatcgaacagtgggcaggaggaatactttcattggaactccctactggatggcaccagaagttattgcctgtgatgaaaacccagatgccacatatgatttcaagagtgacttgtggtctttgggtatcaccgccattgaaatggcagaaggtgctccccctctctgtgacatgcaccccatgagagctctcttcctcatcccccggaatccagcgcctcggctgaagtctaagaagtggtcaaaaaaattccagtcatttattgagagctgcttggtaaagaatcacagccagcgaccagcaacagaacaattgatgaagcatccatttatacgagaccaacctaatgagcgacaggtccgcattcaactcaaggaccatattgatagaacaaagaagaagcgaggagaaaaagatgagacagagtatgagtacagtggaagtgaggaagaagaggaggagaatgactcaggagagcccagctccatcctgaatctgccaggggagtcgacgctgcggagggactttctgaggctgcagctggccaacaaggagcgttctgaggccctacggaggcagcagctggagcagcagcagcgggagaatgaggagcacaagcggcagctgctggccgagcgtcagaagcgcatcgaggagcagaaagagcagaggcggcggctggaggagcaacaaaggcgagagaaggagctgcggaagcagcaggagagggagcagcgccggcactatgaggagcagatgcgccgggaggaggagaggaggcgtgcggagcatgaacaggaatataagcgcaaacaattggaagaacagagacaagcagaaagactgcagaggcagctaaagcaagaaagagactacttagtttcccttcagcatcagcggcaggagcagaggcctgtggagaagaagccactgtaccattacaaagaaggaatgagtcctagtgagaagccagcatgggccaaggaggtagaagaacggtcaaggctcaaccggcaaagttcccctgccatgcctcacaaggttgccaacaggatatctgaccccaacctgcccccaaggtcggagtccttcagcattagtggagttcagcctgctcgaacaccccccatgctcagaccagtcgatccccagatcccacatctggtagctgtaaaatcccagggacctgccttgaccgcctcccagtcagtgcacgagcagcccacaaagggcctctctgggtttcaggaggctctgaacgtgacctcccaccgcgtggagatgccacgccagaactcagatcccacctcggaaaatcctcctctccccactcgcattgaaaagtttgaccgaagctcttggttacgacaggaagaagacattccaccaaaggtgcctcaaagaacaacttctatatccccagcattagccagaaagaattctcctgggaatggtagtgctctgggacccagactaggatctcaacccatcagagcaagcaaccctgatctccggagaactgagcccatcttggagagccccttgcagaggaccagcagtggcagttcctccagctccagcacccctagctcccagcccagctcccaaggaggctcccagcctggatcacaagcaggatccagtgaacgcaccagagttcgagccaacagtaagtcagaaggatcacctgtgcttccccatgagcctgccaaggtgaaaccagaagaatccagggacattacccggcccagtcgaccagctgatctgacggcattagccaaagaactaagagaactccggattgaagaaacaaaccgcccaatgaagaaggtgactgattactcctcctccagtgaggagtcagaaagtagcgaggaagaggaggaagatggagagagcgagacccatgatgggacagtggctgtcagcgacatacccagactgataccaacaggagctccaggcagcaacgagcagtacaatgtgggaatggtggggacgcatgggctggagacctctcatgcggacagtttcagcggcagtatttcaagagaaggaaccttgatgattagagagacgtctggagagaagaagcgatctggccacagtgacagcaatggctttgctggccacatcaacctccctgacctggtgcagcagagccattctccagctggaaccccgactgagggactggggcgcgtctcaacccattcccaggagatggactctgggactgaatatggcatggggagcagcaccaaagcctccttcaccccctttgtggaccccagagtataccagacgtctcccactgatgaagatgaagaggatgaggaatcatcagccgcagctctgtttactagcgaacttcttaggcaagaacaggccaaactcaatgaagcaagaaagatttcggtggtaaatgtaaacccaaccaacattcggcctcatagcgacacaccagaaatcagaaaatacaagaaacgattcaactcagaaatactttgtgcagctctgtggggtgtaaaccttctggtggggactgaaaatggcctgatgcttttggaccgaagtgggcaaggcaaagtctataatctgatcaaccggaggcgatttcagcagatggatgtgctagagggactgaatgtccttgtgacaatttcaggaaagaagaataagctacgagtttactatctttcatggttaagaaacagaatactacataatgacccagaagtagaaaagaaacaaggctggatcactgttggggacttggaaggctgtatacattataaagttgttaaatatgaaaggatcaaatttttggtgattgccttaaagaatgctgtggaaatatatgcttgggctcctaaaccgtatcataaattcatggcatttaagtcttttgcagatctccagcacaagcctctgctagttgatctcacggtagaagaaggtcaaagattaaaggttatttttggttcacacactggtttccatgtaattgatgttgattcaggaaactcttatgatatctacataccatctcatattcagggcaatatcactcctcatgctattgtcatcttgcctaaaacagatggaatggaaatgcttgtttgctatgaggatgagggggtgtatgtaaacacctatggccggataactaaggatgtggtgctccaatggggagaaatgcccacgtctgtggcctacattcattccaatcagataatgggctggggcgagaaagctattgagatccggtcagtggaaacaggacatttggatggagtatttatgcataagcgagctcaaaggttaaagtttctatgtgaaagaaatgataaggtattttttgcatccgtgcgatctggaggaagtagccaagtgtttttcatgaccctcaacagaaattccatgatgaactggtaa

SEQ ID NO: 23230 - DNA, 2457 bp, Homo Sapiens
atggagtctgagcagctgttccatagaggctactatagaaacagctacaacagtataacaagtgcaagtagtgatgaggaacttttagatggagcaggtgttattatggactttcaaacatctgaagatgacaatttattagatggtgacactgcagttggaactcattatacaatgacaaatggaggcagcattaacagttctacacatttactggatcttttggatgaaccaattccaggtgttggtacatatgatgatttccatactattgattgggtgcgagaaaaatgtaaagacagagaaaggcatagacggatcaacagcaaaaagaaagaatcagcatgggaaatgacaaaaagtttgtatgatgcgtggtcaggatggctagtagtaacactaacaggattggcatcaggggcactggccggattaatagacattgctgccgattggatgactgacctaaaggagggcatttgccttagtgcgttgtggtacaaccacgaacagtgctgttggggatctaatgaaacaacatttgaagagagggataaatgtccacagtggaaaacatgggcagaattaatcataggtcaagcagagggtcctggttcttatatcatgaactacataatgtacatcttctgggccttgagttttgcctttcttgcagtttccctggtaaaggtatttgctccatatgcctgtggctctggaattccagagattaaaactattttaagtggattcatcatcagaggttacttgggaaaatggactttaatgattaaaaccatcacattagtcctggctgtggcatcaggtttgagtttaggaaaagaaggtcccctggtacatgttgcctgttgctgcggaaatatcttttcctacctctttccaaagtatagcacaaacgaagctaaaaaaagggaggtgctatcagctgcctcagctgcaggggtttctgtagcttttggtgcaccaattggaggagttctttttagcctggaagaggttagctattattttcctctcaaaactttatggagatcattttttgctgctttagtggctgcatttgttttgaggtccatcaatccatttggtaacagccgtctggtccttttttatgtggagtatcatacaccatggtacctttttgaactgtttccttttattcttctaggggtatttggagggctttggggagcctttttcattagggcaaatattgcctggtgtcgtcgacgcaagtccacgaaatttggaaagtatcccgttctggaagtcattattgttgcagccattactgctgtgatagccttccctaatccatacactaggctaaacaccagtgaactgatcaaagagctttttacagactgtggtcccctggaatcctcttctctttgtgactacagaaatgacatgaatgccagtaaaattgtcgatgacattcctgatcgtccagcaggcattggagtatattcagctatatggcagttatgcctggcactcatatttaaaatcataatgacagtattcacttttggcatcaaggttccatcaggcttgttcatccccagcatggccattggagcgatcgcaggaaggattgtggggattgcggtggagcagcttgcctactatcaccacgactggtttatctttaaggagtggtgtgaggtcggggctgattgcattacacctggcctttatgccatggttggtgctgctgcatgcttaggtggtgtgacaagaatgactgtctccctggtggttattgtttttgagcttactggaggcttggaatatattgttccccttatggctgcagtcatgaccagtaaatgggttggagatgcctttggcagggaaggcatttatgaagcacacatccgattaaatggataccctttcttggatgcaaaagaagaattcactcataccaccctggctgctgacgttatgagacctcgaaggaatgatcctcccttagctgtcctgacacaggacaatatgacagtggatgatatagaaaacatgattaatgaaaccagctacaatggatttcctgtcataatgtcaaaagaatctcagagattagtgggatttgccctcagaagagacctgacaatcgcaatagaaagtgccaggaaaaaacaagaaggtatcgttggcagttctcgggtgtgttttgcacagcacaccccatctcttccagcagaaagtcctcggccattgaagcttcgaagcattcttgacatgagcccttttacagtgacagaccacaccccaatggagatcgtggtggatattttccgaaagctgggactgaggcagtgccttgtaactcacaatgggcgcctccttggcattataacaaaaaaagatatcctccggcatatggcccagacggcaaaccaagaccccgcttcaataatgttcaactga

SEQ ID NO: 23231 - DNA, 4175 bp, Homo Sapiens
cggggccgaggcggaggagcggccgccgcgccggggcccagccggagccgccgccctcgcccttgcctttgcctgcgcggctcagaatcaccatccgcggcggggagacgagccggccgtcccgggccgggggacccgcccgccatggccaccaaggctcgggttatgtatgattttgctgctgaacctggaaataatgaactgacggttaatgaaggagaaatcatcacaatcacaaatccggatgtaggtggaggatggctggaaggaagaaacatcaaaggagaacgagggctggttcccacagactacgttgaaattttacccagtgatggaaaagatcaattttcttgtggaaattcagtggctgaccaagccttccttgattctctctcagccagcacagctcaggccagttcgtcggctgccagcaacaatcaccaggttggcagtggcaatgacccctggtcagcctggagtgcctccaaatctgggaactgggaaagctcagaaggctggggggcccagccagagggggctggagcccaaagaaacacaaacactcccaacaactgggacactgccttcggccacccccaggcctaccaaggaccagcaactggtgatgatgatgactgggatgaagactgggatgggcccaaatcctcttcctactttaaggattcagagtcagctgatgcaggcggcgctcagcgaggaaacagtcgtgctagttcctcatccatgaaaattccccttaacaaatttcctggatttgcgaaacctggcacggaacagtatttgttggccaaacaactagcaaaacccaaagagaaaattcccatcattgttggagattatggcccaatgtgggtttatcctacctctacttttgactgtgtggtagcagatcccaggaaaggctccaaaatgtatggtctaaagagctacatcgaatatcagctaacacctactaacactaatcgatctgtaaaccacaggtataagcactttgactggttatatgagcgtctcctggttaagtttgggtcagccattccaatcccttctcttccagacaaacaagtcacaggccgctttgaagaggaatttatcaaaatgcgcatggagagacttcaggcctggatgaccaggatgtgtcgccatccagtaatctcagaaagtgaagttttccagcagttcctaaatttccgagatgagaaggaatggaaaactggaaagaggaaggccgagagagatgagctggcgggagtcatgatattttccaccatggaaccagaggcacctgacttggacttagtagaaatagagcagaagtgcgaggctgtggggaagttcaccaaggccatggatgacggcgtgaaggagctgctgacggtggggcaggagcactggaagcgctgcacgggcccattacccaaggaatatcagaagataggaaaggccttgcagagtttggccacagtgttcagttccagtggctatcaaggtgaaacagatctcaatgatgcaataacagaagcaggaaagacttatgaagaaattgccagtctcgtggcagaacagccaaagaaagatctccatttcctgatggaatgtaatcacgagtataaaggttttcttggctgcttccctgacatcattggcactcacaagggagcaatagaaaaagtgaaagaaagtgacaaactagttgcaacaagtaaaatcaccctacaagacaaacagaacatggtgaagagagtcagcatcatgtcttacgcgttgcaagctgagatgaatcactttcacagtaaccggatctatgattacaacagtgtcatccgcctgtacctggagcagcaagtgcaattttacgaaacgattgcagaaaagctgaggcaggccctcagccgctttccagtgatgtaggacagaacgggccttgaagagaatgccgcgtgctttctcctgacttggggcaatgcaattcaaaacttttttcccctattattcagaaaaaaaaggaaacaaaaccaaaaagaaagagttgcaaaaaactgcatttattttattagccaccctaaatgcgtcagttatttagggatggtcttttgttcatttccgcatccattatttaaaccagtggaaattgtctctatttttggaaagtacttaaaagttaccagaattttcaatggaaaatgaggggtttctccccactgatattttacatagagtcataatttatatgtcttataaattataagtcttatataatttataagtctcccacaatcttccagttcttacccagtgtcagataattaattactaattactttcttaaaaacatgaactatgccagaataaaaaatatctatgtttgtatatttttataactcctttcagtcctctggggctcctgtcattgagggaagtcgttacgcctttcactgccacagttacagctcaagtgcttacacttcaagagggaggacgctgggggcccctggggtgactagtgccatcgtgggtgtgtgggcaggtgggccatcccatgtccctccaggggaccccacagcctggcagatgagcagatacccctggccacccatgtcctcagcgacatttctgatgtgctgctcttatgtgaggaccagtgctttctctctttgcacttccttcctaatcttggttaaggcatgttttatgccatgaagaatacattagaagaattgagggactttgtagagaattttgtggctttggtccgacgggtgagtggctgtgcggaggcctgtgttcgggagggcctgggggaaggagggcacccagcaccccggcgtctctggccctttcttattctttggctcctcatccaccgtgatgagaagcgctgctgtggccacggcacactgcttggcttgggtggcgggttcatggccagttggtgtcatcagcaaagagaaaaagcacaggttagctccccattagatggaaaagtgtagggactgagaagggctgcagcctcagcagtgtacagagtccccggcgctctgaggttggagagaaagaacagaccagcgcccttcctgactacatccgaaacttcacacagggtgtttctgagcaccagcacttccagcgcttcacttaacggcataaagcaaaacaggaccttggcacaccgtcagctcgaactcaacactggcagccaccgtctcacccctgcggaggagcgctcccgtctcccacaggtgccttaccgcgttccctcccgctgctttcatttttctgaccttaataattacgggaaatggaaagtctgggccagcatcaataaaatgacaccaaaaataagtagatgaaatcaaatgaatatgagaacatcttgttcttcaatatcacgggtttttgttaatgtttcataagtaattctccccacttgatttttcttctataaaatcccatagaacaatgtttatgctatagccatttaatatatgtacaaattgtaaagaatatgtataaatgttttacacgaatgtaagagcatgtagaagccaacatataaataaattgtttaaaaaaactgtacagtaaattctcaaatcactttttcaaaacactttttggactttgtgtgtgatttttgttgttgttgttaagtactttttattccagctgctgaaaatggtccaggtaatgaattcttccccaaatcctatttcttctgacatgaattcatcatttcagttccgtaggtcaagtgttgcggtccgggaagcgtatcataaccacctgggaagttgccaatgaagcagacaagtctcccagtgtctgactctcggatatttggatttgactggtgtgaggcaaagtgaaaaagggatgggggaaatggagatggcacgggctcctcagagcgtggtagccgacttgaggaaaagcagagggaatgtgaaagaaaataagagaatccacgggatttgatgcctggaagattctccttcaagtggcaacatggcatatatatccttctccggggagtcacatgcaccatttggttcttagatacgttgatgttttgatttttaatgatttgtatcaacctgtaggtaccacagaagagctgtagtcatacaatcacataacttttacaaatatagtgg

SEQ ID NO: 23232 - DNA, 930 bp, Homo Sapiens
ccgtcttccgccgcacgtggattcagcgcgatgcccaaatccaagcgcgacaagaaagtctccttaaccaaaactgccaagaaaggcttggaattgaaacaaaacctgatagaagagcttcggaaatgtgtggacacctacaagtaccttttcatcttctctgtggccaacatgaggaacagcaagctgaaggacatccggaacgcctggaagcacagccggatgttctttggcaaaaacaaggtgatgatggtggccttgggtcggagcccatctgatgaatacaaagacaacctgcaccaggtcagcaaaaccttgaggggtgaggtgggtctcctgttcaccaaccgcacaaaggaggaggtgaatgagtggttcacgaaatacacagaaatggactacgcccgagctggtaacaaagcagctttcactgtgagcctggatccagggcccctggagcagttcccccactccatggagccacagctcaggcagctgggcctgcccaccgccctcaagagaggtgtggtgactctgctgtctgactacgaggtgtgcaaggagggcgatgtgctgaccccagagcaggctcgcgtcctgaagctttttgggtatgagatggctgaattcaaggtgaccatcaaatacatgtgggattcacagtcgggaaggttccagcagatgggagacgacttgccagagagcgcatctgagtccacagaagagtcagactcagaagatgatgactgaaagggactcgggactgaaggtctcctggaagcttctgggtctcactggaccatcaggactgctgccgcccctctggagagagcagctttttatttgtctgtagacagggaacatgatgggcactgacctcctgtaaagaataaaactgtgggccgggcgcggtggaaaaaaaaaaaaaaa

SEQ ID NO: 23233 - DNA, 816 bp, Homo Sapiens
gtcacatatgccaaggccaatgtttccttcaaggtgccagtagaaacaacagaaaataacatcctgctgaaaggatggcaaagtgccccgccccaccccacaaacacaatttggatcttttccttctttaataaagcagggctgtattatcttgaatatatgtttgcttgttagaacatattaagatatatttatttgccactagtatttaacattttgtgcacattttcataattacattcttacctttcaaattttgactcaaagtggataggctagtgttgatattggagtgcaaatgtatatactccaagagctagttcttaattctgctgagttggaaagccttttattattgtctgtatccttactggttttatctagttcaaaaaaggtgacaacgtctaaattttgatgtggacctctctccatagagagccgctcctaagtgcaagaaattccaacaggtgtcagtaggacttggccctgggggacaacaagtggcaggaacaggatcctttaaaacagtgtcaaacttctcatgcatggagcatgaattcttactaatagagactgtagtttttttcttgtctttggtaaatatataaaagaccttaatttttcttttttaatgaatggagaaaacatgagaaaaccagatggacctgttagtactacatttttaaggcattttatatttgatggtgccgtacttttaataataataaaactgaagttttttagtggcaatactgatttattttttaaaccagaaagataatccatattgattacttactacaaaaaaaaaaaaaa

SEQ ID NO: 23234 - DNA, 2364 bp, Homo Sapiens
gcgaggacttcttggagtgctttctgcacctgaaactcagttcagggattggggctggctttgagttcaggccaggagagacggaagaactggcaagccgggagcctgcgtccagggaagttgcttggaattccaggcccctcctgtcctcctgctctgagccccacgtggagggagtggctctgtgctttctacccaagggtttcggcttatccagtgggaaaaacgggtggagtgcgcttacaccgccctcggaaccagagcctggagtagcccttctgttgccgctcgtttttgtcaggaggtagcagtctgggactcaagggtgggtctttggagctgattagagatgcctttgtgagtgctatgttgtgtggatgtggagatgactccatccctgtgccctgccttgcttcctccaggacttgggaccctggaggactgacgctgctggcctgggcgtccccttccgctgagccatggcgactcccgacgtgagtgtgcacatggaggaggtggtggttgtgacaactccggacactgcagtggacggcagtggtgtggagggggtgaagaccgtgttggtgacgaccaacttggcccctcacgggggcgacctgacggaagataacatggagacagaaaatgcagcggcggcagctgccgcggccttcacagcctcctcccagctcaaggaagccgtgttagtgaagatggctgaagagggggagaacctggaagctgagattgtgtaccccatcacctgtggagacagcagagccaacctcatctggaggaagtttgtgtgtcccggcatcaatgtgaaatgtgttcagtacgacgagcatgtaatcagcccaaaggaatttgtgcacctggccgggaagtccaccctgaaggactggaagagagccatccgcatgaacggcatcatgctcaggaagatcatggactccggggaactggacttctaccagcacgacaaggtctgctccaacacctgccgcagcacaaagattgacctctcaggagcccgtgtgtccctgagcagccccacgtcggccgagtacattcccctcacgcccgccgcagccgacgtgaatgggtctcctgcgaccatcaccatagagacctgtgaagaccctggcgactggaccgcggccattggagatgacacatttaccttctggcgggggctgaaggacgccggcctgctggacgaggtcatccaggagttccaccaggagctggtggagaccatgagaggcctgcagcagcgggtccaggaccctcccctgcagcttcgagatgctgtacttctcaacaacatcgtgcagaacttcggcatgctggacctggtgaagaaggtgctggccagccacaagtgccagatggaccgctcgcgggagcagtacgcccgggacctggcagccctggagcagcagtgtgatgagcatcgtcgccgagccaaggagctgaagcacaagtcccagcacctcagcaacgtgctcatgacgctgacgccggtctccctgccaccgcctgtgaagcggccccggcttgcacgtgccacatcaggaccggccgccatggcctcgcaggtgctcacccagtctgcccagctggcgcttggcccgggcgtgcccgtcccccagctgaccagcgtgccccttggtaaagtggtgtccaccctgccgtccaccgtcctgggcaagggttcccttcaggcgccccccgccagctccccggcctccccgctgctcgggggatacacagtcttggcctcttccggctccacctaccccagcacagtggagatccacccggacgcgtccagcctcacggtcctgagcacggccgccgtgcaggacggtagcacggtgttcaaggtggtcagcccgctgcagctgctcacgttgcctggcctgggccccaccctgcagaacgtggcccaggcctcgcctggctccagcacaattgtgacagtgcccgcaggggctgcccccgggcctgaggagcacacggccaccattgaggtggctgccatggcagaggaccacgagcggaagtagccgacaggagggcgaggcccctgggacggacagggctggctgtctctcagccgcggcagcagggagcgggcagaggccgcagggctggctcgggcaggtgggtcacgtggtctgcagaaccaaagagaggaatcgccaaaacaaatcacgagaagagagaaggggacagaacagcgagagcaacctggaaaaccggtcttcaggtcccacgtttcctcccccttttttcttgggaaatatatttttccatctgttgcttactaaaaaaaaaaaaaaaaaaaaaaaaaaaaaa

SEQ ID NO: 23235 - DNA, 1688 bp, Homo Sapiens
gcggagccatcctaaaactgggactgtggataataacacttctacagacctaaaatccctgagaccagatgagctaccgcaccccgaggtagatgacctagcccagatcaccacattctggggccagtctccacaaaccggaggactacccccagactgcagtaagtgttgtcatggagactacagctttcgaggctaccaaggcccccctgggccaccgggccctcctggcattccaggaaaccatggaaacaatggcaacaatggagccactggtcatgaaggagccaaaggtgagaagggcgacaaaggtgacctggggcctcgaggggagcgggggcagcatggccccaaaggagagaagggctacccggggattccaccagaacttcagattgcattcatggcttctctggcaacccacttcagcaatcagaacagtgggattatcttcagcagtgttgagaccaacattggaaacttctttgatgtcatgactggtagatttggggccccagtatcaggtgtgtatttcttcaccttcagcatgatgaagcatgaggatgttgaggaagtgtatgtgtaccttatgcacaatggcaacacagtcttcagcatgtacagctatgaaatgaagggcaaatcagatacatccagcaatcatgctgtgctgaagctagccaaaggggatgaggtttggctgcgaatgggcaatggcgctctccatggggaccaccaacgcttctccacctttgcaggattcctgctctttgaaactaagtaaatatatgactagaatagctccactttggggaagacttgtagctgagctgatttgttacgatctgaggaacattaaagttgagggttttacattgctgtattcaaaaaattattggttgcaatgttgttcacgctacaggtacaccaataatgttggacaattcaggggctcagaagaatcaaccacaaaatagtcttctcagatgaccttgactaatatactcagcatctttatcactctttccttggcacctaaaagataattctcctctgacgcaggttggaaatatttttttctatcacagaagtcatttgcaaagaattttgactactctgcttttaatttaataccagttttcaggaacccctgaagttttaagttcattattctttataacatttgagagaatcggatgtagtgatatgacagggctggggcaagaacaggggcactagctgccttattagctaatttagtgccctccgtgttcagcttagcctttgaccctttccttttgatccacaaaatacattaaaactctgaattcacatacaatgctattttaaagtcaatagattttagctataaagtgcttgaccagtaatgtggttgtaattttgtgtatgttcccccacatcgcccccaacttcggatgtggggtcaggaggttgaggttcactattaacaaatgtcataaatatctcatagaggtacagtgccaatagatattcaaatgttgcatgttgaccagagggattttatatctgaagaacatacactattaataaataccttagagaaagattttgacctggctttagataaaactgtggcaagaaaaatgtaatgagcaatatatggaaataaacacacctttgttaaagataaaaaaaaaaaaaaaaaa

SEQ ID NO: 23236 - DNA, 1838 bp, Homo Sapiens
cgcattttacaagaaatgtgcagaaagccattgataaatatacctgcggaagccatacacccacgggagcccacacctcttggtctgggtcggccacacagagctctaccaccggctcatccacggagaggggctccgtttattcctggagagatgacgaatttgacgaagccagttcacagtcagtgcagcggttactctgggaggtggaggaaatgttatttgaagggaaagtgaaccctcagacccagagtctgctggccgaatgcggggagtggacaagaagatccctccatttgagagtattaggaagacagctgatcctgcccactgacaaaggcgtccagcatttccagggcagcactcctgcctccgcagtccacagacccccgctcagtgcctgcggacacagcagcaacatcagagagttgtgcatttctggctctcaaatagtcccagcagcactctcagcctctgccctgccaggccctgatgacacaggggttgctgacctaacggcacgttcatccctggaagaagaggtttaccatgtggatggaaagattgaggagtatttcgcttttgacagaaaagaggatgatgatgaatgtcttgaacaaaaaccagctcagcccggtaggaaatggcgcaaactcggacttcctcctgtttccccgcgtgactgtgtcaaagatgccgtggcagcagaagtgtttgatcacgtctggacaaatatggtagaacttttggaagagctgattagaaaacactgggaaactacactcacagaagggaaaaaacagagagaaacattgaaagtggctggaaacagatttccgcacgtcctcgttccacacgctcacgccgatggagccagtggccccccgtccggacacgccgaggctcacggcatctccctggcttctcgtctgaacccgccccagattcatcacttctccagcagtttttatagtgacatgaatggtgtcatgacaattcaagcaaaaccgcttcagcggagacctgcctattttgctgacagaacgcagaatgagaaggaggacaaagcatcgggtggaggggcaggtgctctctcctccgcaccgcacagactgggacgggcctcagacactcatggattatcaccttctgcaaagaaaacaccagtgccctggaggctgccttctcttgcttcagattcacagagactaaaaactcccaacatctatagtgacgaagttcttcgggggaacaaaactgccgactggcgtggaccacatggcttccccactggttcaaacgtcacggagcaggttccccccgctagtcacggagaccagggggcagaatacagcagttcctggatgccgccttgtttcttacagaggaaggcatctacaaaaccgtgtgttgagtgccatgcctgacggtacagaacgatcgcgtcttcgagaaagaacagccaccctggaacggttgtcaaggcccagcacaacccacacgttccggcagtcggatacgcctcgaaaaagttcattgacacaaatggaatttgctgctcacacatggacaggtcaaagtattttgacaggttcacaatatgtgcctaaatcttttcagaggacaactttgactttcaagaggagattccaagtgacatcttgaaaccacctcaccagaaccattggagcacctgtggcctcggcacactgcttatcacttgaaaaatggaggaacaagtgttatatttatctgtgtgtctgacagtgtgagatgttagaccgagagaaaagcaaacaaataaatcacttaatcttgaaaaaaaaaaaaaaaaaaaa

SEQ ID NO: 23237 - DNA, 1551 bp, Homo Sapiens
gttctaggcctgtgttatatgtcatatttagcgtttttatatatgacctttgatttctgttgtttgtattttagcacagtgtatgcaccttcatttaaatacatctgtgtgcatacagatacgcatatatgtgtgtgcgtatgcatatatctctcatctgtagtttccaagagttcagctgaagcagatggagtcctgcagcccaggagacaccctgcatccctgctaatagtgtttgccacaagtattagtgagtcttccttattaatattttcatttcagaagactgaagcaaagctgatagtgtttgctgtttctttggcagctaagtgagggtcttgggatgacttgctgtgttcctcaagctgcactttggggccatctctgcagtattagccccctttttgcttggtggtactctgtctgtgcctgtgtgtgtgtgtgatagtcactcttgcatggcttccatgtctggtttgtggcatttggggataaggtgctgaagccagagcatttgcagtttgtttgaggcctcgttgccaatgatagatcactcctgttgacctggtatgtctgcttgcttgctgcttttccttgctttctcttggaagaggaaaggactctggtcaggcccaggctgagtgagatgagctgcagctggctcatggccttcttagagcagagagaggagtatgtcattttactaagttcctaaacaaacatttatgcaggcaacactccttgcagatccagaaactgaggcacaatagggttatgacttgctcaagaatatgtagctgctagggggtaaatcaaggcatcacaatttctgttcagcgggcaggaataggctgtgaattgctagcactttttttttttaagcaattactttttgacttgttcctctgaaagtgcaagaggcgtacacctttcccaaatgtagactagaatctgcaggatgccacccactgtatagttctgctttcccagagaggaagaacttttagaaaccaaatgatcttaattgttattgcccacccctggcttttccgggtagaaaattcacagtaggaatgattgttaagagagagtgcttggaaccatgggttaacaggaaaggctacctaacttcacatatctgcaaccagagcagccaccaagcattacttagcagcaggaaaatgattgtatttgagttcctgtgtgtccaaaactgaggcaccatgttctttgaaaacatgccacctcaaggctgggcgcggtggctcacacctgtaatcccagcactttgggaggccgaggcgggcggatcaccggaggtcgggagtttgagaccagcctgaccaacatggagaaaccccatctctactaaaaatacaaaattagccgggcgtggtggcatgcgcctataatctcagctacttgggaggctgaggcaggagaattgcttgaacccaggaggcggaggttgcggtgagttgagatcgtgccattgcactccggcctgggcaacaacagcaaaactccgtctcaaaaaaaaaaaaaaaaaaa

SEQ ID NO: 23238 - DNA, 1542 bp, Homo Sapiens
ctgacgtcagcgggagagtattatggtctgtcgtgcgctggctgctgcttttctgctcctggaagcggcctaggggggaagcggcgagtcaacatggagctttcagcggtgggggagcgggtgttcgcggccgaagccctcctgaagcggcgcatacggaaaggacgcatggaatacctcgtgaaatggaagggatggtcgcagaagtacagcacatgggaaccggaggaaaacatcctggatgctcgcttgctcgcagcctttgaggaaagggaaagagagatggagctctatggccccaaaaagcgtggacccaagcccaaaaccttcctcctcaaagcgcaggccaaggcaaaggccaaaacttacgagtttcgaagtgactcagccaggggcatccggatcccctaccctggccgctcgccccaggacctggcctccacttcccgggcccgggagggccttcgaaacatgggtttgtccccgccagcgagcagcaccagcaccagcagcacctgccgcgcagaggcccctcgggaccgggaccgagaccgggatagggaccgggagcgggatcgagaaagggagagggagcgagagagggagcgggaacgtgagagggaacgagagcggggtaccagcagagtggatgacaagcccagctcaccgggggacagctcgaagaagcgaggccccaagccccggaaggagctcccggacccctcacagaggcccttaggcgaacccagcgccggcctcggagagtacctcaagggcaggaagctggacgacaccccttccggggcaggaaagtttccagccggccacagtgtgatccagctggcccgaagacaggactcggacctggtgcagtgtggtgtgaccagccctagctcagctgaggccacgggcaaactggctgtggacaccttcccggccagggtgataaagcacagggctgccttcctggaggccaaaggccagggtgccctagatcccaatggcacccgggtccgacatggctcaggcccccccagctctggggggggcctgtaccgggacatgggggcccaggggggaaggccctccctcatcgccaggatccctgtggccagaatcctgggggacccggaggaagagtcctggagcccctccctgactaacctggagaaggtggtggtcacggacgtgacctcaaactttttgaccgtcaccattaaggaaagtaacacggaccaaggcttttttaaagagaaaagatgaatgctgggtgggtgtgtccaggaggagagcaggggagagagtgagcgtgagcttggcatagtgatttttatttctgggtgggatgtggccttttggctggtcccgtccctgatgtcacccccaccccaccagcccctttcatccctccttcctccccctcagtttttgttggaaagattatctctagagttatattttctattagatgtaaatatgttatttaagaaaaatatctaaatatatatatttcaactcgaaaaaaaaaaaaaaaaactcgag

SEQ ID NO: 23239 - DNA, 1866 bp, Homo Sapiens
atgtcaccggtctttcccatgttaacagttctgaccatgttttattatatatgccttcggcgccgagccaggacagctacaagaggagaaatgatgaacacccatagagctatagaatcaaacagccagacttcccctctcaatgcagaggtagtccagtatgccaaagaagtagtggatttcagttcccattatggaagtgagaatagtatgtcctatactatgtggaatttggctggtgtaccaaatgtattcccaagttctggtgactttactcagacagctgtgtttcgaacttatgggacatggtgggatcagtgtcctagtgcttccttgccattcaagaggacgccacctaattttcagagccaggactatgtggaacttacttttgaacaacaggtgtatcctacagctgtacatgttctagaaacctatcatcccggagcagtcattagaattctcgcttgttctgcaaatccttattccccaaatccaccagctgaagtaagatgggagattctttggtcagagagacctacgaaggtgaatgcttcccaagctcgccagtttaaaccttgtattaagcagataaatttccccacaaatcttatacgactggaagtaaatagttctcttctggaatattacactgaattagatgcagttgtgctacatggtgtgaaggacaagccagtgctttctctcaagacttcacttattgacatgaatgatatagaagatgatgcctatgcagaaaaggatggttgtggaatggacagtcttaacaaaaagtttagcagtgctgtcctcggggaagggccaaataatgggtattttgataaactaccttatgagcttattcagctgattctgaatcatcttacactaccagacctgtgtagattagcacagacttgcaaactactgagccagcattgctgtgatcctctgcaatacatccacctcaatctgcaaccatactgggcaaaactagatgacacttctctggaatttctacagtctcgctgcactcttgtccagtggcttaatttatcttggactggcaatagaggcttcatctctgttgcaggatttagcaggtttctgaaggtttgtggatccgaattagtacgccttgaattgtcttgcagccactttcttaatgaaacttgcttagaagttatttctgagatgtgtccaaatctacaggccttaaatctctcctcctgtgataagctaccacctcaagctttcaaccacattgccaagttatgcagccttaaacgacttgttctctatcgaacaaaagtagagcaaacagcactgctcagcattttgaacttctgttcagagcttcagcacctcagtttaggcagttgtgtcatgattgaagactatgatgtgatagctagcatgataggagccaagtgtaaaaaactccggaccctggatctgtggagatgtaagaatattactgagaatggaatagcagaactggcttctgggtgtccactactggaggagcttgaccttggctggtgcccaactctgcagagcagcaccgggtgcttcaccagactggcacaccagctcccaaacttgcaaaaactctttcttacagctaatagatctgtgtgtgacacagacattgatgaattggcatgtaattgtaccaggttacagcagctggacatattaggaacaagaatggtaagtccggcatccttaagaaaactcctggaatcttgtaaagatctttctttacttgatgtgtccttctgttcgcagattgataacagagctgtgctagaactgaatgcaagctttccaaaagtgttcataaaaaagagctttactcagtga

SEQ ID NO: 23240 - DNA, 2669 bp, Homo Sapiens
cgagcggagggagccggggctgggagttctcctgagggaagaggagtggagtaggggggacgcggcggcggcgttgacaatgagttttcttggaggcttttttggtccaatttgtgagatcgatattgttcttaatgatggggaaaccaggaaaatggcagaaatgaaaactgaagatggcaaagtagaaaaacactatctcttctatgacggagaatccgtttcaggaaaggtaaacctagcctttaagcaacctggaaagaggctagaacaccaaggaattagaattgaatttgtaggtcaaattgaacttttcaatgacaagagtaatactcatgaatttgtaaacctagtgaaagaactagccttacctggagaactgactcagagcagaagttatgattttgaatttatgcaagttgaaaagccatatgaatcttacatcggtgccaatgtccgcttgaggtattttcttaaagtgacaatagtgagaagactgacagatttggtaaaagagtatgatcttattgttcaccagcttgccacctatcctgatgttaacaactctattaagatggaagtgggcattgaagattgtctacatatagaatttgaatataataaatcaaagtatcatttaaaggatgtgattgttggaaaaatttacttcttattagtaagaataaaaatacaacatatggagttacagctgatcaaaaaagagatcacaggaattggacccagtaccacaacagaaacagaaacaatcgccaaatatgaaataatggatggtgcaccagtaaaaggtgaatcaattccaataaggctatttttagcaggatatgacccaactccaacaatgagagatgtgaacaaaaaattttcagtaaggtactttttgaatttagtgcttgttgatgaggaagaccggagtagcttcaaacagcaggagataattttatggagaaaagctcctgaaaaactgaggaaacagagaacaaactttcaccagcgatttgaatctccagaatcacaggcatctgccgaacagcctgaaatgtgaactgaacaggagaaaaaaagaaaagcaaaaaactcctgtaacccttgagattaagttcagcaggttaaagatggttgcagctggagggggcggaaaaaggccaaaactccatatatgttagtcttcctttatcttacagcgcacattttattttatgatataatgaaatgttcgttcatgtatatacatttttaaaagtgctttctttgaaacactggaactttgttaagctgcctttttttttttaacttcctactttgatgataagcactcagatatatatcagcgtaaacatggaaaaattttcatgtgagtaggctggtatttgtaattttggctttctttctgcataatgttgattatgaaatcctctcttttcaggctaatgattacctcttattctctacatgcaaaaaaattaaatattttgtgttcaaataaaattagaaaacttgagtggcctcttgtgtcctgcagagatttaaaacatggcatctcaatatttttgagaactacatttgtttttaacatatgtgtttgagaaaagcatatggagtgtttcaccgcaggcacttctgagtaccattccatggcttccagaattttatcctctttgaggtcttctgtgctatgaatattagatttctttccccaagggattatgtggcaggtcattatggccttcttttttttggccatattaagtaacagttttgctatattccagtagtaccgttgtgtgttttctgcaatgtggagttgacttagcttggcattttagatttgttaaaactattttttccataaatactttgaaacatatttatatatttcaatttaagggaatctttttggccatgtgtatggcaaataattattttcttccatacattcattttcttttcaggggaaaattttgggatgggggactcaggaggactgtgaagcatgtagttatctagatctgggtaatttcatgtttattaaactcgaactttggctagttaaactcatattgaaacttcatcgtagtctcttaattttttaacactaaattcaagtcatttgttttaagtctctaaaaaagaagattgcagtcatccattcatatgcatggggtctgatcgcaaatacactaaatgtggagtgtaggaaccaaaatgaaacctgctgtatggaaactactttcacttatggttcattggtttttgtaccaatattttttatgcacttcagtgcaagtcttgtcagttaaccttactttatgagtaagctaaataacccaaattacatttctttaaacctgttttactactatggcactttgataaaatggtcaggaaccaactttactggcaaaagggtccatgtaccaccatgtgctggagcatctgttctacatgtggatatctatgaatggtaatgttttccttcatgtaagtgcctattcagagtttcagaattttaaaatgccaaatattttcatggtcatttgcatgtagtaagccagaaaatattcaaagagattttgaaaaccaattgtatttaaccagcctcaaattgtgcaaccatgatgtataataaagaatttgaaacagaaaaaaaa

SEQ ID NO: 23241 - DNA, 1865 bp, Homo Sapiens
ggtggaggccggcgctccgctccgctccagctcggtttcatgtcccgccaggcgaaggatgacttcctgcggcactacacagtgtcggaccccaggactcaccccaagggctacaccgagtacaaagtaaccgcgcagttcatctcaaagaaggacccagaggatgtcaaagaggtggtggtctggaagcggtacagcgacttccgcaagctgcatggagacctggcctacacccaccgcaacctcttccgccgcctcgaggagttccccgctttcccccgggcccaggtgtttggccggtttgaagcctcagtgatcgaggagcggcgaaagggggcagaggacctgcttcgcttcactgtgcacatacctgcgctcaacaacagcccccagctcaaggagttcttccggggtggggaggtgacccgacccttggaggtgtccagggacctacacatcctgccaccccctctgatccccaccccgccccctgatgacccccggctatcccaactgctccctgcagaaaggaggggcctcgaggaattggaggtgccagtggaccccccaccatccagccctgcccaggaggccctggatctcctctttaactgtgagagcaccgaggaggcatctggttcccctgcccgaggccccctcaccgaggctgagcttgccctcttcgaccccttctccaaggaagaaggcgcagcccccagccccacccatgtggctgagctggcaacgatggaggtggagtctgcaaggctggaccaggaaccctgggagccaggagggcaggaggaggaagaggatggggaaggagggcccacccctgcctacctaagccaggccacagagctcatcacccaggccctgcgggatgagaaggcaggcgcttacgctgctgcactccagggctatcgagacggcgtgcacgtcttgcttcagggagtccccagtgacccgttgcctgcccgccaggaaggtgtgaagaagaaggcagctgagtacctgaagcgggcagaggagatcctgcgcctgcacctgtctcaactcccaccctaacagggagtgggccattccctgggactctcactcctgcactgccagccccttctcctctccccagggcctggccctacctcctggtcttgtaattacaggagccatttctgtaggtaactggaccaagaatgagaaaaataatgaattcttagctccctgattacacctgccaccttggaatccaggactcacacttctgaccctgcctgtctttttggggtttttttgagttggagtctcgctgtgtcgcccagactggagtgcagtggtgggatcacggctcactgcaacctccacctcccaggttcaagcagttctcctgtctcagcctccccagtagctgagattgcaggcacatgccaccacgcccagctaatattttgtattttcagtagggacggggttacaccatgttggccaggctggtctcgaactcctgacctcaagtgatccacccgcctcagtctcccaaagtgctgagattacaggcatgagtcactacgcccggcccatgtctgtctgtcttgatgtgtgagcagcagctgtggtcattaaaccattagtttacccctctagaactggggtctgcaaactcccacctgcagccaaatctggcccacctcctttttaatgtaagggctgtgagagtggtttttactttttttaatgattaaaaaaatcaaaataatattctgtgacaatgacaggtgaaatttatatgtgacaagtgaaaattatatgaaatttaagagtccataaataaaatttgttggaacacaaaaaaaaaaaaaaaaaaa

SEQ ID NO: 23242 - DNA, 892 bp, Homo Sapiens
cagcggcagtggtgctttcccgaatctcagaatgcctgttaaaagatcactgaagttggatggtctgttagaagaaaattcatttgatccttcaaaaatcacaaggaagaaaagtgttataacttattctccaacaactggaacttgtcaaatgagtctatttgcttctcccacaagttctgaagagcaaaagcacagaaatggactatcaaatgaaaagagaaaaaaattgaatcaccccagtttaactgaaagcaaagaatctacaacaaaagacaatgatgaattcatgatgttgctatcaaaagttgagaaattgtcagaagaaatcatggagataatgcaaaatttaagtagtatacaggctttggagggcagtagagagcttgaaaatctcattggaatctcctgtgcatcacatttcttaaaaagagaaatgcagaaaaccaaagaactaatgacaaaagtgaataaacaaaaactgtttgaaaagagtacaggacttcctcacaaagcatcacgtcatcttgacagctatgaattccttaaagccattttaaactgaggcattaagaagaaatgcactcaccatgagcaccaacttctgcatctgcctgatcatatttaaaggaacagagaaatatttgtaattaatctgcccagtaaataccagctcgtagcagttggcaggtgcatgtctagataaaatttcttgcagctaatttaaactttctacacgcaccagtagataatctcaatgtaaataatacatttcttcttggctctttaatgtaagccaacatggagaggaagatcttgacttatattctgtaccacatacacttctgtggacttttagcatttgtgggtagacttaatggccttcgtggcc

SEQ ID NO: 23243 - DNA, 1750 bp, Homo Sapiens
gggggatggaggcggccgtggcgccggggagggatgcgccggcacccgcggcgagtcagcccagcggctgcgggaaacacaactcgccggaaaggaaagtttatatggactataatgcaacgactcccgtggagccagaagttatccaggccatgaccaaggccatgtgggaagcctggggaaatcccagcagcccgtattcagcaggaagaaaggccaaggatattataaatgcagctcgggaaagcctcgcgaagatgataggggggaaacctcaagatataattttcacttccgggggcactgagtcaaataatttagtaatccattctgtggtgaaacatttccacgcaaaccagacctcaaagggacacacaggtgggcaccacagcccagtgaagggggccaagccccatttcattacttcctcggtggaacacgactccatccggctgcccctggagcacctggtggaagaacaagtggcagcggtcacctttgtcccggtgtccaaggtgagcgggcaggcagaggtggacgacatcctcgcggcagtccgcccgaccacacgcctcgtgaccatcatgctggccaacaatgagactggcattgtcatgcctgtccctgaaatcagtcagcgcattaaagccctgaaccaggaacgggtggcagctgggctacctcccatcctcgtgcacacggatgctgcacaggccttggggaagcagcgcgtggatgtggaggacctgggcgtggacttccttacaatcgtggggcacaagttttatggtcccaggattggcgcactttatatacgaggacttggtgaatttacccctctctaccctatgctatttggaggtggacaagaacggaatttcaggccagggacagagaacaccccaatgattgccggccttgggaaggtgagccctggtgagcttgaggagatgagttgattgctttgtcatcagtgtccccagcggctctagtaggaatctggggctttagggagatcatattcgtgatctcataagcggactgacaagaaaagcctggaatctgatttatcaacctggagagctgtactttttcagatctgtggattagtggcacttgtgtagcatttaaaagggaaaaactccttgtctgtgtctcttctgacatgagaaacagtgatactgttacagcagaggtgaagtgtcaagctgcaggttcaccattcccaaaggcgtcggcagcccccgcaccatcgacgttctgtccccgattggtctgtggggtggccaatccagcacctgccaccagccctccactggggcctgtcctgcttctgcgacagtaaccaggctcaggttttgccgtgcgaaggcagaggtactggttacacctcggcgtctgcaggctgctccctcactgtgcggcctctggtcaaaggccaccaccttcaagcaaccctccatgaaccacagctacattggttcccccatgtcccctgctgtcaccctctatccctgacactgctttatttcccctatctgatgtttctctgtagtgtgttcagatgtatgccccaccttctgcttccccgagagcaggggcttgccatgtcggcctcagtatccccagtacagagaaaggcttagcgcccaggaggccgggccttgggaagagtatgaatggattccctgttacttagaatattcaaaattatattattaacagtgataaaaaaaaaaaaaaaaaaaaa

SEQ ID NO: 23244 - DNA, 2239 bp, Homo Sapiens
gacagcctgggcggacagtgcgccgtgcgcaggcgcggagctagacctcgctgcagcccccatcgcctcggggagtctcacccaccgagtccgcccgctggcccgtcagtgctctccccgtcgtttgccctctccagttcccccagtgcctgccctacgcaccccgatggcggagctgcggcctagcggcgcccccggccccaccgcgcccccggcccctggcccgactgcccccccggctttcgcttcgctctttcccccgggactgcacgccatctacggagagtgccgccgcctttaccctgaccagccgaacccgctccaggttaccgctatcgtcaagtactggttgggtggcccagaccccttggactatgttagcatgtacaggaatgtggggagcccttctgctaacatccccgagcactggcactacatcagcttcggcctgagtgatctctatggtgacaacagagtccatgagtttacaggaacagatggacctagtggttttggctttgagttgacctttcgtctgaagagagaaactggggagtctgccccaccaacatggcccgcagagttaatgcagggcttggcacgatacgtgttccagtcagagaacaccttctgcagtggggaccatgtgtcctggcacagccctttggataacagtgagtcaagaattcagcacatgctgctgacagaggacccacagatgcagcccgtgcagacaccctttggggtagttaccttcctccagatcgttggtgtctgcactgaagagctacactcagcccagcagtggaacgggcagggcatcctggagctgctgcggacagtgcctattgctggcggcccctggctgataactgacatgcggaggggagagaccatatttgagatcgatccacacctgcaagagagagttgacaaaggcatcgagacagatggctccaacctgagtggtgtcagtgccaagtgtgcctgggatgacctgagccggccccccgaggatgacgaggacagccggagcatctgcatcggcacacagccccggcgactctctggcaaagacacagagcagatccgggagaccctgaggagaggactcgagatcaacagcaaacctgtccttccaccaatcaaccctcagcggcagaatggtctcccccacgaccgggccccgagccgcaaagacagcctggaaagtgacagctccacggccatcattccccatgagctgattcgcacgcggcagcttgagagcgtacatctgaaattcaaccaggagtccggagccctcattcctctctgcctaaggggcaggctcctgcatggacggcactttacatataaaagtatcacaggtgacatggccatcacgtttgtctccacgggagtggaaggcgcctttgccactgaggagcatccttacgcggctcatggaccctggttacaaattctgttgaccgaagagtttgtagagaaaatgttggaggatttagaagatttgacttctccagaggaattcaaacttcccaaagagtacagctggcctgaaaagaagctgaaggtctccatcctgcctgacgtggtgttcgacagtccgctacactagcctgggctgggccctgcaggggccagcagggagcccagctgctccccagtgacttccagtgtaacagttgtgtcaacgagatctccacaaataaaaggacaagtgtgaggaagactgcgcagtgccaccccgcagcccagtggggtgccatgcacaggccacaggccctccacctcacctccagctcaggggccgcaccccgccgctggctaagccttgtgacccatcaggccagtgagtgggcaaatgcggaccctccctgcctgcagcctgcacagattctggtttgaggtttgactctggaccctggctgtgccctaggtggagacagccttttttctaaccaaccccctgccgcacagcccagcaggagggaggcggacagccagatgcagagggagtggatgcacttcccagctcatttctggaagcctttgctactcaagctcctctggccgcggaacaattcctctgatcatgtttggttttcttcttccttattttattttgtagaaaccgggtggtattttattgctctgcaaagatgtccagaagccaagtatataatgttttttaaacaaaataaaaaaaaaaaaaaaaaaaaaaaaaggaaaaaaa

SEQ ID NO: 23245 - DNA, 1203 bp, Homo Sapiens
catctggtgtattgactgtggccagtcttaaagctagtttttgctatgtggaacatgctgctctaattcagatttaaagagtttcttcctgttaattcgaagctcactgtgcctcttgtttccgagggaagaaggactgattaagtcatctaaatggatgcaatactgaattacaggtcagaagatactgaagattactacacattactgggatgtgatgaactatcttcggttgaacaaatcctggcagaatttaaagtcagagctctggaatgtcacccagacaagcatcctgaaaaccccaaagctgtggagacttttcagaaactgcagaaggcaaaggagattctgaccaatgaagagagtcgagcccgctatgaccactggcgaaggagccagatgtcgatgccattccagcagtgggaagctttgaatgactcagtgaagacgtcaatgcactgggttgtcagaggtaaaaaagacctgatgctggaagaatctgacaagactcataccaccaagatggaaaatgaggaatgtaatgagcaaagagaaagaaagaaagaggagctggcttcaaccgcagagaaaacggagcagaaagaacccaagcccctagagaagtcagtctccccgcaaaattcagattcttcaggttttgcagatgtgaatggttggcaccttcgtttccgctggtccaaggatgctccctcagaactcctgaggaagttcagaaactatgaaatatgaaatatctctgcttcaaaaaatgaggaagagcaagactgtcccctatgctgccaacatgcagtctttgtttatgtcttaaaaatgtcatgtttatgtcatgtctgtgaattgctgagtactaattgattcctccatccttgaatcagttctcataatgctttttaaataagaaaaattcagaagatgaatttcttccaatatttgaataaattaaagctcttagatacagagtagattgtattatatgctttttcctattaatactacttatagaaatccattaaaaagcaatctctgtacagtgtatttaaatatttcattgacatactgtgatctctattagtgatggatgtacaaaaaatgttttcttacccttgacttacaatgaaatgtgaaattacttgtctgaaccccgtggggagaaataaataattttcccaaagttcaaaaaaa

SEQ ID NO: 23246 - DNA, 1988 bp, Homo Sapiens
gtcggtaggctccacgacaaaagtcaacccttctgtaaatcacctgctgtggttatgatgctctgagttcaatacgtctgaacctttgctgtctatggatctgctctaaaccttatagcctgcttatgggggaaggtgacgccttctgggccccatctgtccttcctcacagcaccctcagcaccttaagccaccaccctcagccacaatttggcagaaggatggagtccaaggtctcagaaggtggcctgaatgtgaccctcaccatccgcctgctgatgcatggaaaggaagttggaagcatcatcgggaagaaaggagaaactgtgaagaagatgcgtgaggagagtggtgcaaggatcaacatctcagagggaaactgcccagagaggattgtgaccatcacaggccccacagacgccatcttcaaggcctttgccatgatcgcatacaagtttgaggaggatatcatcaactccatgagcaacagccctgccaccagcaagcccccagtgacgctgaggctggtggtgcctgccagccagtgtgggtccctgatcggcaaaggaggctccaagatcaaggagatcagggagtccacaggtgcccaggtgcaggtggctggggacatgctgcccaactccacggagcgagcggtgaccatctcggggaccccagatgccatcatccagtgcgtcaagcagatctgtgtggtcatgctggagtccccaccgaaaggtgccaccattccctaccgcccaaagcccgcctccacccctgtcatttttgcaggtggtcaggcctacacaatccagggacagtatgccatccctcacccggatcagttgaccaagctccaccagttggccatgcagcaaaccccctttcctcccctcggacagaccaaccccgctttccccggagaaaagctgcctttacactcctccgaagaagctcaaaatctgatgggccagtcatcaggtctggacgccagcccaccggccagcactcatgagctcaccattcccaatgatctaataggctgcataattggacgccaagggaccaaaatcaatgaaattcgacagatgtctggagctcagatcaaaatcgccaacgccacggaagggtcctcagagcgtcagatcaccatcacggggaccccggccaacatcagccttgcccagtatctcatcaacgccaggctgacgtccgaggtcaccgggatgggcacgctgtaatcctacccagcacccttcccccgcgtcacccacctgccagagcctaaggcccccggctctcgcactctgtacagcccaccttccctgcctcacagataccaatagagaggttttcttaattaacaaaaggacgtatgccatggagaaacacacccgcgcacacagctgctctctacagaggctgcaggctccgccgagtcccccctcagtgttattttatttatgacttacgctcccgtctgcccatgcaccggcatgcagtggtaattattttagaaatattgttccttggtgtcagcgtagctgtctgtcttaggagctgggtcggcgttccgacagcacttcctgtccgcccttctcctctgccatccagaaccgtccagaactgttgcctgagacccctcctctctcacacagccctgccatgctgactcggtttcccctcagagccattgttgtctgggctcgagtttctgccccaggttgtgtgctggaatcggggggtggctctcctgccacccatggggagcgccaggagaggagggtcatggaggatgttggggctctgaccccaggagtggggtggagggcggagcctgctggaggccctgccttcacagagatgccgcgtgctgggaaggctcttggggtcccctgagcgtcttccagggtggctggagagcacagacgcgccagggagccccctctgtgctcctcagagttcaataaatgtcgtggcccctcctc

SEQ ID NO: 23247 - DNA, 2313 bp, Homo Sapiens
tcggccatggttttctcaaacaatgatgaaggccttattaacaaaaagttacccaaagaacttctgttaagaatattttccttcttggatatagtaactttgtgccgatgtgcacagatttccaaggcttggaacatcttagccctggatggaagcaactggcaaagaatagatctttttaactttcaaatagatgtagagggtcgagtggtggaaaatatctcgaagcgatgcggtggattcctgaggaagctcagcttgcgaggctgcattggtgttggggattcctccttgaagacctttgcacagaactgccgaaacattgaacatttgaacctcaatggatgcacaaaaatcactgacagcacgtgttatagccttagcagattctgttccaagctgaaacatctggatctgacctcctgtgtgtctattacaaacagctccttgaaggggatcagtgagggctgccgaaacctggagtacctgaacctctcttggtgtgatcagatcacgaaggatggcatcgaggcactggtgcgaggttgtcgaggcctgaaagccctgctcctgaggggctgcacacagttagaagatgaagctctgaaacacattcagaattactgccatgagcttgtgagcctcaacttgcagtcctgctcacgtatcacggatgaaggtgtggtgcagatatgcaggggctgtcaccggctacaggctctctgcctttcgggttgcagcaacctcacagatgcctctcttacagccctgggtttgaactgtccgcgactgcaaattttggaggctgcccgatgctcccatttgactgacgcaggttttacacttttagctcggaattgccacgaattggagaagatggatcttgaagaatgcatcctgataaccgacagcacactcatccagctctccattcactgtcctaaactgcaagccctgagcctgtcccactgtgaactcatcacagatgatgggatcctgcacctgagcaacagtacctgtggccatgagaggctgcgggtactggagttggacaactgcctcctcatcactgatgtggccctggaacacctagagaactgccgaggcctggagcgcctcgagctgtacgactgccagcaggttacccgtgcaggcatcaagcggatgcgggctcagctccctcatgtcaaagtccacgcctactttgctcccgtcaccccaccgacagcagtggcaggaagtggacagcgactgtgcaggtgctgtgtcattctctgacagcagctgcctgggcccaaggggtgatgaggcatcctttcctctagaagacctgagtcttcctgaccgactccaccatcacccaatctgttgattctccattgggaaaggcatttacaggtaaaagacttctgtatggattgcagttactctggtgatagttttcacctttattctgctgtgaaacaatcaaatcaaagccttgtgtcagttaacacatgacaagtggtctcaatgcagctaggaccatgccagaaacctggatctcttaagagattggtacctacctaggtacgaaagttctacccttggcatactcagcattcctcaaaaagaccatcagtgttagcacaaactgagcagaaaaaataagctgttgattttctacctgatacttaagccagtggcctactttaattcacaattccattttgattagcaggacttttccactttgaagataaatagcaactttatcaaagtgactgtactgcaaattaattcataatgcctgatagttttatatatagagacttatgtggaaggcatgttaataggtttccatgagacaccaaagaaaagaggactctatactgggtggagcagggtcttcacctttttgtttctgtcaacttgtcatatacacctccagggaccaaaaacaaaagcagctcggagtctgtgttgcctgattggaaagtagaagctctggtgtatgctacagcacataacacatttttactaaaggaaaaaagctaattatgtccatgcctctcgtaaaactggggggaaccttaaagagaaagaactaaggcttaagttatctgtagtataatcaattagaagtaatgaatggatgcatgtaaaatggatgtgattttttttcaagcttattttgaaatcttaaaaatcaggttacaccatagctactcaaaagttttacacacttaaaactcagatcagtaagtgttggtaccttttagactcataaaattgaataaaccattgcaatgctttaaaaaaaaaaaaaaaaaa

SEQ ID NO: 23248 - DNA, 9923 bp, Homo Sapiens
gcttgcttgcccggctcgctcacgggtcgttgaggccggtgacatgtctgtgagctgcggaggctgcggcccccagatctttctctttgacactttgcaataaaaaagggcagtgagattgaataggtgttttgtggattaactcttcattgattatatacaacaaaaaatagttatggcgactttcagaaacaatcacatgaagactaaagcatctgtcagaaaaagcttcagtgaagatgtgttccagtctgtaaagtctttattgcagagtcagaaggaactatgcagtgtaacagcagaggactgtttacagcaggatgagcatgccaatttaactgaggtcacatttctgggttttaatgaagagacagatgctgctcatatacaggatttagctgcagtttctttggaacttccagatattctgaattcactccacttctgcagtctaaatgaaaatgaaattatttgtatgaagaatataaataaaccattagatataagcagtgatcctctaaatcagagtcatccttctggaatgctttgtgtcatgagagtgtcacctacatcaccaagacttaggattgattttatctttagtctcctaagtaaatatgctactggtataaggtacaccttggacacattcttgcatcagaagcaccaacttgagaccactgatgaagatgatgatgatactaaccagtctgtgtcatccatagaggatgactttgtcactgcttttgagcacttagaagaggaagagacttcaaagccatacaatgatggaatgaacattactgtgctaaggagccagtgtgatgctgcttcccagacggttactggtcatcatttagaaacccatgatttaaagattctcattagctctggacagcagaagtcattggctaaaccctcaacttcctcagtgaatgtcctgggacataaagaactaccttctgtgaaaacttcagtcacaacatcaatttcagagccttggacccaaaggagtttctataggtcatctaatgcttcagataaagatagtgatttacagaaaacatttttttcgtcttctcctgcctactcatctgaatcagaatgttcaagtccaagtcctgttattttcttggatgaagagggatatcaaaaaagcttaaaagcaaaacttgagctgcctaaaattcctgtgatgaaagatgatatagaggattcagactcagaagtaagtgaattttttgatagttttgatcagtttgatgaactagaacaaactttagagacttgcctgtttaacaaagatcccgtcatagggaagtcatcgcagaggaaagggcacaaacatggaaagtcatgtatgaatcctcaaaaattcaagtttgatcgtccagctctcccagctaatgttagaaagccaactcctcgtaaaccagaatctccatatggtaacctgtgtgatgctccggattctcctcgcccagtgaaggcatcaagggaagatagtggtttatttagtcctattcgatcctctgcttttagtcctcttggaggctgtactccagctgaatgtttttgccaaacagatattggtggagataggattcatgaaaatcatgattctgtttattacacctatgaagactatgcaaaaagcatttcatgtgaagtactaggctcagttcttcgtacccaccatactaataccctatcaaatattaacagtattaaacatggagaaaataaaactgtaacttttaagcatggaaaccttgatcaaaaaaataaatctaaaaataaatccttaatgattaaagatagcattcaaaaatttgcagcagatcttgtggaaaaaagttttggcagtgcatttaaagacttacagaaaggagtctcttcatgtaccaatgctttgtaccacttagccatcaaattgacatcatctgttttgcagatggcatttgatgagctgagaaggcagcgtgcattttcactaaaagaacgtgccattagtggcctggctaactttttggtgagtgaagctttatcaaatgccttaaaagatttacagtatgtaaagaagcagatattcacaaacacagttgctaggtttgctgcagatcttgctgaagagcttgtttttgaaggcatcatggaggtgtgtcagttttcatatcctcaaacgcctgcatctccacagtgtgggtcgtttgactttgaagacaaagtagtgaagttgtatgcaaaagatttgtctgaatctgtaatacaggaagcattcattgagctatcacaagttgatgtgacctttacaacaaaggcagcagttagtgtctctacggataatatcaagtatgtgagtgcagaaagtgtagtgccatcgacacaggctgtcacgttttccccttcttttcacaatcaagcaattatggtgacaaaaccagtgcaggaatataaaaaggaatacacagtgcagcaggccttgttttgtacttctggaattgttacttctataccggtgcccttggcaggaagtgcccttctcccatatcatatttcatctactgcatgtcaggccaaggctcatctgtcatctgatgatagtaattcaaatggtgattctgcccaagtgcatattgccacaaaaaacagagaagaaaaagcagcttgtctcagaaatatttgtttaccttcagaacacaatccaggtaatcagaatgattttaaaccaactaatgacgatattgaaatgcagagttcctcaaaattaccaaatgatcctgcaattattagcaacttttctgcagcagtggtgcatacgatagtaaatgaaactttagagtcaatgacatcattggaagttacaaaaatggttgatgaacgtacagattatttaactaaatctttaaaggagaaaacccctccattttcccactgtgatcaggcagtgctgcaatgcagtgaagctagtagcaataaggacatgtttgctgaccggttatctaaatctattattaaacattccatagataagagcaaatcagtgatcccaaatatagataaaaatgcagtatacaaggaaagcttgcctgtttctggagaagaatcacagttgacaccagaaaagtctcccaaatttcctgactctcagaatcagttaactcactgctcactttcagctgcaaaggattgtgttccagaatgtaaagtttctatggttcatggatcctccctagagacactgccatcttgtccagctgtgacaggtcagaaatctgacttgaaggaatctgctaaggatcaaccactgaaaaagcataacttgaatagtacatcacttgaggccttgtcttttggacaggaaaacccctttcctcattcacatactttctcatctacagcacttacctgtgtagatggtttgcatgtggaagataaacagaaagtcagagacagaaatgtaatacctgatactcctccatcaactcctctagtaccatcccgggctagttctgaatgggatatcaagaagttaactaaaaagctcaagggagaattagccaaagagtttgcacctgctacaccaccttctactccacacaactcatctgttggtagtttgtctgagaatgaacaaaatactatagaaaaagaagagttcatgttgaaactcatgcgatctctttctgaagaagttgagagtagtgaaagtggagagctcccagaagtggatgtgaagtcggagcactcagggaagaaggttcagtttgcagaagcattagctacacacatcctttctcttgcaactgaaatggcagcttcccatttagataacaaaataattcaagaacccaaggttaaaaacccttgcttaaatgtgcaaagtcaaagaagtgtgtcgcctacttttttaaacccctcagacgaaaatttgaaaacattatgcaattttgcgggtgatctggcagcagaagtcattacagaagctgagaaaatagcaaaagtccgaaattgtatgcttttcaagcaaaagaagaacagttgttatgctgatggtgacgaagattataaagtagaagagaagttggatatagaggctgtagtgcacccaagagaagtggatccgtttattctttcattaccaccaagttcttgtatgtcaggtctgatgtataagtatcccagctgtgaaagtgtgacagatgaatatgcaggtcaccttattcagatactaaaacaggaaggtggtaatagtgagttgataatggatcagtatgccaataggcttgcctaccgatctgttaaatcaggattacaggaagcagctaagacaaccaaagtgcagtgcaactcaagaatgttccctgtgccaagttcacaagtgaaaacaaacaaggaactgttaatgttttcaaacaaagagcaccaccaagaagcagacaaaaagagacaaagtaaaagaaatgaaggttacttttgtaaaaatcaaacttgtgaaaggaccctggatccatatagaaatgaggtctcccaactgtatagtttttcaacctctctcgttcacagcataacaaaagatgctaaggaagagttgacagcctctctagttggcctaccaaaatccttaacagattcttgcttgtttgaaaaatctggatatgaagaagataatgagtgtcacgttacaccagaattgcctaagtctcttcagccttcctcacaaaatcacaggttttaccacagcactggcagtttaaatggatatggttgtggagacaatgttgttcaagctgtagaacagtatgccaaaaaagtagtggatgacactctagagctaactctaggatctacagtgttccgagtgtctgagaccacaaaatcagcagacagggtcacttatgcagaaaagttgtcacctcttacaggtcaagcttgcagatactgtgaccttaaagaactccacaattgcactggaaattcatctcagcactttttcagacagggttctctcgccagtagtaagccagcttctaatccaaaatttagcagccgctatcagaaatctaggatttttcatctcagtgtccctcagattcatgttaatcttgataagaaggcagtgcttgctgagaagatagttgctgaagccattgaaaaagctgagcgagagctgagcagtaccagcctggcagccgacagtgggatcggacaggagggtgccagctttgctgaaagccttgccacagaaaccatgacagcagctgtcacaaatgttgggcatgctgttagcagttcaaaagaaatagaagactttcagtcaactgagtctgtcagtagccagcagatgaacctcagtattggtgatgacagcactggtagctggtccaatttaagttttgaagatgaacaccaagatgaaagcagcagttttcatcatctaagtgaaagtaatggtaacagcagtagctggagcagtcttggtttagaaggagatttgtatgaggacaatttatcctttccaacatcagacagtgatggaccagatgataaagatgaagagcatgaggacgaagtagaaggtttggggcaagatggaaagacactgctaattacgaatattgacatggagccatgcacggtagacccccagctaaggattattcttcagtggctcattgcctctgaggctgaagttgcagaactttattttcatgactctgcaaataaggagtttatgctactttcaaaacaattacaagagaaaggatggaaagtgggagacctcctgcaggctgtgcttcaatactatgaagtgatggaaaaagcttccagtgaggagagatgcaagtcgctgtttgattggctcttggaaaatgcatagagcaaaccccaaaccagtatattttagtatttgtttggggaggggaacaagccaataaagatgtttaggataaaatttgaatagtgaatattaacatcgtaagtcagttgggaggcaagtaaatatagctttctgagcgctttgtgttatcactcggtgtatatagttcatacttttgtaatctgtcaaaatactaccttcatttattcttctatacacatgtgtagtgtgtcaagaccctaagaacatgtatttgaaggaaggtctaaccagggggttttcaggggcattgtctgaccacattctttttgtatccaaatagtgctgctagaaactgcactgaagtggctgaggataggttccagtgatagagttataattttgctcctttgcaaacaaatggtatctaattaataactagtctgacatcagaaaataaaattgaggctgatttttaaaaatttctagtagatttttggcctttctttcctgtttttaaaaatcagtttcattttcatatttcatagatcagctattggtagctttttgatttccccaaactatttaatttcttagcagaaacattagtattttaggtttctataaacactataagtgatagtttcccccatcctttcattgacattatttgccaatgctgccagtcattctggcatgaaaggtgtgtgtgtgtgtgtgtgtgtgtgtgtgtgtgtgtgtgtgtgtgtgtgtgtaagggagtactttaaccttgccagtttgttccctcttttattttactgttttctttttagaaacccactgttaaaatttaaaaaggtgctttaaaataaaacgcctataaagattgtgcagtaagaatttttattgacaataattaaaattttttttgacaattttgggttcccaacttatcttacaagtgaaaacttaaattgtaaaacatgttgaaattttaaaaattaatgttaatatggaaatgcatttagagaagcccagtagtttttattgttggatttttgaaaaaacctctaccaagaatgtggtgttttttttttttgtttgtttgttcgttttagaaaaattgggatttccccccaccccgccccacccagataaactatatctacactgtctcgtcaagttctctgacacgatctttctgggctctacatttcctactagtttgtgtccagaaactgcaagttgacatgaatagaggacaaaggttgtgtcttgcttttgtctctctcttccctccctgcaactctctctcccctcctcccactctcttccccctcccccctcctcccactgtctctcacctcccccaccccccactctctctcatctctcgctgtgtcctgtgtatgtgtgggtgtgtgtgtatttgggtgtgtaaatgttggttcttccactactggattttgtaatctaggataaatcactttttttggggactttgattttgctccattacgttttcattttttctgagcactgactgttctgaaagctgcacaaaacgtagaaagaagacatagcgcctgccagggaataggaaatgagggcacttacacattaatgtgaattagtaattgtggtatagaaatgttttatagtgaaagattcaaatttgcttttcaaaaaatgccaaaagctatttaaataattcgaggttacatcgtaggttttgatttttctcaatttaagatacagaaatacagcaagccttaatataaagtttcctaaagtttcttcaagtattttttaaggtggagaaatgcaggaattgtataaccagaattgttcctgcctttagcttttcagaacttgagatgtggcagcactggactgggtttttttaaatgttaggactaggaatgtttgctcttgttaattatgaattaattgattattaagtttagaatgcatttttacaagtatctaactatcaaattgtgtttagtaacttgagtgtatgcacaagtttgatcaacagcaaaatagagttctgaatttcttttaaagtgatgatatattattttgtgaaactttgtgtttgaaaatgtttatttctgtttatggtgtaatcattctgaggtgaggcttttcttatttcctttgcattttgctagagctgtgctgagttcagcatttgcttatttaaccactacataatgacagaccagttattaggtattagcatgtgtggtaataataatagtggaacttcacacttacatcaattcagtgcaggggcatagaataaaatattaaatattggcagatgtatgaaaagaagtgtgagttaaaaatattgaatattggcaggtgtgaaaacaagtgtcaaaattcctcatatagagaaaataattttgagtttagagtattatcttttaattaagtgtagtctaaacttaactttctgtaaaggcactttgtggtttttccaaagatgttctagatctatttggttgctctatagtcaaacagctcttttgaagacaactgtcttattttattacaaattggcttgacatatttatactgtaacattgtaatattgctgtgctgtacattttggcccttacgaaatacgtctttttcagaactgttaaagttttgatgtacatcgagctgaattctgtttttaccagtttcaaaaccttcaagtgatatgtggaaaaaagtgaatgagacctctgatagggggttttcagaaccttgttcacaccaaaatgtgacagttctttcatgttttcctaaaccaagttaaaattacatgtatattttggtgttaaggttgatttttaagatacttctgatttgtacaaaaggaatgtttcctttataaatcacagaagaaaatgacaatatctgttggatatttgatataatttaatggtgttataaaacctttaagaggattcatggtgaatatatgtgataacatctttatactttgaaaaatgttccacttacccttcagatatttgttgtaagttaattcaattcttaatactttaattttgctccaacaagggctttatgttgctggtaagagaatttatttactaaatgcactatgtataaagtgaaagatagtttacttatctgactttgatattagatggctgacattagtgcacataatgcagagtttaaccttgattcttcaacagagtccagatttaaatgtctacttagttaattagttagctgatattcttccacaattaatatattcaatttcccatcagtatatcactttaaattttatgtttttctaaggaaactttccacagaattttaaacaactgatgcatccatactcagggtgtagggagaatactttgcatttaaaaaccctgtccacctgtcaccagcacaagagaattagagcttcagtgagaatttagaaaaattatactaaagtgagatgcattttttctcattttcagcaagactcctctaagcatttactcatttactgtattcctgctctgaagatgtggatacagaattagtcactcttgtcactttatttatttattggtttttttttaaccatctgtgtacattcctttcatagggtagagttctagttctagaagttcttattttgtttttgttgtaatgtttgaatactatttaatatccggttttaatattgctggatttgctacctttggttacttgtgcagtgttaaaagtaatccactttcttgtttaatataccagatacatagcaaaagcagcttggaataattatagctgtttatttggctgtgctcagttactatattaagatcttgtactgtgtaacagtaactcttttttgcttttcagtaatttaatatgttcacttaacaaaatacgaactttgagatgcactaaagttttgtttcagcagtggctcaaaaaatttcagaaattacttttgtaattatttgcaattaattgttcttttatcttacaattgtttaagcctgtgatctttcttctcccagctaagagttcttcaataaatttaagaaat

SEQ ID NO: 23249 - DNA, 1130 bp, Homo Sapiens
ctggagcagaagtgtttgcggccagagctcccagacccctacccacagccaggcgggacgcgcacagtccctccacgcggaaagaagtaccttcgccggtcaccggctcctgcagggtgcaaatatatacagagcttcataatcagcccaagaccacatagagcaaacatgaatgatatttcccaaaaggctgagattaaagaaatgcttgcttctgatgatgaggaagatgtatcttctaaagtagaaaaggcttatgttccaaaattaacaggaactgtgaagggtagatttgctgaaatggagaaacaaagacaagaggaacaaaggaagagaacggaggaggaacgaaaacgcagaattgagcaggatatgttagaaaagaggaaaatacagcgtgaattagcaaaaagggctgaacagattgaggacataaacaatacgggaactgaatcagcatcagaggaaggagatgattcactacttataactgtggtacctgtcaaatcatataaaacatctggaaaaatgaaaaagaattttgaggatctagaaaaagaacgtgaagagaaagaaaggatcaagtacgaggaagataaaagaataagatatgaagaacaacgaccatctctcaaggaagcaaagtgtctttcattagttatggatgatgaaatagaaagtgaagcaaaaaaagaatcactttctcccagaaaattgaaactaacttttgaagaactggagcgacaaagacaagaaaaccgaaagaagcaagctgaagaggaagcaagaaaacgtttagaagaagagaagcgtgcttttgaagaagcaaggcggcaaatggtaaatgaagatgaggaaaaccaagacacagcaaaaatttttaaagggtaccgccctggtaaactcaaactcagttttgaagaaatggaaaggcaaagaagagaagatgaaaaaagggaagcagaagaagaagccagaaggagaatagagggagaaaagaaggcgtttgctgaagcaaggagaaatatggtagtagatgatgacttcccaaagatgtattagacaatctctcaagaatttcttacaccggaactgaatattgagatattaacaaaaaaaaaaaaaaaaaa

SEQ ID NO: 23250 - DNA, 2170 bp, Homo Sapiens
ggctcgagagttatacgtgaacggagacctgaggctgcagcagaagcagccgctgagctgtggtggcctagatgcccgatacaacatatccgtgatcaacgggaccagcccctttgcctatgactacgacctcacccatattgttgctgcctaccaggagaggaacgaaagctcccagtgaggaactggtcttctggagactctgtgtggcatagagtgattcaaccaccttaagaagacctctggctttcctggaacacagatgtcgagacatctcccatggatttgtgatcagcgttgcagctctcccagcagccctggacggtggcccccagccgcccgcatgtggctgccacggttctccagcaagacagtgacagtgctcctcctggcacagaccacctgcctcctgctcttcatcatctcccggccagggccctcatccccagccggcggcgaggatcgtgtgcacgtgctggtgctgtcctcgtggcgctcgggctcatccttcttgggccagctcttcagccagcaccccgacgtcttctacctgatggagcccgcgtggcatgtgtggaccaccctgtcgcagggcagcgcggcaacgctgcacatggccgtgcgcgacctgatgcgctctatctttttgtgcgacatggacgtgtttgatgcctacatgccacagagccgaaacctgtccgcctttttcaactgggcaacgagccgcgcgctgtgctcgccgcccgcctgcagcgcctttccccgaggcaccatcagcaagcaggacgtatgcaagacactgtgcacgcggcagccattcagcctggcccgggaggcctgccgctcctacagccacgtggtgctcaaggaggtgcgcttcttcaacctgcaggtgctctacccgctgctcagcgaccccgcgctcaacctgcgcatcgtgcacctggtgcgcgacccgcgggccgtgctgcgctcccgggaggcggcgggcccgatactggcacgcgacaacggcatcgtgctgggcaccaacggcaagtgggtggaggccgaccctcacctgcgcctgattcgcgaggtgtgccgcagccacgtgcgcatcgccgaggccgccacactcaagccgccacccttcctgcgcggccgctaccgcctggtgcgcttcgaggacctggcgcgggagccgctggcagagatccgcgcactctacgccttcaccggcctgaccctcacgccacagctcgaggcctggatccacaacatcacccacgggtcggggatcggcaagccaatcgaggccttccatacttcgtctaggaatgcgcgcaacgtctcccaggcctggcgccacgcgttgcccttcactaagatcctgcgcgtgcaggaggtgtgcgccggcgcgctgcagctgctgggctaccggcctgtgtactctgcggaccagcagcgtgacctcaccctggatctggtgctgccacgaggcccagaccacttcagctgggcatcgcctgactgagaactctgggccttagagcaagccccgaactgtggtcgccaggcccaggaggcgactgcatggtggagagggagctggggcgcatggggaagcaggtccctactatcaaccgggagtttggggtcctcccctgaagtaggcaaggactgcacgtttctttctctcctgattctcggttttcctttgagtcttctggagctgccttctcatcaggtgcactcttcatggaaagcaactcttgcccctacctcttctgggcgcagggagtaagttactgctaaattaaattaaatgtgtgccaggccgggtgcggtggctcatgcctgtaatcccagcattttgagaggctgaggcgggtggatcacctgaggtcaggattcaaaaccagcctggccaacatagtgaaaccccctctctactaaaaatgcaaaaattagtccggcgtggtggcacactcctgtaatcccagctacttaggaggctgaggtgggagaatcacttggactccaaaggtggaggttgcagtaagctgaaatcatgccactgcaccctagcttgggtggcaaagcaaaactctatcaaaaaaataattaataaatttgttcaaaagtcctgccgaaaaaaaaaaaaaaaaaaaaaaaaaaaaaaaaaaaa

SEQ ID NO: 23251 - DNA, 1462 bp, Homo Sapiens
ggacttctgctgtgagcacagactatattctggcctatgtcttgactccgtattcctgggaaagtgctcgactgagaccttgggagtcttgggaagtccaatgggtagggtagccgaatctgagggctgatccctgagggcactgggcagtaattggggcatgggatgggcatgagggcccgggtccctaaagttgcccactccacccgaaggcccccagccgcccgcatgtggctgccacggttctccagcaagacagtgacagtgctcctcctggcacagaccacctgcctcctgctcttcatcatctcccggccagggccctcatccccagccggcggcgaggatcgtgtgcacgtgctggtgctgtcctcgtggcgctcgggctcatccttcttgggccagctcttcagccagcaccccgacgtcttctacctgatggagcccgcgtggcatgtgtggaccaccctgtcgcagggcagcgcggcaacgctgcacatggccgtgcgcgacctgatgcgctctatctttttgtgcgacatggacgtgtttgatgcctacatgccacagagccgaaacctgtccgcctttttcaactgggcaacgagccgcgcgctgtgctcgccgcccgcctgcagcgcctttccccgaggcaccatcagcaagcaggacgtatgcaagacactgtgcacgcggcagccattcagcctggcccgggaggcctgccgctcctacagccacgtggtgctcaaggaggtgcgcttcttcaacctgcaggtgctctacccgctgctcagcgaccccgcgctcaacctgcgcatcgtgcacctggtgcgcgacccgcgggccgtgctgcgctcccgggaggcggcgggcccgatactggcacgcgacaacggcatcgtgctgggcaccaacggcaagtgggtggaggccgaccctcacctgcgcctgattcgcgaggtgtgccgcagccacgtgcgcatcgccgaggccgccacactcaagccgccacccttcctgcgcggccgctaccgcctggtgcgcttcgaggacctggcgcgggagccgctggcagagatccgcgcactctacgccttcaccggcctgaccctcacgccacagctcgaggcctggatccacaacatcacccacgggtcggggatcggcaagccaatcgaggccttccatacttcgtctaggaatgcgcgcaacgtctcccaggcctggcgccacgcgttgcccttcactaagatcctgcgcgtgcaggaggtgtgcgccggcgcgctgcagctgctgggctaccggcctgtgtactctgcggaccagcagcgtgacctcaccctggatctggtgctgccacgaggcccagaccacttcagctgggcatcgcctgactgagaactctgggccttagagcaggccccgaactgtggtcgccaggcccaggaggcgactgcat

SEQ ID NO: 23252 - DNA, 5087 bp, Homo Sapiens
aacctgcgagtgggcctggcggatgggattattaaagcttcgccggagccgcggctcgccctcccactccgccagcctccgggagaggagccgcacccggccggcccagccccagccccatggacctccgagcaggttgaaaacccaaactagccctgctcttcataacatgacaagcagcgccccatctgatacctaaaccgaccaagtcacagccctccaactcaccctctgcctgcccagacctcaccacatccttgtggactcaaacctcaaccgcactaaatcaaccaaatcccaagtctaaactaatctgaaacttttaaagtaacccagtccttaaacctaacctagcccaatgccaattatatctaccctagccaaaccctaactgcctttgccagtccaaagtgtccactgaatcctcaccttggtcctcactgaaaatcccagaaaagcatatttccccactgcccacatccctccttacagcacccaaccctggcctctggactcctggtatcctgggatgtccaaactctgcagtgccatcagccaacaagcccgactcgtcaaatgcacctctctcccttcctgtccccacccttgcaggctgatggaaaggcctcattgaagtccaacttttccccacctaacaccaagaacggggtgaacctccacactgccaccgttccctgagagtgagcactaaatctccttcaatctaaccccaccctacacttcccacactcaggaatcacatcctagaatatacccaaaactaagccccataaggcagcccgaccctagtggtctaaccctataccttgcttcctatgggtgagtctgttcttggcggccgcctctctcctgcttcctcccttagagctgactgtgctcagcctgccagctctgacatgtgctgtctcccaccctctgactcccctcaagctgcagtgggactggaagactggcaggaagctagggtacaactggaacacaggcaggtcgacctgcagtccctaggcctggccccgtccctccatgtacacacatatacatgttggcacacacacagtggcacacatgccaaagactctctcagctgacacacagatccattctcaagtatctactgatagacactcatgcgtgccaagtcctcatcctcaaacatacacatgcctctctttctctcccgtcttgccaggagtgtttcccctcctccatcccctctgcctcccatctggtgtcccaccctcaccccccacccagcccaaggtggggacagacacctgaggggctgccagctgcttccccgtgtgggcccgggccgcgctcatgcttctcgtccatcctgcccacaggggactcgtgggggatgttagcgtgcctgtgcacggtgctctggcacctccctgcagtgccagctctcaatcgcacaggggacccagggcctggcccctccatccagaaaacctatgacctcacccgctacctggagcaccaactccgcagcttggctgggacctatgtgagtatccagcgtaggaatctgggagttggggaggagtgaggagttggggaaagacagtcctaaccgtggagggttctggtaaatgatggggtgaggaggggctctttggctcccaccagtccccctgtctggtctatctcctgcccttccctcttaggtggcccccccacttccccatccctggccccaggactaggcatgtgggcaggcctcgcacccgccttggcccattgccccactggctgccagcccagccgcccgcctccccctgggggccggggaagtctcctctgtttacaccgtgttgtggtgtctcttgcgcgggcggggttgggtggggacagaggggccccacctcccatgcctgcgttccagctcgcctctgcccccagacctggggccctgctgctctggacccaggggcctcccttccgtctgcctctcccatcctagctgggcctcctaggggggtcatgggggaaggggactgtagggaacccaggcagtagtggcagggggtttagggtgtggatggaggttatgctgtaaggatttgggggtggtccagaggtgttcagagagcccaggagagaaggaaggagggttggaggagccgaggcaccatggggaaccggccccctcttcccgtgttcctcttccacatcccagaccctactctggagccagggaaagaaaagggaagaaggtggcgggggagctggctccagccccaggatacaccgaggaaattagtttgtctctgtgcttgtcagcgtgtgaacctccccctgggcccttgcctatcccaggcctctccccttgcttctcccttctttcccagttatacatctccctcatccctttccctgggccccagccgctcccccgagggttggaaagggctctgccctcttccctataccatgctgtcttccatagccttcctcctgtcctactcatgagactgcctccatttcttccttctgcaaccctgctcctatcagctgaacccttctttcggagtgttagtgagtacccgtctctccccagcccctcagctggtgggcctgggtgtgtcagcggcaaatggggctctggttccaatgggccactctcatctctctcttgttccttgtgcagaaaacctttgcttcactccactgccctctctagttcccgaccctttttctctcctggctttccctgccaaatttctccaaggagtggtctacaccctctgcctccacttcctctccacccactcacttcttaaccccctgcaatctggcttccaggccccagcaatggttctctccaaggtcgtcaggcacctccttgccaagcccgacagtgttttgaaggctcattctccttgctgtctgttttgcagccacactgctgagcgctgctgccttctcgaactcctcttccttggtctctgcactctcctgggccaccttctacctctccagctcctccaggctcctcttcctctctgtcctgcccccacagcgggcactctcccaaggtttgcccacccagccaatcagcacgtccttcctgagcgtcttgtgcgtctcctcctcctcctttttctacgcctctccattggagagctcaccaccgccactgcttcaactgtcacctgcatacaaatgatatccttattggaaaaactcagggaggccatgaacaaagaagcctagcatggagacagggccagtgtcaggggacacaaaaaatagaaactttgggagcaggtatctccttggtggtgagccagcggctctgccctcctccttccccatcaccctctccttttcacagctgaactacctgggcccccctttcaacgagccagacttcaaccctccccgcctgggggcagagactctgcccagggccactgttgacttggaggtgtggcgaagcctcaatgacaaactgcggctgacccagaactacgaggcctacagccaccttctgtgttacttgcgtggcctcaaccgtcaggctgccactgctgagctgcgccgcagcctggcccacttctgcaccagcctccagggcctgctgggcagcattgcgggcgtcatggcagctctgggctacccactgccccagccgctgcctgggactgaacccacttggactcctggccctgcccacagtgacttcctccagaagatggacgacttctggctgctgaaggagctgcagacctggctgtggcgctcggccaaggacttcaaccggctcaagaagaagatgcagcctccagcagctgcagtcaccctgcacctgggggctcatggcttctgacttctgaccttctcctcttcgctcccccttcaaaccctgctcccactttgtgagagccagccctgtatgccaacacctgttgagccaggagacagaagctgtgagcctctggccctttcctggaccggctgggcgtgtgatgcgatcagccctgtctcctccccacctcccaaaggtctaccgagctggggaggaggtacagtaggccctgtcctgtcctgtttctacaggaagtcatgctcgagggagtgtgaagtggttcaggttggtgcagaggcgctcatggcctcctgcttcttgcctaccacttggccagtgcccacccagcccctcaggtggcacatctggagggcaggggttgaggggccaccaccacacatgcctttctggggtgaagccctttggctgccccactctccttggatgggtgttgctcccttatccccaaatcactctatacatccaattcaggaaacaaacatggtggcaattctacacaaaaagagatgagattaacagtgcagggttggggtctgcattggaggtgccctataaaccagaagagaaaatactgaaagcacaggggcagggacagaccagaccagacccaggagtctccaaagcacagagtggcaaacaaaacccgagctgagcatcaggaccttgcctcgaattgtcttccagtattacggtgcctcttctctgccccctttcccagggtatctgtgggttgccaggctggggagggcaaccatagccacaccacaggatttcctgaaagtttacaatgcagtagcattttggggtgtagggtggcagctccccaaggccctgccccccagccccacccactcatgactctaagtgtgttgtattaatatttatttatttggagatgttatttattagatgatatttattgcagaatttctattcttgtattaacaaataaaatgcttgccccagaacttagtctctttgcccagcctcacccctcctggtgctcatcagactcttgccacccctggctcccactccctgcttgcctctggtggagctgcacagagctctgggaagaggccctcttcctccccgcactggggcgatgggcgcacctcagacttacccactgctgctgccaccaccaaccccttgatccctcagtcctcccacacagcttctgtccaccccaggtttccctcaccccacctttgctaagtcttcctca

SEQ ID NO: 23253 - DNA, 1072 bp, Homo Sapiens
aggactttctgtgtcctgggattcctcaggatgtggggctttttagtgttaaaagccagatggttggtcacaccagtgaggaccctggcaacggaggcaggccagaaaccatccctcagagggctgctggatgtaggcaatatccagcacagggcagcccgcgctcggggtttaacacgtggggtgatccgggtgtcacctcaggaacggagccaacaaaaccagagtgccccaaaaggccctaccccctcaaccaggccaaagcctcgcactttagggccccaggcccactctctggctctacagtctgtagacctccttttcagaccctgagctcctggaggggcaaggctgaacaggttcacctgaggcctgcatggaggaggaagggaaggaactagaatggaagggttgcctgtggaggggaagcagatcaggccccgacctcgggcaacgccccctgggtgaggagacaggctgcagctgactaaccaagtcccatccagttgggtgcaggggacacaggaggaagtggggcaagcagtaatcagaaatggggaaatgtgagctgcaacatcacccaagggctgcaactctgagaggcaaagaagctgccaggtattgggagttccagagctcctggcagcagcacaggcaggcgggtcccccagcgagccctgtccccttgctgctggctccaccctcaactccatagccccagaaacagacccaggaggagagggattgcccgggccacagccagtttgctgggcagagaccaggccagaccccacctacagcatggcgcttcccccaccagcacggcaggaggtggcaagtcccagcagcacagcaggcgccctggctctaaccagagggtgggcatcgtcccaccccttcctctcccaccccctgccgcccatgaaatgggaactgagttgcccaagagttaatcacttttctgacggtttattttattcatctttggtaacaaatggctgaaatcaattaaacttgctttcccctcaaaaaaaaaaaaaaaaaaaaaaaaaaaaaaaaaaaaaaaaaaaaa

SEQ ID NO: 23254 - DNA, 8168 bp, Homo Sapiens
cccgagaagcggcggggcggcgggccggcgggcggggcgcagagccaggcagcgcaggtatagccaggctggagaaaagaagctgccaccatggttgcactttcactgaagatcagcattgggaatgtggtgaagacgatgcagtttgagccgtctaccatggtgtacgacgcctgccgcatcattcgtgagcggatcccagaggccccagctggtcctcccagcgactttgggctctttctgtcagatgatgaccccaaaaagggtatatggctggaggctgggaaagctttggactactacatgctccgaaatggggacactatggagtacaggaagaaacagagacccctgaagatccgtatgctggatggaactgtgaagacgatcatggtggatgactctaagactgtcactgacatgctcatgaccatctgtgcccgcattggcatcaccaatcatgatgaatattcattggttcgagagctgatggaagagaaaaaggaggaaataacagggaccttaagaaaggacaagacattgctgcgagatgaaaagaagatggagaaactaaagcagaaattgcacacagatgatgagttgaactggctggaccatggtcggacactgagggagcagggtgtagaggagcacgagacgctgctgctgcggaggaagttcttttactcagaccagaatgtggattcccgggaccctgtacagctgaacctcctgtatgtgcaggcacgagatgacatcctgaatggctcccaccctgtctcctttgacaaggcctgtgagtttgctggcttccaatgccagatccagtttgggccccacaatgagcagaagcacaaggctggcttccttgacctgaaggacttcctgcccaaggagtatgtgaagcagaagggagagcgtaagatcttccaggcacacaagaattgtgggcagatgagtgagattgaggccaaggtccgctacgtgaagctagcccgttctctcaagacttacggtgtctccttcttcctggtgaaggaaaaaatgaaagggaagaacaagctagtgcccaggcttctgggcatcaccaaggagtgtgtgatgcgagtggatgagaagaccaaggaagtgatccaggagtggaacctcaccaacatcaaacgctgggctgcgtctcccaaaagcttcaccctggattttggagattaccaagatggctattactcagtacagacaactgaaggggagcagattgcacagctcattgccggctacatcgatatcatcctgaagaagaaaaaaagcaaggatcactttgggctggaaggagatgaggagtctactatgctggaggactcagtgtcccccaaaaagtcaacagtcctgcagcagcaatacaaccgggtggggaaagtggagcatggctctgtggccctgcctgccatcatgcgctctggagcctctggtcctgagaatttccaggtgggcagcatgccccctgcccagcagcagattaccagcggccagatgcaccgaggacacatgcctcctctgacttcagcccagcaggcactcactggaaccattaactccagcatgcaggccgtgcaggctgcccaggccaccctggatgactttgacactctgccgcctcttggccaggatgctgcctctaaggcctggcgtaaaaacaagatggatgaatcaaagcatgagatccactctcaggtagatgccatcacagctggtactgcgtctgtggtgaacctgacagcaggggaccctgctgagacagactataccgcagtgggctgtgcagtcaccacaatctcctccaacctgacggagatgtcccgtggggtgaagctgctggctgccttgctggaggacgaaggcggcagtggtcggcccctgttgcaggcagcaaagggccttgcgggagcagtgtcagaactgctgcgcagtgcccaaccagccagtgctgagccccgtcagaacctgctgcaagcagctgggaacgtgggccaggccagtggggagctgttgcaacaaattggggaaagtgatactgacccccacttccaggatgcgctaatgcagctcgccaaagctgtggcaagtgctgcagctgccctggtcctcaaggccaagagtgtggcccagcggacagaggactcgggacttcagacccaagttattgctgcagcaacacagtgtgccctatccacttcccaactagtggcctgtactaaggtggtggcacctacaatcagctcacctgtctgccaagagcaactggtggaggctggacgactggtagccaaagccgtggagggctgtgtgtctgcctcccaggcagctacagaggatgggcaactgttgcgaggggtaggagcagcagccacagctgtcacccaggccctaaatgagctgctgcagcatgtgaaagcccatgccacaggggctgggcctgctggccgttatgaccaggctactgacaccatcctaaccgtcactgagaacatctttagctccatgggtgatgctggggagatggtgggacaggcccgcatcctggcccaagccacatctgacctggtcaatgccatcaaggctgatgctgagggggaaagtgatctggagaactcccgcaagctcttaagtgctgccaagatcctagctgatgccacagccaagatggtagaggctgccaagggagcagctgcccaccctgacagtgaggagcagcagcagcggctgcgggaggcagctgaggggctgcgcatggccaccaatgcagctgcgcagaatgccatcaagaaaaagctggtgcagcgcctggagcatgcagccaagcaggctgcagcctcagccacacagaccatcgctgcagctcagcacgcagcctctacccccaaagcctctgccggcccccagcccctgctggtgcagagctgcaaggcagtggcagagcagattccactgctggtgcagggcgtccgaggaagccaagcccagcctgacagccccagcgctcagcttgccctcattgctgccagccagagcttcctgcagccaggtgggaagatggtggcagctgcaaaggcctcagtgccaacgattcaggaccaggcttcagccatgcagctgagtcagtgtgccaagaacctgggcaccgcgctggctgaactccggacggctgcccagaaggctcaggaagcatgtggacctttggagatggattctgcactgagtgtggtacagaatctagagaaagatctacaggaagtgaaggcagcagctcgagatggcaagcttaaacccttacctggggagacaatggagaagtgtacccaggacctgggcaacagcaccaaagccgtgagctcagccatcgcccagctactgggagaggttgcccagggcaatgagaattatgcaggtattgcagctcgggatgtggcaggtgggctgcggtcactggcccaggccgctaggggagtcgctgcactgacgtcagatcctgcagtgcaggccattgtacttgatacggccagtgatgtgctggacaaggccagcagcctcattgaggaggcgaaaaaggcagctggccatccaggggaccctgagagccagcagcggcttgcccaggtggctaaagcagtgacccaggctctgaaccgctgtgtcagctgcctacctggccagcgcgatgtggataatgccctgagggcagttggagatgccagcaagcgactcctgagtgactcgcttcctcctagcactgggacatttcaagaagctcagagccggttgaatgaagctgctgctgggctgaatcaggcagccacagaactggtgcaggcctctcggggaacccctcaggacctggctcgagcctcaggccgatttggacaggacttcagcaccttcctggaagctggtgtggagatggcaggccaggctccgagccaggaggaccgagcccaagttgtgtccaacttgaagggcatctccatgtcttcaagcaaacttcttctggctgccaaggccctgtccacggaccctgctgcccctaacctcaagagtcagctggctgcagctgccagggcagtaactgacagcatcaatcagctcatcactatgtgcacccagcaggcacccggccagaaggagtgtgataacgccctgcgggaattggagacggtccgggaactcctggagaacccagtccagcccatcaatgacatgtcctactttggttgcctggacagtgtaatggagaactcaaaggtgctgggcgaggccatgactggcatctcccaaaatgccaagaacggaaacctgccagagtttggagatgccatttccacagcctcaaaggcactttgtggcttcaccgaggcagctgcacaggctgcatatctggttggtgtctctgaccccaatagccaagctggacagcaagggctagtggagcccacacagtttgcccgtgcaaaccaggcaattcagatggcctgccagagtttgggagagcctggctgtacccaggcccaggtgctctctgcagccaccattgtggctaaacacacctctgcactgtgtaacagctgtcgcctggcttctgcccgtaccaccaatcctactgccaagcgccagtttgtacagtcagccaaggaggtggccaacagcacagctaatcttgtcaagaccatcaaggcgctagatgggcctttcacagaggagaaccgtgcccagtgccgagcagcaacagcccctctgctggaggctgtggacaatctgagtgcctttgcgtccaaccctgagttctccagcattcctgcccagatcagccctgagggtcgggctgccatggagcccattgtgatctctgcccagacaatgttagagagtgccgggggactcatccagacagcccgggccctcgcagtcaacccccgggaccccccgagctggtcggtgctggccggccactcccgtactgtctcagactccatcaagaagctaattacaagcatgagggacaaggctccagggcagctggagtgtgaaacggccattgcagctctgaacagttgtctacgggacctagaccaggcttccctcgctgcagtcagccagcagcttgctccccgtgagggaatctctcaagaggccttgcacactgagatgctgactgcagtccaagagatctcccatctcattgagccgctggcccatgctgcccgggctgaagcctcccagctgggacacaaggtgtcccagatggcgcagtactttgagccgctcaccctggctgcagtgggtgctgcctccaagaccctgagccacccgcagcagatggcactcctggaccagactaaaacattggcagagtctgccctgcagttgctatacactgccaaggaggctggtggtaacccaaagcaagcagctcacacccaggaagccctggaggaggctgtgcagatgatgaccgaggccgtagaggacctgacaacaaccctcaacgaggcagccagtgctgctggggtcgtgggtggcatggtggactccatcacccaggccatcaaccagctagatgaaggaccaatgggtgaaccagaaggttccttcgtggattaccaaacaactatggtgcggacagccaaggccattgcagtgactgttcaggagatggttaccaagtcaaacaccagcccagaggagctgggccctcttgctaaccagctgaccagtgactatggccgtctggcctcggaggccaagcctgcagcggtggctgctgaaaatgaagagataggttcccatatcaaacaccgggtacaggagctgggccatggctgtgccgctctggtcaccaaggcaggcgccctgcagtgcagccccagtgatgcctacaccaagaaggagctcatagagtgtgcccggagagtctctgagaaggtctcccacgtcctggctgcgctccaggctgggaatcgtggcacccaggcctgcatcacagcagccagcgctgtgtctggtatcattgctgacctcgacaccaccatcatgttcgccactgctggcacgctcaatcgtgagggtactgaaactttcgctgaccaccgggagggcatcctgaagactgcgaaggtgctggtggaggacaccaaggtcctggtgcaaaacgcagctgggagccaggagaagttggcgcaggctgcccagtcctccgtggcgaccatcacccgcctcgctgatgtggtcaagctgggtgcagccagcctgggagctgaggaccctgagacccaggtggtactaatcaacgcagtgaaagatgtagccaaagccctgggagacctcatcagtgcaacgaaggctgcagctggcaaagttggagatgaccctgctgtgtggcagctaaagaactctgccaaggtgatggtgaccaatgtgacatcattgcttaagacagtaaaagccgtggaagatgaggccaccaaaggcactcgggccctggaggcaaccacagaacacatacggcaggagctggcggttttctgttccccagagccacctgccaagacctctaccccagaagacttcatccgaatgaccaagggtatcaccatggcaaccgccaaggccgttgctgctggcaattcctgtcgccaggaagatgtcattgccacagccaatctgagccgccgtgctattgcagatatgcttcgggcttgcaaggaagcagcttaccacccagaagtggcccctgatgtgcggcttcgagccctgcactatggccgggagtgtgccaatggctacctggaactgctggaccatgtactgctgaccctgcagaagccaagcccagaactcaagcagcagttgacaggacattcaaagcgtgtggctggttccgtcactgagctcatccaggctgctgaagccatgaagggaacagaatgggtagacccagaggaccccacagtcattgctgagaatgagctcctgggagctgcagccgccattgaggctgcagccaaaaagctagagcagctgaagccccgggccaaacccaaggaggcagatgagtccttgaactttgaggagcagatactagaagctgccaagtccattgcagcagccaccagtgcactggtaaaggctgcgtcggctgcccagagagaactagtggcccaagggaaggtgggtgccattccagccaatgcactggacgatgggcagtggtcccagggcctcatttctgctgcccggatggtggctgcggccaccaacaatctgtgtgaggcagccaatgcagctgtacaaggccatgccagccaggagaagctcatctcatcagccaagcaggtagctgcctccacagcccagctccttgtggcctgcaaggtcaaggctgaccaggactcggaggcaatgaaacgacttcaggctgctggcaacgcagtgaagcgagcctcagataatctggtgaaagcagcacagaaggctgcagcctttgaagagcaggagaatgagacagtggtggtgaaagagaagatggttggcggcattgcccagatcatcgcagcacaggaagaaatgcttcggaaggaacgagagctggaagaggcgcggaagaaactggcccagatccggcagcagcagtacaagtttctgccttcagagcttcgagatgagcactaaagaagcctcttctatttaatgcagacccggcccagagactgtgcgtgccactaccaaagccttctgggctgtcggggcccaacctgcccaaccccagcactccccaaagtgcctgccaaaccccaaggcctggccccgcccagtcccgcagtacatcccctgtcccctccccaaccccaagtgccttcatgccctagggccccccaagtgcctgcccctccccagagtattaacgctccaagagtattattaacgctgctgtacctcgatctgaatctgccggggccccagcccactccaccctgccagcagcttccagccagtccccacagcctcatcagctctcttcaccgttttttgatactatcttcccccacccccagctacccataggggctgcagagttataagccccaaacaggtcatgctccaataaaaatgattctacctac

SEQ ID NO: 23255 - DNA, 5539 bp, Homo Sapiens
ggagggaggccgggcaggcggctgagcggcgcggctctcaacgtgacggggaagtggttcgggcggccgcggcttactaccccagggcgaacggacggacgacggaggcgggagccggtagccgagccgggcgacctagagaacgagcgggtcaggctcagcgtcggccactctgtcggtccgctgaatgaagtgcccgcccctctaagcccggagcccggcgctttccccgcaagatggacggtttcgccggcagtctcgatgatagtatttctgctgcaagtacttctgatgttcaagatcgcctgtcagctcttgagtcacgagttcagcaacaagaagatgaaatcactgtgctaaaggcggctttggctgatgttttgaggcgtcttgcaatctctgaagatcatgtggcctcagtgaaaaaatcagtctcaagtaaaggccaaccaagccctcgagcagttattcccatgtcctgtataaccaatggaagtggtgcaaacagaaaaccaagtcataccagtgctgtctcaattgcaggaaaagaaactctttcatctgctgctaaaagtggtacagaaaaaaagaaagaaaaaccacaaggacagagagaaaaaaaagaggaatctcattctaatgatcaaagtccacaaattcgagcatcaccttctccccagccctcttcacaacctctccaaatacacagacaaactccagaaagcaagaatgctactcccaccaaaagcataaaacgaccatcaccagctgaaaagtcacataattcttgggaaaattcagatgatagccgtaataaattgtcgaaaataccttcaacacccaaattaataccaaaagttaccaaaactgcagacaagcataaagatgtcatcatcaaccaagaaggagaatatattaaaatgtttatgcgcggtcggccaattaccatgttcattccttccgatgttgacaactatgatgacatcagaacggaactgcctcctgagaagctcaaactggagtgggcatatggttatcgaggaaaggactgtagagctaatgtttaccttcttccgaccggggaaatagtttatttcattgcatcagtagtagtactatttaattatgaggagagaactcagcgacactacctgggccatacagactgtgtgaaatgccttgctatacatcctgacaaaattaggattgcaactggacagatagctggcgtggataaagatggaaggcctctacaaccccacgtcagagtgtgggattctgttactctatccacactgcagattattggacttggcacttttgagcgtggagtaggatgcctggatttttcaaaagcagattcaggtgttcatttatgtgttattgatgactccaatgagcatatgcttactgtatgggactggcagaagaaagcaaaaggagcagaaataaagacaacaaatgaagttgttttggctgtggagtttcacccaacagatgcaaataccataattacatgcggtaaatctcatattttcttctggacctggagcggcaattcactaacaagaaaacagggaatttttgggaaatatgaaaagccaaaatttgtgcagtgtttagcattcttggggaatggagatgttcttactggagactcaggtggagtcatgcttatatggagcaaaactactgtagagcccacacctgggaaaggacctaaaggtgtatatcaaatcagcaaacaaatcaaagctcatgatggcagtgtgttcacactttgtcagatgagaaatgggatgttattaactggaggagggaaagacagaaaaataattctgtgggatcatgatctgaatcctgaaagagaaatagaggttcctgatcagtatggcacaatcagagctgtagcagaaggaaaggcagatcaatttttagtaggcacatcacgaaactttattttacgaggaacatttaatgatggcttccaaatagaagtacagggtcatacagatgagctttggggtcttgccacacatcccttcaaagatttgctcttgacatgtgctcaggacaggcaggtgtgcctgtggaactcaatggaacacaggctggaatggaccaggctggtagatgaaccaggacactgtgcagattttcatccaagtggcacagtggtggccataggaacgcactcaggcaggtggtttgttctggatgcagaaaccagagatctagtttctatccacacagacgggaatgaacagctctctgtgatgcgctactcaatagatggtaccttcctggctgtaggatctcatgacaactttatttacctctatgtagtctctgaaaatggaagaaaatatagcagatatggaaggtgcactggacattccagctacatcacacaccttgactggtccccagacaacaagtatataatgtctaactcgggagactatgaaatattgtactgggacattccaaatggctgcaaactaatcaggaatcgatcggattgtaaggacattgattggacgacatatacctgtgtgctaggatttcaagtatttggtgtctggccagaaggatctgatgggacagatatcaatgcactggtgcgatcccacaatagaaaggtgatagctgttgccgatgacttttgtaaagtccatctgtttcagtatccctgctccaaagcaaaggctcccagtcacaagtacagtgcccacagcagccatgtcaccaatgtcagttttactcacaatgacagtcacctgatatcaactggtggaaaagacatgagcatcattcagtggaaacttgtggaaaagttatctttgcctcagaatgagactgtagcggatactactctaaccaaagcccccgtctcttccactgaaagtgtcatccaatctaatactcccacaccgcctccttctcagcccttaaatgagacagctgaagaggaaagtagaataagcagttctcccacacttctggagaacagcctggaacaaactgtggagccaagtgaagaccacagcgaggaggagagtgaagagggcagcggagaccttggtgagcctctttatgaagagccatgcaacgagataagcaaggagcaggccaaagccacccttctggaggaccagcaagacccttcgccctcgtcctaacaccctggcttcagtgcaactcttttccttcagctgcatgtgattttgtgataaagttcaggtaacaggatgggcagtgatggagaatcactgttgattgagattttggtttccatgtgatttgttttcttcaatagtcttattttcagtctctcaaatacagccaacttaaagttttagtttggtgtttattgaaaattaaccaaacttaatactaggagaagactgaatcattaatgatgtctcacaaattactgtgtacctaagtggtgtgatgtaaatactggaaacaaaaacagcagttgcattgattttgaaaacaaacccccttgttatctgaacatgttttcttcaggaacaaccagaggtatcacaaacactgttactcatctactggctcagactgtactacttttttttttttttttcctgaaaaagaaaccagaaaaaaatgtactcttactgagataccctctcaccccaaatgtgtaatggaaaatttttaattaagaaaaacttcagttttgccaagtgcaatggtgttgccttctttaaaaaatgccgttttcttacactaccagtggatgtccagacatgctcttagtctactagagaggtgctgccttttctaagtcataatgaggaacagtcccttaatttcttgtgtgcaactctgttttatcctagaactaagagagcattggtttgttaaagagctttcaatgtatattaaaaccttcaatactcagaaatgatggattcctccaaggagtcctttactagcctaaacattctcaaatgtttgagattcaagtgaatggaaggaaaaccacatgcctttaaaactaaactgtaataattacctggctaatttcagctaagccttcatcataatttgttccctcagtaataggagaaatataaatacagtaagtttagattattgaattggtgcttgaaatttattggttttgttgtaattttatacagattatatgagggataagatactcatcaaattgcaaattcttttttttacagaagtgtgggtaacagtcacagcagttttttttaccaacagcatacttaacagacttgctgtgtagcagtttttttctggtggagttgctgtaagtcttgtaagtctaatgtggctatcctactcttttgggcaatgcatgtattatgcattggaaaggtattttttttaagttctgttggctagctatggttttcagtacatttcctactttaagagtaattactgacaaatatgtatttcctatatgtttatactttgattataaaaaagtattttgttttgattttttaacttgctgcattgttttgatactttctatttttttggtcaaatcatgtttagaaactttggatgagttaagaagtcttaagtatgcaggcgtttacgtgattgtgccattccaaagtgcatcagaactgtcattcccttctaatatcttctcaggagtaatacaaatcaggtatttcatcatcatttggtaatatgaaaactccagtgaactcccaaggacatttacaacatttatattcacacgctgtatggaagggtgtgggtgtgtgtgaaggggcgagtggagacactgtgtgtatctctagataagaagatatgcaccacgttgaaaatactcagtgtagatctctatgtgtataggtatctgtatatctttccttttgtttacaactgttaaaaaacctcaaaatagttctcttcaaaagaagagagattccaagcaacccatctttcttcagtatgtatgttctgtacatacttatcggagcgcgccagtaagtatcaggcatatatatctgtctgttagcaatgattattacatcatcagatcagcatgtgctatactccctgcaagaaatatactgacatgaacaggcagttcttggagaagaaagagcatttctttaagtacctggggaatacagctctcagtgatcagcagggagtttatttgaggacatcagtcacctttggggttgccatgtacaatgagatttataatcatgatactcttcggtggtagtttcaaaagacactactaatacgcaggaagcgttccagctatttaatgctggcaactactgtttaatggtcagttaaatctgtgataatggttggaagtgggtggggttatgaaattgtagatgtttttagaaaaacttgtgaatgaaaatgaatccaagtgtttcatgtgaagatgttgagccattgctatcatgcattcctgtctcatggcagaaaattttgaagattaaaaaataaaataatcaaaatgtttcctctttctaaaaaaaaaaaaaaaaaa

SEQ ID NO: 23256 - DNA, 1520 bp, Homo Sapiens
ccacgcgtccgcggacgcgtgggcggcacggtttcgtggggacccaggcttgcaaagtgacggtcattttctctttctttctccctcttgagtccttctgagatgatggctctgggcgcagcgggagctacccgggtctttgtcgcgatggtagcggcggctctcggcggccaccctctgctgggagtgagcgccaccttgaactcggttctcaattccaacgctatcaagaacctgcccccaccgctgggcggcgctgcggggcacccaggctctgcagtcagcgccgcgccgggaatcctgtacccgggcgggaataagtaccagaccattgacaactaccagccgtacccgtgcgcagaggacgaggagtgcggcactgatgagtactgcgctagtcccacccgcggaggggacgcaggcgtgcaaatctgtctcgcctgcaggaagcgccgaaaacgctgcatgcgtcacgctatgtgctgccccgggaattactgcaaaaatggaatatgtgtgtcttctgatcaaaatcatttccgaggagaaattgaggaaaccatcactgaaagctttggtaatgatcatagcaccttggatgggtattccagaagaaccaccttgtcttcaaaaatgtatcacaccaaaggacaagaaggttctgtttgtctccggtcatcagactgtgcctcaggattgtgttgtgctagacacttctggtccaagatctgtaaacctgtcctgaaagaaggtcaagtgtgtaccaagcataggagaaaaggctctcatggactagaaatattccagcgttgttactgtggagaaggtctgtcttgccggatacagaaagatcaccatcaagccagtaattcttctaggcttcacacttgtcagagacactaaaccagctatccaaatgcagtgaactccttttatataatagatgctatgaaaaccttttatgaccttcatcaactcaatcctaaggatatacaagttctgtggtttcagttaagcattccaataacaccttccaaaaacctggagtgtaagagctttgtttctttatggaactcccctgtgattgcagtaaattactgtattgtaaattctcagtgtggcacttacctgtaaatgcaatgaaacttttaattatttttctaaaggtgctgcactgcctatttttcctcttgttatgtaaatttttgtacacattgattgttatcttgactgacaaatattctatattgaactgaagtaaatcatttcagcttatagttcttaaaagcataaccctttaccccatttaattctagagtctagaacgcaaggatctcttggaatgacaaatgataggtacctaaaatgtaacatgaaaatactagcttattttctgaaatgtactatcttaatgcttaaattatatttccctttaggctgtgatagtttttgaaataaaatttaacatttaatatcatgaaatgttataagtagacataaaaaaaaaaaaaaaaaaaaaa

SEQ ID NO: 23257 - DNA, 1868 bp, Homo Sapiens
tagggggtggccctgaactggggcctggccctggctggcctctcccgccgcctcactgggggacaggtccagcctgtggtgtccacaatgccccaggcctctgagcaccgcctgggccgtacccgagagccacctgttaatatccagccccgagtgggatccaagctaccatttgcccccagggcccgcagcaaggagcgcagaaacccagcctctgggccaaaccccatgttacgacctctgcctccccggccaggtctgcctgatgaacggctcaagaaactggagctgggacggggacggacctcaggccctcgtcccagaggcccccttcgagcagatcatggggttcccctgcctggctcaccacccccaacagtggctttgcctctcccatctcggaccaacttagcccgttccaagtctgtgagcagtggggacttgcgtccaatggggattgccttgggagggcaccgtggcaccggagagcttggggctgcactgagccgcttggccctccggcctgagccacccactttgagacgtagcacttctctccgccgcctagggggctttcctggaccccctaccctgttcagcatacggacagagccccctgcttcccatggctccttccacatgatatccgcccggtcctctgagcctttctactctgatgacaagatggctcatcacacactccttctgggctctggtcatgttggccttcgaaacctgggaaacacgtgcttcctgaatgctgtgctgcagtgtctgagcagcactcgacctcttcgggacttctgtctgagaagggacttccggcaagaggtgcctggaggaggccgagcccaagagctcactgaagcctttgcagatgtgattggtgccctctggcaccctgactcctgcgaagctgtgaatcctactcgattccgagctgtcttccagaaatatgttccctccttctctggatacagccagcaggatgcccaagagttcctgaagctcctcatggagcggctacaccttgaaatcaaccgccgaggccgccgggctccaccgatacttgccaatggtccagttccctctccaccccgccgaggaggggctctgctagaagaacctgagttaagtgatgatgaccgagccaacctaatgtggaaacgttacctggagcgagaggacagcaagattgtggacctgtttgtgggccagttgaaaagttgtctcaagtgccaggcctgtgggtatcgctccacgaccttcgaggttttttgtgacctgtccctgcccatccccaagaaaggatttgctgggggcaaggtgtctctgcgggattgtttcaaccttttcactaaggaagaagagctagagtcggagaatgccccagtgtgtgaccgatgtcggcagaaaactcgaagtaccaaaaagttgacagtacaaagattccctcgaatcctcgtgctccatctgaatcgattttctgcctcccgaggctccatcaaaaaaagttcagtaggtgtagactttccactgcagcgactgagcctaggggactttgccagtgacaaagccggaagtcctgtataccagctgtatgccctttgcaaccactcaggcagcgtccactatggccactacacagccctgtgccggtgccagactggttggcatgtctacaatgactctcgtgtctcccctgtcagtgaaaaccaggtggcatccagcgagggctacgtgctgttctaccaactgatgcaggagccaccccggtgcctgtgacacctctaagctctggcacctgtgaagccctttaaacacccttaagccccaggctccccgtttacctcagagacgtctatttt

SEQ ID NO: 23258 - DNA, 6200 bp, Homo Sapiens
gcgagtgactgcaccgagcccgagaagtcgccgcgccccgcagccgccccgactggttccccgccttgcccgtgggccccgccgggatggggaaccgccgggacctgggccagccgcgggccggtctctgcctgctcctggccgcgctgcagcttctgccggggacgcaggccgatcctgtggatgtcctgaaggccctgggtgtgcagggaggccaggctggggtccccgaggggcctggcttctgtccccagaggactccagagggtgaccgggcattcagaattggccaggccagcacgctcggcatccccacgtgggaactctttccagaaggccactttcctgagaacttctccttgctgatcaccttgcggggacagccagccaatcagtctgtcctgctgtccatttatgatgaaaggggtgcccggcagttgggcctggcactggggccagcgctgggtctcctaggtgaccccttccgccccctcccccagcaggtcaacctcacagatggcaggtggcaccgtgtggccgtcagcatagatggtgagatggtgaccctggtagctgactgtgaagctcagccccctgttttgggccatggcccccgcttcatcagcatagctggactcactgtgctggggacccaggaccttggggaaaagactttcgagggagacattcaggagctgctgataagcccagatcctcaggctgccttccaggcttgtgagcggtacctccccgactgtgacaacctggcaccggcagccacagtggctccccagggtgaaccagaaacccctcgtcctcggcggaaggggaagggaaaagggaggaagaaagggcgaggtcgcaaggggaagggcaggaaaaagaacaaggaaatttggacctcaagtccacctcctgactccgcagagaaccagacctccactgacatccccaagacagagactccagctccaaatctgcctccgacccccacgcctttggtcgtcacctccactgtgactactggactcaatgccacgatcctagaggggagcttggaccctgacagtggaaccgagctggggaccctggagaccaaggcagccagggaggatgaagaaggagatgattccaccatgggccctgacttccgggcagcagaatatccatctcggactcagttccagatctttcctggtgctggagagaaaggagcaaaaggagagcccgcagtgattgaaaaggggcagcagtttgagggacctccaggagccccaggaccccaaggggtggttggcccctcaggccctcccggccccccaggattccctggcgaccctggtccaccgggccctgctggcctcccaggaatccccggcattgatgggatccgaggcccaccgggcactgtgatcatgatgccgttccagtttgcaggcggctcctttaaaggccccccagtctcattccagcaggcccaggctcaggcagttctgcagcagactcagctctctatgaaaggcccccctggtccagtggggctcactgggcgcccaggccctgtgggtctccccgggcatccaggtctgaaaggagaggagggagcagaagggccacagggtccccgaggcctgcagggacctcatggaccccctggccgagtgggcaagatgggccgccctggagcagatggagctcggggcctcccaggggacactggacctaagggtgatcgtggcttcgatggcctccctgggctgcctggtgagaagggccaaaggggtgactttggccatgtggggcaacccggtcccccaggagaggatggtgagaggggagcagagggacctccagggcccactggccaggctggggagccgggtccacgaggactgcttggccccagaggctctcctggccccacgggtcgcccgggtgtgactggaattgatggtgctcctggtgccaaaggcaatgtgggtcctccaggagaaccaggccctccgggacagcagggaaaccatgggtcccagggactccccggtccccagggactcattggcactcctggggagaagggtccccctggaaacccaggaattccaggcctcccaggatccgatggccctctgggtcacccaggacatgagggccccacgggagagaaaggggctcagggtccaccagggtcggcaggccctccgggctatcctggacctcggggagtgaagggcacttcaggcaaccggggcctccagggggagaaaggcgagaagggagaggacggcttcccaggcttcaagggcgatgtggggctcaaaggtgatcaggggaaacccggagctccaggtccccggggagaggatggtcctgaggggccgaaggggcaggcggggcaggctggcgaggaggggcccccaggctcagctggggagaagggcaagcttggggtgccaggcctcccaggttatccaggacgccctggacctaagggatctattggatttcccggtcccctgggacccataggagagaaagggaagtcgggaaagacagggcagccaggcctggaaggagagcggggaccaccaggttcccgtggagagagggggcaaccgggtgccacagggcaaccaggccccaagggcgatgtgggccaggatggagcccctgggatccctggagaaaagggcctccctggtctgcaaggccctccaggattccctgggccaaagggcccccctggtcaccaaggtaaagatgggcgaccagggcaccctggacagagaggagaactgggcttccaaggtcagacaggcccgcctggaccagctggtgtcttaggccctcagggaaagacaggagaagtgggacctctaggtgaaagggggcctccaggcccccctggacctcctggtgaacaaggtcttcctggcctggaaggcagagagggggccaagggggaactgggaccaccaggaccccttgggaaagaagggccagctggactcaggggctttcccggccccaaagggggccctggggacccgggacctactggcttaaagggtgataagggccccccagggcctgtgggggccaatggctcccctggtgagcgcggtcctttgggcccagcaggaggcattggacttcctggccaaagtggcagcgaaggccccgttggccctgcaggcaagaaggggtcccggggagaacgtggcccccctggccccactggcaaagatgggatcccagggcccctggggcctctgggaccccctggagctgctgggccttctggcgaggaaggggacaagggggatgtgggtgcccccggacacaaggggagtaaaggcgataaaggagacgcgggcccacctggacaaccagggatacggggtcctgcaggacacccaggtcccccgggagcagacggggctcaggggcgccggggacccccaggcctctttgggcagaaaggagatgacggagtcagaggctttgtgggggtgattggccctcctggactgcaggggctgccaggccctccgggagagaaaggggaggtcggagacgtcgggtccatgggtccccatggagctccaggtcctcggggtccccaaggccccactggatcagagggcactccagggctgcctggaggagttggtcagccaggcgccgtgggtgagaagggtgagcgaggggacgctggagacccagggcctccaggagccccaggcatcccggggcccaagggagacattggtgaaaagggggactcaggcccatctggagctgctggacccccaggcaagaaaggtccccctggagaggatggagccaaagggagcgtgggccccacggggctgcccggagatctagggcccccaggagaccctggagtttcaggcatagatggttccccaggggagaagggagaccctggtgatgttgggggaccgggtccgcctggagcttctggggagcccggcgcccccgggccccccggcaagaggggtccttcaggccacatgggtcgagaaggcagagaaggggagaaaggtgccaagggggagccaggtcctgatgggcccccagggaggacgggtccaatgggggctagagggccccctggacgtgtggggcctgagggtcttcgagggatccctggccctgtgggtgaaccaggcctcctgggagcccctggacagatgggccctcctggccccctggggccctctggcctcccagggctgaagggagacactggccccaagggggaaaagggccacattggattgatcggtctcattggccccccgggagaagctggtgagaaaggagatcaggggttgccaggcgtgcagggaccccctggtcccaagggagaccctggtccccctggtcccattggctctctgggccaccctgggcccccaggtgtggcgggccctctaggacagaaaggctcaaaagggtctccggggtccatgggcccccgtggagacactggacctgcaggcccaccaggccccccgggtgcccctgccgagctgcatgggctgcgcaggcgccggcgcttcgtcccagtcccgcttccagtcgtggagggcggcctggaggaggtgctggcctcgctcacatcgctgagcttggagctggagcagctgcggcgtcctcccggcactgcggagcgcccgggcctcgtgtgccacgagctgcaccgcaaccacccgcacctgcctgatggggaatactggattgaccccaaccagggctgcgcgcgggactcgttcagggttttttgcaacttcacggcgggaggagagacctgcctctatcccgacaagaagtttgagatcgtgaaattggcctcctggtccaaggaaaagcctggaggctggtatagcacattccgtcgagggaagaagttctcctacgtggacgccgacgggtccccagtgaatgtcgtgcagctgaacttcctgaaactgctgagtgccacagctcgccagaacttcacctactcctgccagaatgcagctgcctggctggacgaagccacgggtgactacagccactccgcccgcttccttggcaccaatggagaggagctgtctttcaaccagacgacagcaaccactgtcagcgtcccccaggatggctgccggctccggaaaggacagacgaagacccttttcgaattcagctcttctcgagcgggatttctgcccctgtgggatgtggcggccactgactttggccagacgaaccaaaagtttgggtttgaactgggccccgtctgcttcagcagctgagagtgtccggggtgggagggaccgtgagggagccccagaatggggtgcatttggtgctgaggctttgaagccaccgtatttttcgttacctgtgactatggagccaatgggatgtgacttcgctcatcacggtcagtcattccttctcctttccagggtgctgggggctggggttccctggcccaagggtccagcctcctctcaccccattccaggtggcatactgcagtctggctctttctcccctccctccccacccaagcctcacctccccaccccttgaacccccatgcaatgagcttctaactcagagctgatgaacaaaagcccccccacccccaatgcctgcctcctcactcctccgtcgctgcccttcacaccttttggtgctacccctccccagagttaagcactggatgtctcctgatcccaggctgggacccctacccccaccccctttgatcctttctacttccacggtgaaaggactgaggtcggactacagagggaagagggacttcccttgactgggttgtgtttcttttcctgcctcagcccagctctgcaaatcccctccccctgcccctcacctccccaggctcaccttgccatgccaggtggtttggggaccaagatgttgggggggtgaatcaggatcctaatggtgctgccctatttatacctgggtctgtattaaaagggaaagtcccccctgttgtagatttcatctgcttcctccttagggaaggctgggatatgatgagagattccagcccaagcccggccccccaccgccaggccatagggcataatttgcatctcaaatctgagaataaactgatgaactgtggaaaaaaaaaaaaaaaaaaaaaaaaa

SEQ ID NO: 23259 - DNA, 1643 bp, Homo Sapiens
cttatgttgattcagattgaatgaggtagtgattagggacctgtgcttttgtaaattcaataaaggcaagaggacaatattgaataaagctgcgtttaaacttcattgctcatatatcttttactaactggtaaaccggcgaagctgataagccaataaaagtgctgactagaacacatttgctaaccgttaagagtatcttctttttgaggcctggacttctgattcatctatagaagtctattatgattccatcaattgcatagcttgtgtacctggtagaaattgtgtcttggaatgaccctttcgagttattgacatggctctgatgaatagaacatgagccccaaaactaaatccaaaaggaattttctatctttcatcccccacatgtggcaagacaaagttggccctttcttacccagaggtcttttgtgtgactgcatctttctcctccgttctccattgtgtgctttccattttgtctttagtgcctatactgtaggtgttatcttcactggcattcacaatttaagccattgctgcctcattagccttgtatttagtgtgcatatcatgtatccagacctgtatgttcgctttaagcattcttatatcacactgtctctcatctaccatatggtaaatgttaaaactccacatttgtctgcatcagggaaaatgcatgggcacacatcctccctccctccctcttgctctcctcccttccttcaggcctcttagcattgtttgttttcccatttctgatactactactccatgctgaagatttgccatattactattttggaaacattgagtgatagaactcctagaaaatttgcaaagaaatgttacatactgtatatcaaactctcagattctagtgttgaaaaagtagcctatactttgctattacttatacctgctgccatagaaaaaaataagtttattcatgacacatttacatttgatcataaataaaagaaaaaagggcacctttttggagttagtcatggtagtcattagtgatatttctgaacagttcttaatttaaaatacttcaaaggaagtaaaggtcatggcttagctgaaggaaatgctccagaaattggactgtgtaaaccatcagtacaataatacgctgtgtatgtatgtgtatataaaatgagaattatggcataattggagcatttgcattaatcaacaaactcacattgagacaaaacttagttttacagctgtcttgattaaagccaagtgttccatgttgctgtgaagaatagcctctttcaaatactttggaaagtagttacttggaaacttgtaaaggtattacatttttatatttaaacacctatagagatcttcaattccttgagtctgagcttgtgggtggaattctaaatttgtatcataatctgtcttttgtgaaacattttgaaaatatgtatatataatattgtatatgcaaattgtgttgtttcacttgtaaagggaaaaggcttatttttctttatatttctgataacttgttttgcatatgaccagcactgactgaaaggcatgtgtagctgcaaacactgttgctttttttgtgaaatgaaaataaaagtatttaaattcaaaaaaaaaaaaaaaaa

SEQ ID NO: 23260 - DNA, 2270 bp, Homo Sapiens
gtttccaagagcagcagaaaatgaacacattgcaggggccagtgtcattcaaagatgtggctgtggatttcacccaggaggagtggcagcaactggaccctgatgagaagatagcatacggggatgtgatgttggagaactacagccatctagtttctgtggggtatgattatcaccaagccaaacatcatcatggagtggaggtgaaggaagtggagcagggagaggagccgtggataatggaaggtgaatttccatgtcaacatagtccaggacaaagcagttccaattccagagaaaatgagtgaatgggcacctcgacctcccccagaatttgtccgagatgtcatgggttcaagtgctggggccggcagtggagagttccacgtgtacagacatctgcgccggagagaatatcaacgacaggactacatggatgccatggctgagaagcaaaaattggatgcagagtttcagaaaagactggaaaagaataaaattgctgcagaggagcagaccgcaaagcgccgagaagcgccagaagttaaagagaagaaattactggcaagaagatgaaacttgaacagaagaaacaagaaggacccggtcagcccaaggagcaggggtccagcagctctgcggaggcatctggaacagaggaggaggaggaagtgcccagtttcaccatggggcgatgacaatgtttgccacagcctctgcctggaacctggctcgtgctgtgaccagaagggaaaggcggctgtttggctctttctcccccgcaaggacccgctgacccgctggatggagagcaaaggagacccctcccgagccgctcacagtcctgtatttggcaggtttgggagcctgaggggccatctccctgacactcagaggcactgccttgcagacaccatccgtgctcctggtaaagggggacagagagcctcaccttgccacatatttgaacagtgatgagtttggggctggtttctgggaagggaacgtttatttagtaaagagcagaacacccttgcgttttgttgggacatgtggaccgtgagtcgcaaacactctggagaaggctgagatgccaccattcccacggggactgaagacacattacgtggacctggtcccaggctcagtgaggagatggcctcagctgtggggctggtccatgttgcccactcactccagtgggaagtggggaccacgccatagagggtctgctcccactgcagctcccggtgctctcgtgttctgggaaggcctgggtgtgtgcacaaggaggcccgggccagggacttcaccaggggctgggtcacaagggcacagggtgtgtggaaagcgctgtgggggaagagccggtcaccggagagtgagcaggcggagactccaagctgggctgagccagagcagaaggcgagggattcccagccggacgggggttctctcaccaacagctgtgatttcatcccgaagtggaagggggtctaaacagaacaggctgagagaggcgggactgggtcaagtgggtggagctcctccttgcatgactgcaactgtcggggctttccgccggctcacagcagttggggccagcggggagaagagaggcggaactgctgtgtcctcatgtggcgcagcctcaaactggcatccaggcactgggcccgtgcagagaaggcacctgcagagagcagggcagcccggcgcaggggcatgcgcctagaatcccagctactcggaaggccaaggcaggaggaccgcttgagtccagggattcaaggccaacctgggcaatagagcgagaccctgtctcttaaaaaacgatgatgatgaacacagaggacggggcactgtgctgggagccagggggcctgggaggagccgagaccagccttttacctcggggttttgaggccaacagggacgacagagacagtttctagttagagccttggctccatttttggatgatttagccccgagttcctgagtctattttatgccccttacgtactttgatagaactaaggaaatagtggttttgagtgaagggaaaggaaacccagaaacattttacgttgcttttacttctgtagtgtagattgccccggcccctctctgagccctgtagcatctgtgatagcttctgtcccttcatcggttcatgtcacagggattttctttcccaggaagcggacacggagagtcagccctaataaatgagcacatgccctggctgtaaaaaaaaaaaaaaaaaa

SEQ ID NO: 23261 - DNA, 8056 bp, Homo Sapiens
cgcgcagaggagcgggccgcggcgctgaggcggcggagcgtggccccgccatgggcttcctgcaccagctgcagctgctgctctggaagaacgtgacgctcaaacgccggagcccgtgggtcctggccttcgagatcttcatccccctggtgctgttctttatcctgctggggctgcgacagaagaagcccaccatctccgtgaaggaagtccccttctacacagcggcgcccctgacgtctgccggcatcctgcctgtcatgcaatcgctgtgcccggacggccagcgagacgagttcggcttcctgcagtacgccaactccacggtcacgcagctgcttgagcgcctggaccgcgtggtggaggaaggcaacctgtttgacccagcgcggcccagcctgggctcagagctcgaggccctacgccagcatctggaggccctcagtgcgggcccgggcacctcggggagccacctggacagatccacagtgtcttccttctctctggactcggtggccagaaacccgcaggagctctggcgtttcctgacgcaaaacttgtcgctgcccaatagcacggcccaagcactcttggccgcccgtgtggacccgcccgaggtctaccacctgctctttggtccctcatctgccctggattcacagtctggcctccacaagggtcaggagccctggagccgcctagggggcaatcccctgttccggatggaggagctgctgctggctcctgccctcctggagcagctcacctgcacgccgggctcgggggagctgggccggatcctcactgtgcctgagagtcagaagggagccctgcagggctaccgggatgctgtctgcagtgggcaggctgctgcgcgtgccaggcgcttctctgggctgtctgctgagctccggaaccagctggacgtggccaaggtctcccagcagctgggcctggatgcccccaacggctcggactcctcgccacaggcgccacccccacggaggctgcaggcgcttctgggggacctgctggatgcccagaaggttctgcaggatgtggatgtcctgtcggccctggccctgctactgccccagggtgcctgcactggccggacccccggacccccagccagtggtgcgggtggggcggccaatggcactggggcaggggcagtcatgggccccaacgccaccgctgaggagggcgcaccctctgctgcagcactggccaccccggacacgctgcagggccagtgctcagccttcgtacagctctgggccggcctgcagcccatcttgtgtggcaacaaccgcaccattgaacccgaggcgctgcggcggggcaacatgagctccctgggcttcacgagcaaggagcagcggaacctgggcctcctcgtgcacctcatgaccagcaaccccaaaatcctgtacgcgcctgcgggctctgaggtcgaccgcgtcatcctcaaggccaacgagacttttgcttttgtgggcaacgtgactcactatgcccaggtctggctcaacatctcggcggagatccgcagcttcctggagcagggcaggctgcagcaacacctgcgctggctgcagcagtatgtagcagagctgcggctgcaccccgaggcactgaacctgtcactggatgagctgccgccggccctgagacaggacaacttctcgctgcccagtggcatggccctcctgcagcagctggataccattgacaacgcggcctgcggctggatccagttcatgtccaaggtgagcgtggacatcttcaagggcttccccgacgaggagagcattgtcaactacaccctcaaccaggcctaccaggacaacgtcactgtttttgccagtgtgatcttccagacccggaaggacggctcgctcccgcctcacgtgcactacaagatccgccagaactccagcttcaccgagaaaaccaacgagatccgccgcgcctactggcggcctgggcccaatactggcggccgcttctacttcctctacggcttcgtctggatccaggacatgatggagcgcgccatcatcgacacttttgtggggcacgacgtggtggagccaggcagctacgtgcagatgttcccctacccctgctacacacgcgatgacttcctgtttgtcattgagcacatgatgccgctgtgcatggtgatctcctgggtctactccgtggccatgaccatccagcacatcgtggcggagaaggagcaccggctcaaggaggtgatgaagaccatgggcctgaacaacgcggtgcactgggtggcctggttcatcaccggctttgtgcagctgtccatctccgtgacagcactcaccgccatcctgaagtacggccaggtgcttatgcacagccacgtggtcatcatctggctcttcctggcagtctacgcggtggccaccatcatgttctgcttcctggtgtctgtgctgtactccaaggccaagctggcctcggcctgcggtggcatcatctacttcctgagctacgtgccctacatgtacgtggcgatccgagaggaggtggcgcatgataagatcacggccttcgagaagtgcatcgcgtccctcatgtccacgacggcctttggtctgggctctaagtacttcgcgctgtatgaggtggccggcgtgggcatccagtggcacaccttcagccagtccccggtggagggggacgacttcaacttgctcctggctgtcaccatgctgatggtggacgccgtggtctatggcatcctcacgtggtacattgaggctgtgcacccaggcatgtacgggctgccccggccctggtacttcccactgcagaagtcctactggctgggcagtgggcggacagaagcctgggagtggagctggccgtgggcacgcaccccccgcctcagtgtcatggaggaggaccaggcctgtgccatggagagccggcgctttgaggagacccgtggcatggaggaggagcccacccacctgcctctggttgtctgcgtggacaaactcaccaaggtctacaaggacgacaagaagctggccctgaacaagctgagcctgaacctctacgagaaccaggtggtctccttcttgggccacaacggggcgggcaagaccaccaccatgtccatcctgaccggcctgttccctccaacgtcgggttccgccaccatctacgggcacgacatccgcacggagatggatgagatccgcaagaacctgggcatgtgcccgcagcacaatgtgctctttgaccggctcacggtggaggaacacctctggttctactcacggctcaagagcatggctcaggaggagatccgcagagagatggacaagatgatcgaggacctggagctctccaacaaacggcactcactggtgcagacattgtcgggtggcatgaagcgcaagctgtccgtggccatcgccttcgtgggcggctctcgcgccatcatcctggacgagcccacggcgggcgtggacccctacgcgcgccgcgccatctgggacctcatcctgaagtacaagccaggccgcaccatccttctgtccacccaccacatggatgaggctgacctgcttggggaccgcattgccatcatctcccatgggaagctcaagtgctgcggctccccgctcttcctcaagggcacctatggcgacgggtaccgcctcacgctggtcaagcggcccgccgagccggggggcccccaagagccagggctggcatccagccccccaggtcgggccccgctgagcagctgctccgagctccaggtgtcccagttcatccgcaagcatgtggcctcctgcctgctggtctcagacacaagcacggagctctcctacatcctgcccagcgaggccgccaagaagggggctttcgagcgcctcttccagcacctggagcgcagcctggatgcactgcacctcagcagcttcgggctgatggacacgaccctggaggaagtgttcctcaaggtgtcggaggaggatcagtcgctggagaacagtgaggccgatgtgaaggagtccaggaaggatgtgctccctggggcggagggcccggcgtctggggagggtcacgctggcaatctggcccggtgctcggagctgacccagtcgcaggcatcgctgcagtcggcgtcatctgtgggctctgcccgtggcgacgagggagctggctacaccgacgtctatggcgactaccgccccctctttgataacccacaggacccagacaatgtcagcctgcaagaggtggaggcagaggccctgtcgagggtcggccagggcagccgcaagctggacggcgggtggctgaaggtgcgccagttccacgggctgctggtcaaacgcttccactgcgcccgccgcaactccaaggcactcttctcccagatcttgctgccagccttcttcgtctgcgtggccatgaccgtggccctgtccgtcccggagattggtgatctgcccccgctggtcctgtcaccttcccagtaccacaactacacccagccccgtggcaatttcatcccctacgccaacgaggagcgccgcgagtaccggctgcggctatcgcccgacgccagcccccagcagctcgtgagcacgttccggctgccgtcgggggtgggtgccacctgcgtgctcaagtctcccgccaacggctcgctggggcccacgttgaacctgagcagcggggagtcgcgcctgctggcggctcggttcttcgacagcatgtgtctggagtccttcacacaggggctgccactgtccaatttcgtgccacccccaccctcgcccgccccatctgactcgccagcgtccccggatgaggacctgcaggcctggaacgtctccctgccgcccaccgctgggccagaaatgtggacgtcggcaccctccctgccgcgcctggtacgggagcccgtccgctgcacctgctctgcgcagggcaccggcttctcctgccccagcagtgtgggcgggcacccgccccagatgcgggtggtcacaggcgacatcctgaccgacatcaccggccacaatgtctctgagtacctgctcttcacctccgaccgcttccgactgcaccggtatggggccatcacctttggaaacgtcctgaagtccatcccagcctcatttggcaccagggccccacccatggtgcggaagatcgcggtgcgcagggctgcccaggttttctacaacaacaagggctatcacagcatgcccacctacctcaacagcctcaacaacgccatcctgcgtgccaacctgcccaagagcaagggcaacccggcggcttacggcatcaccgtcaccaaccaccccatgaataagaccagcgccagcctctccctggattacctgctgcagggcacggatgtcgtcatcgccatcttcatcatcgtggccatgtccttcgtgccggccagcttcgttgtcttcctcgtggccgagaagtccaccaaggccaagcatctgcagtttgtcagcggctgcaaccccatcatctactggctggcgaactacgtgtgggacatgctcaactacctggtccccgctacctgctgtgtcatcatcctgtttgtgttcgacctgccggcctacacgtcgcccaccaacttccctgccgtcctctccctcttcctgctctatgggtggtccatcacgcccatcatgtacccggcctccttctggttcgaggtccccagctccgcctacgtgttcctcattgtcatcaatctcttcatcggcatcaccgccaccgtggccaccttcctgctacagctcttcgagcacgacaaggacctgaaggttgtcaacagttacctgaaaagctgcttcctcattttccccaactacaacctgggccacgggctcatggagatggcctacaacgagtacatcaacgagtactacgccaagattggccagtttgacaagatgaagtccccgttcgagtgggacattgtcacccgcggactggtggccatggcggttgagggcgtcgtgggcttcctcctgaccatcatgtgccagtacaacttcctgcggcggccacagcgcatgcctgtgtctaccaagcctgtggaggatgatgtggacgtggccagtgagcggcagcgagtgctccggggagacgccgacaatgacatggtcaagattgagaacctgaccaaggtctacaagtcccggaagattggccgtatcctggccgttgaccgcctgtgcctgggtgtgcgtcctggcgagtgcttcgggctcctgggcgtcaacggtgcgggcaagaccagcaccttcaagatgctgaccggcgacgagagcacgacggggggcgaggccttcgtcaatggacacagcgtgctgaaggagctgctccaggtgcagcagagcctcggctactgcccgcagtgtgacgcgctgttcgacgagctcacggcccgggagcacctgcagctgtacacgcggctgcgtgggatctcctggaaggacgaggcccgggtggtgaagtgggctctggagaagctggagctgaccaagtacgcagacaagccggctggcacctacagcggcggcaacaagcggaagctctccacggccatcgccctcattgggtacccagccttcatcttcctggacgagcccaccacaggcatggaccccaaggcccggcgcttcctctggaacctcatcctcgacctcatcaagacagggcgttcagtggtgctgacatcacacagcatggaggagtgcgaggcgctgtgcacgcggctggccatcatggtgaacggtcgcctgcggtgcctgggcagcatccagcacctgaagaaccggtttggagatggctacatgatcacggtgcggaccaagagcagccagagtgtgaaggacgtggtgcggttcttcaaccgcaacttcccggaagccatgctcaaggagcggcaccacacaaaggtgcagtaccagctcaagtcggagcacatctcgctggcccaggtgttcagcaagatggagcaggtgtctggcgtgctgggcatcgaggactactcggtcagccagaccacactggacaatgtgttcgtgaactttgccaagaagcagagtgacaacctggagcagcaggagacggagccgccatccgcactgcagtcccctctcggctgcttgctcagcctgctccggccccggtctgcccccacggagctccgggcacttgtggcagacgagcccgaggacctggacacggaggacgagggcctcatcagcttcgaggaggagcgggcccagctgtccttcaacacggacacgctctgctgaccacccagagctgggccagggaggacacgctccactgaccacccagagctgggccagggactcaacaatggggacagaagtcccccagtgcctgccagggcctggagtggaggttcaggaccaaggggcttctggtcctccagcccctgtactcggccatgccctgcggtcactgcggttgccgcccctaattgtgccaaaggctgacccggcccgggctgcgtacacccttgccctgctttgccttaaagcctcggggtctgcccggcccctcgcccctgcctggcactgctcaccgcccaaggcgacgccggctggaccaggcactgctggcctttctcctgcccggcctcggaaccagcttttctctcttacgatgaaggctgatgccgagagcgggctgtgggcggagctgggtcagtcccgtatttattttgctttgagaagaggctcctctggccctgctctcctgcagggaggtggctgtcccgcgggaagccatcagcttgggccagctggcaggtggcaggaatggagaagctgaccctgctggccaggcaaggggccagaccccccccaacccccagctgccatcgctctcccacccagcttggccccctgcccgcccacctccctgggagccgggcctgtacatagcgcacagatgtttgttttaaataaataaacaaaatgtc

SEQ ID NO: 23262 - DNA, 3170 bp, Homo Sapiens
gagacggagtctcgctcttgttgcccaggctggagtgcagtggcgcgatctcggctcattgcaacctctgccttccccgggatcaagcgattctcctgcctcagcctcccgagtagctgagattacaggcgcctgccaccacgcccggctaatttttttggatttttagtagagacggggtttcaccatgttggccaggctggtctcaaactcctgacctcgtgatccgtcccctgacccccgccccccgccccgctcccaaagtgctaggattacaggcgtgagccaccgcgcccggccgtatttatgcttttgactaacgtttttctgtacaggtgtatagggtaatgtaataggtaaaataactcattcaacaacaaaaaattattgtagtattttgtagctactaggattgaagtactaaagaattgtctgtctgccaaggtttggggaaatgggaaaatgggacaagatcttcactacatggggcacatttcaccttcttcttggaatcaattccctatcctgtaaatggcaaagttgggggttccaggtcttgtccttgtttttttgctttgtgtgaaaggttctcccctacctgcactaatcttatttcaaatattcatctcatactatcctctctttgcaatctttaattcattcaacaaatatttattgagctctactagtattggtgagtaacagaagccagggtcctcccacatggagcttattattagtccaaaggatagggacataaataatttttgaaagtaaacaaatatttattaataactgataaataactattggttggaaaggtgctaagaaggaaataaataggatcatgtgttatgtctctgagagtcttagaatgaagcagacaagctctttcactttcaagtgctgacgtagtaaagtcattaggtttcaaaaaaggaaaaaaagataatatcttacaattaactaatgaatgaacagccattacgctagaagaaaattgtattgtgattggtgtactccgtatcttctcagaatgagagaggtgaggcttctcaaaaagagcagcgagagaaagtcacttaaaaattttttttttttggaaggtccaaagttaaagccgaactttgaaaaatagccaacccttaaagtcagcgggaaaagttgccaatctaagtctggcccagcaaaattttttttccagtagttttaggctcccttggccattgggaatcccagatgtaaagaaaaccttacgccataacttcaaaggtagatttccagttattactgccccggtggcaagaacccttaggaaggtaaggtcaaaggtgtggtttagttaaaagccaggttcccgggaacggcacttgaaagggcaggccggagaccagctgaagatgagatagagagcaggggaagaatgcgccgacacctcaaggtgagagagtagaaccagtctccgccgtgggaccgcgcgctgctcaggtggctctttcccgctcaggtgagctcctcccgcgcctcccattggccgagatgcccgcggcgctgggagggcgacgcagcgcggtctagttcagggtctagggcggcgcgtcacttccggtagcgcggagcttgtaaaacaccctggagagaaaatggcggcggcagcagcttcggcgcctcagcagctctcggatgaggagcttttctctcagctccgccgttacggcctgtctcccggaccagtgacggagagcacccgcccggtctacctcaagaagctgaagaagcttcgagaggaagagcagcaacagcaccggtcagggggccgcggcaacaagacgcggaacagtaataacaataacacggcagccgccacggtcgcagccgcgggaccagcggcggcggcggccgcggggatgggggtccggccggtctcgggcgacctctcctacttacggactcctgggggcctgtgccgaatctcggcctctggcccagagagcctcctgggagggcccgggggcgcctccgccgcccccgcggctggcagcaaagtgctgctgggcttcagctcggacgagtcggacgtggaggccagtccccgggaccaggccggcggcggcgggaggaaagaccgggcttcgctccagtaccgcgggctcaaagcgccgccggcgcccctggccgccagcgaggtgactaacagcaactctgcagagcgaaggaagccccactcgtggtggggggccaggaggccggcgggccccgagctgcagaccccgccggggaaagatggagcagtggaggacgaggaaggggagggagaggacggtgaggagagggacccggagaccgaggagccgctctgggcgagccggaccgtgaatggcagccggcttgtcccctacagctgccgggaaaactattcggactcagaggaagaggacgacgacgacgtggcctccagcagacaggtattaaaggacgactccctttcccggcatcggcccagacgaacccatagtaagcctctccccccgctgactgctaaatcggccggcggcaggctggagacttcagttcagggagggggaggactcgcgatgaatgacagggcggcggctgccgggagtctagacaggagccgaaacctcgaagaggcggcggccgcggagcagggaggagggtgtgatcaagtggactccagccccgttcctagataccgtgttaacgctaagaaactgacccctctcctgcccccgccacttactgacatggactcaaccttggattcgtcaacaggctcccttctgaaaaccaataatcatattggcggtggggccttcagtgtggactcccccaggatttattctaacagtctccctcccagtgcggcggtggccgcctctagttcactcaggatcaatcacgccaatcatacgggctccaatcatacctacctgaaaaacacatacaacaaaccgaagctttccgaacccgaagaggaacttctccagcaatttaaacgggaggaggtgtccccaacagggagtttcagtgcccactacttgtcgatgtttctcttaactgctgcctgcttatttttcctaatactgggactgacttacctaggaatgagagggacaggagtatctgaggatggagaactcagcagtaag

SEQ ID NO: 23263 - DNA, 7125 bp, Homo Sapiens
aatgactgttaatttctttgcctcctctttgattccatctcttgacctctatatcatttcaaaggagcattgagtgaacatccatccttgtaccttgaatattccatgaatgctcctgcttcagggcctctgcatttgctgttctctcactttccccagtaagctgcataattcattctacatttcttcacgtatttccttatgattgaggtttctctgtttttttttttacctctatactcttatgtctctttttatagcactgaaaaccatcatgatctgttatatatcattgttttctgtcttcctcattagatttatgtaggttggaactttgttctgtttatctctataatcctattacctagaactgtgcctggtaaataagagcttagtatgtatttactgaatgatgaattaatatatttatatattgaggctgtgtcttctaatgtcagcaaaataattgacaagagactttggtggacactgttctctcttggttaatatttttggaaaaaacaactcccttaaatttgggtaaatgtggtaatttgagcgaagtaagtacttctgttttctctaagtagacttggatttactagactttgtaatgagtaatttctttgttcttcctacctggaggaaggacttaactgtagtatgccattaaaaattgcacttatatcatcttacatgttaatttttatgattatactaatgagtaatgtttttcttttcttttaaaaaatttgtagatctaacagctttaatacagatagaaacatagataaatataactataccttgtggaaaggacagcttttaaataaaggaaaacttttgtgttatatttctctgaggtcagccactcgtgcttttttgcctatcaaactacctgagaaattagatgttgaaacagttatgagtattgatcatctgaaacagaaaatccctccagcactgttttataaggaaacatacttaggtccaaatgaagttttgaagaatggaatgtattgcagcctttatgaagttgtggaaaagacaagaattggaagtaacatggagagtttactgcaaaaactagacagagaaaaacttgttcttgttaaacctttgggagaccgaggatacctttttcttctctccccttatcagatggttcctccatatgaatatcagactgccaagtctcgagtcctacatgctttgtttctatttcaagaacctagaagcatagttacttcacaaaaaggttcaaccaatgcagcaccacaggagaggcatgagagcatgccagatgtattaaaaatagctcagtttttacaattttctttgattcagtgtcgaaaggaattcaaaaatataagcgccataaattttcattctgttgttgaaaagtatgtaagtgaattttttaagcgaggttttggttcaggtaaacgagagtttattatgtttccatatgattcacgattagatgataaaaaattcttatactcagctcccagaaataaatcccatattgatacttgtttgcatgcctatatttttcggcctgaagtgtatcagttacctatttgtaaattaaaagaactatttgaagaaaatagaaaacttcagcagtttagtccactttcagattatgaaggtcaagaagaagaaatgaatggtacaaaaatgaaatttggaaaacgaaataactcaagaggtgaagccattatatctggaaagcaaagatcatctcattctttggattatgataaggatagagtcaaagaattgattaatttaattcagtgtaggaaaaagagtgtgggtggggactcagacacagaagatatgagaagcaaaactgtcttgaagaggaagcttgaggatctacctgaaaatatgagaaagctcgccaaaaccagtaatttatctgaaaattgccatctgtatgaagagtctccacagcctattggctcacttggacatgatgctgacttgaggcggcagcagcaggatacctgtaactccggcattgctgacatccataggctgtttaattggttatcagaaacactagcaaatgcgcgccattctgatgcatctctgacagacacagtcaacaaagccttaggattgagcactgatgatgcctatgaagagctgaggcaaaaacatgagtatgagttgaactctaccccagataagaaagactatgagcagcctacttgtgcaaaagttgaaaatgcacagtttaagggtactcagagcttattactagaagttgatgcaacatctaagtattctgttgctatttctaccagcgaagtgggcactgaccataagctacatttgaaagaagatccaaatttaattagcgtgaataattttgaagattgcagtttgtgtcccagtgttcccattgaacatggatttcgtagacaacagtctaagtcaaataatgttgaagagactgaaatacattggaaactgattccaattacaggagggaatgcaagaagcccagaagaccagctggggaaacatggtgagaaacaaacaccagacacactaaagggcaccactgaggatgacgtgttgacaggtcaggtggaggagcagtgtgtgccagcagcagaggcagagccgcctgcagtgagcgaaaccacagagaggacagtgttaggagagtacaatctcttttctaggaagatagaagagattttgaagcaaaagaatgtttcatatgtcagtagagtttccacacctatcttttcaacacaagagaagatgaaacggctttccgagttcatatattctaagacttccaaagctggtgtgcaggagtttgtagatggtttgcatgagaagctaaatactattattattaaagcatcagccaagggtgggaatttgccaccagtcagtcctaacgattctggtgctaagatagcatcgaatcctctggaaaggcatgtcataccagtttcctcaagtgacttcagcaataaacatctccttgggccactgtgtagtgatcctttgaaagataccaactctgatgagcagcattccacttcggctttaactgaagtagaaatgaaccagcctcaacatgccacagagttaatggtgacttctgatcatattgtacctggtgatatggcccgggaaccagtagaagaaacaacaaaatcccccagtgatgtaaacatttctgctcaaccagctctttcaaattttataagccagttagaacctgaagtatttaatagtttggttaaaatcatgaaagacgtccagaaaaatactgtgaaattttatattcatgaagaagaagagagtgtgctctgtaaagaaataaaggaatatcttatcaaattaggcaatacagaatgtcatcctgaacagtttttggaaagaagatcaaaattagataaactattgattattattcaaaatgaagacattgcaggtttcattcacaagatacctggcttggtgactttaaagaagctcccctgtgttagttttgctggtgttgatagcctggatgatgttaaaaatcatacatacaatgaattatttgtatctggaggttttatcgtatctgatgaatcaattctaaacccagaggttgtcacagttgagaaccttaaaaattttttgacattccttgaggaacttagtactccagaaggaaaatggcaatggaaagtccactgtaaatttcagaagaaactaaaggaactaggcagattgaatgctaaagctctaagtctgttgacgcttctgaatgtctatcagaagaaacatctggttgaaattttgtcataccacaattgtgattcacaaactcgaaatgctccagaattggattgccttatcagacttcaggctcagaacatacagcaacgacacatagtctttttaacagagaagaacatcaagatgctttccagttatacagataatggaatagtggttgcaactgctgaagacttcatgcaaaactttaaaaatcttgtgggctatcacaattcaatcacagaagaaaaccttccacagcttggtgctaatgagaatcttgagtcgcagtcagctcttttagaaaacgatgaaaaggatgaagaggatatgtctctggattcaggggatgaaatctcacatatagaagtatgcagcaattttcattcagaaatatgggagaaagagaccaaaggatcacgtggaacagatcaaaaaaagaatactcaaattgagttgcaatcgtctcctgatgtgcaaaacagtttattagaagataagacttaccttgattctgaagagagaacttctattgatatagtatgctctgaaggagagaacagcaattcaacagaacaagattcatatagtaactttcaggtttatcatagtcaattaaatatgtcccatcagtttagtcattttaatgttctcactcatcagacatttttggggacaccatatgccctttcatcaagtcagtctcaagaaaatgagaattacttcttatctgcttatactgaaagcttggatagagataaatctccacctcccttaagttgggggaaaagtgattcttccaggccatattcacaagagaaataactgtagtaactttttttttaagagattgttgtggactttgtttattaacaatttatatttcattctctaaacaaaaggttcttgttctttctcaaatgttttttcttttatttaaatcatgatggcctgtaacagttgaagcatctaaaaattgaaataaatatatatttttaacatatattgtacttgaattatctcatgttggcacttctaagttttactttttgtatgttacctgtacttaggcttcaaattgaagcctgttttatgtgtaaaatcagatgcttgcaggaggacggtaaacagcaaaggctttacttctttttctctaatgtcacctgatataaagtacttttgttgaagtgaattattttgatgtaggcttttgtatactgtgtttacacaggtataagtcagtaatagcagtgttaatatttacaggattttggctcgatacctcaagatttatctaacagtgcagtttcatttagataataaactatgtacataggacacattttttatctctaggcttagtcatgtaaaaactgcctattgctaaaattctggtaactttttgagagtattggataattttcagtacctgcgcaatccttgatttaatgaaattaaattttttatttcaaaagataggcttctgtttatcaaaggcgttgaacaatttgatttttaaattagttttagcaaaatggaagtataatgggaatatatttttgaggtggtcttagtagtaattaccatttgttgaacacattaatgctatactagacagatacagtggagatagctttcaaacccgtatctattcctaactactgcctctaatactaattactaacttgttactaatgctaacttttaaaaatgtttttggaaattgcaatttctacaaataaatgtcatagtgcaaataaatgtcaggatttagagaaggagcctaaactgaatttgtgttatttcagtaaaagttatggagttatgggtctagacgtgttaataagttagacagaactttggcactttagaacaaatgcatgagtggtatttcagttcctaagttacataaaaagtgtgaaagaacactgtgaggtcccagcaacgccagactatattaaggtaagtagaaagtgtttttatagggcttcaatacccaggtggtgacagagcagaagaaccggttttttttttttttttttactactaagcttttacaaaagaagtatctgttttattgtatagaacaagtacagcattttactacatagtatacaagtttttaatgagcatttaaaaaaataagtaaatctaggctatttgaaaaatacagttgagccagtgagcacattttataatttggaagacacaaatcaaatgtgaaggatttgattttctacatttaaaatgaagaaccaaaactctcttcttgattttcagctaaaggcaggagactactttccaactccttttgcttctggagaaggccctgaaatcacattgatatatgtttgttagtaaaatgtgcacacctgacttgcaatgttgtgttaaactagaattatattcacttggaaaacatatcgcttaggataaaattttgtcattcaaaaattttttcagaaatgcttgtactagaccacctcatttggatatatagctatcacatttgtaagattctgtttttagcataaaaatcaatagggatgaaaattttcttagaactcaagactccataactatgggggtaaatgaagtcatcccttctcccccagtccacccccaagtgctcttagatactgaaggagtctcccttaacatacagtgtttttttttgttgttgtttttttgtttttttttggagatggagtctcgctctgtcgcccaagctggagtacagtggtgcaatctcactgcaagctctgcctcccaggttcacaccattctcctgcctcaacctcccgaatggctgggactacaggcacccaccaccacgcctggctaactaactaactaactttttgtatttttagtagagacagggtttcactgtgttagccaggatggtcttgatctcctgacctcatgatctgcctgcctcagcctcccaaagtgctgggattacaggcttgagccactgctcctggccaacatccagtattttatcttgactgtcctaaccttaccttagatgctaacagaagggtcctgctcaaataacactgggtgctatattgatgggtaaatgtgtacatcctattccttcctctttatctcacaatttttgtctccactaagcaagaagtaaactaacacttcgtcactctaaagaaataacttatgtaaaactcttagtaaccctgtttgtcttcaaatgagtaaatagaccaaagtggggggacaattttctagttctgtagagggaaaaacatctgagtcaacattttcaaatgcagagggtattggtacgtcgacgcggccgcg

SEQ ID NO: 23264 - DNA, 9501 bp, Homo Sapiens
ggccccaatgagtggcacacagtctactatcaccgacaggtttcccctcaaaaaacctataaggcatggaagtattttgaaccgagagtcaccaacagataagaagcagaaagttgagcgcattgcatcacatgattttgaccccacagatagctcctccaagaagacaaagtctagttcagaggagagtagatccgagatatatggtcttgttcagcgttgcgtaatcatccagaaagatgacaatggatttgggctgacggtcagtggagacaatccagtcttcgtacagtctgtcaaagaagatggagcagccatgcgggctggagtacagacaggtgatcgaatcatcaaggtgaatggaactctggtgactcattcaaatcatctggaggtggtgaagctaatcaaatctggttcctatgtagctctcactgttcagggacgcccacctgggtcgccccagattccacttgccgactctgaagtagagccgtcagtcattggacatatgtctcccatcatgacatctcctcattcacctggagcatctgggaatatggagagaatcactagtcctgtgctcatgggggaggaaaacaatgtggttcataaccagaaagtagaaattctgagaaaaatgttacagaaagaacaggaacggctacagttattgcaggaagattacaaccgaacacctgcccaaagattgctaaaagagatccaagaggccaagaaacacattcctcagctgcaagagcagttatccaaagccacaggctctgctcaggatggagctgtagttacaccctccagacctttaggggacaccctaacagtcagtgaggcagaaacagatcctggagatgtactgggcaggactgactgtagcagtggagatgcttctcggcccagtagtgacaatgcagatagtcccaagagtggcccaaaagagagaatttatctagaggaaaacccagagaaaagtgaaacaattcaggacactgacactcaatcacttgtcggaagtccctcaacccgtatagcacctcatattattggagcagaagatgatgattttggtactgaacatgaacagatcaatggacagtgcagctgtttccagagcattgaattactaaaatctcgcccggctcatttggctgttttcttacaccatgtagtttcacaatttgaccctgcgactttgctctgttatctctattcagacctgtataaacataccaattccaaagaaactcgtcgcatcttccttgagtttcatcagttctttctagatcgatcagcacacctgaaagtttctgttcctgatgaaatgtctgcagatctagaaaagagaagacctgagctcattcctgaggatctgcatcgccactatatccaaactatgcaagaaagagtccatccagaagttcaaaggcacttagaagattttcggcagaaacgtagtatgggactgaccttggctgaaagcgagctgactaaacttgatgcagagcgagacaaggaccgattgactttggagaaggagcggacatgtgcagaacagattgttgccaaaattgaagaagtattgatgactgctcaggctgtagaggaagataagagctccaccatgcagtatgttattctcatgtatatgaagcatttgggagtaaaagtgaaagagcctcgaaatttggagcacaaacggggtcggattggatttcttcccaaaatcaagcaaagtatgaagaaagataaagaaggggaagaaaaagggaagcgaagaggattccccagcatcctgggacccccacggagaccaagccgtcatgacaacagtgcaattggcagagccatggaactacagaaggcgcgccaccctaagcacttatccacaccctcatctgtgagtcctgaacctcaggactctgccaagttgcgccagagtgggttagcaaatgaaggaacagacgctggatacctgcctgccaattccatgtcttctgtagcttcaggggcctctttttcccaggaaggagggaaagagaatgatacaggatcaaagcaagttggagaaacatcagcacctggagacaccttagatggcacacctcgtactctcaatactgtctttgatttcccaccacctccattagaccaagtgcaggaggaggaatgtgaagtagaaagggtgactgaacatgggacaccaaagccctttcgaaagtttgacagtgtagcttttggagaaagtcaaagtgaggatgaacaatttgaaaatgacttagagacagacccacccaactggcagcagcttgttagtcgagaagtgttactgggactaaaaccttgtgaaatcaaaagacaggaagtgattaatgaattgttctacactgaaagagctcatgttcgaacactgaaggttcttgatcaagtgttctatcagcgagtatccagagaaggaattctgtcaccctcagagctacggaaaattttttcaaacttggaagatattcttcaacttcatattggattgaatgaacaaatgaaggctgttcgaaagagaaatgagacctctgttatcgatcagattggggaagatttgctgacatggttcagcggaccaggagaggagaaattgaaacatgctgctgctaccttttgcagtaaccaacctttcgccctggaaatgatcaaatctcgtcagaaaaaggattctcgatttcagacttttgtgcaagatgctgaaagtaatccactgtgtcgtcgtcttcaactgaaggatattattcccactcaaatgcaaaggcttactaagtacccacttctgttggataatattgccaaatacacagaatggccaacagaaagggagaaggtgaagaaagctgcagatcactgtcgtcagatcttaaattatgtaaatcaggctgtcaaggaggcagaaaacaagcagcgcctagaagattatcagcgtcgccttgatacctccagcctgaagttgtcagagtacccaaatgttgaagagctcaggaatttggatttaacaaaaaggaagatgattcatgaagggccattggtttggaaggtgaatagagataaaactattgatttatacacgttgctgctggaagacattcttgtattgttacaaaagcaggatgatagactggttttaaggtgtcatagtaagattctggcatctacagctgatagcaaacacacgtttagccctgtcattaagttgagtacagtgttggttcgacaagtggcaacagataacaaagctttattcgtcatttccatgtcagacaatggcgctcagatttatgaactggtggcacagacagtttctgaaaagactgtctggcaggacctaatctgtcggatggctgcatcagtgaaggagcaatccacaaagccaattccattaccacagtcaacacctggcgaaggagataatgatgaagaagatccttcaaaattaaaagaggagcagcatggcatttcagtcactggtttgcagagtccagacagagatttgggattagaatctaccttaatatcgtcaaaacctcagtctcattcactgagtacctctgggaaatcagaggtacgtgatctgtttgtggctgagagacagtttgcaaaggaacaacatacagatgggacactaaaggaagttggagaagattatcaaatcgcaatcccagattcacacctgcctgtctcagaagaacggtgggcattggatgcactaagaaatttgggtttgttgaagcagttgctggtgcaacagctaggtttgactgagaagagcgttcaggaagactggcaacatttcccaagatacagaacagcctctcaggggccgcagacagacagtgtcatccagaactctgaaaatattaaggcctatcattctggtgaaggacatatgccctttagaactggaactggtgacattgcaacttgttacagtccacggacttcaactgaatcttttgctccacgggattcagtgggactggcaccccaggatagccaggcaagtaacattttagtaatggaccacatgattatgaccccagagatgcctaccatggagccagaagggggtcttgatgacagtggagagcacttttttgatgcccgtgaagcacatagtgatgagaatccatcagaaggtgatggagcagttaacaaggaagagaaggatgttaatttacgcatctcaggaaactatttgatccttgatggctatgacccagtgcaggagagttccacagatgaggaggttgcttcctcacttaccctgcagcccatgacaggcatccctgctgtggaatccacccaccagcagcaacattctcctcagaatactcactccgatggggcaatttcaccattcacccccgaatttctggtccagcagcgctggggagctatggagtattcctgttttgagatccagagtccctcctcttgtgcagattcacagagccagatcatggagtacattcataagatagaggctgaccttgaacacttaaagaaggtggaggaaagttacaccattctttgccaaaggctggctggatcagccctcacagacaagcactcagataaaagttagagccgcatgtcctggaggtgactgcaggttgttggatttggagtatcggccgtgtctcaccacatcctggctccagtgtggatgcagagagagtgtgacagaggatctgcctgtgaaccacctgggattagtcaagtcccaaggtgcccagagtgggactagttcttcacagtgtggcagctgcactaatctgtttgtgagggaatatccattccctcactctactctcctcactatcggaaattcattttgattcagaataaaaaccaaatgtatagagctttgggtgtaggatatgaaattgtacttagatttaagaaaaagagaaaatcagatgtatttatttgacttcattccgtatttgaaagcacattttaatttttatttgccttgttttgttttaattgagtagtgagagttttagacctttgtctttagtacacccaaggatcaactgctcctgaagcaaagaggtcaggatggagtatgcagaagttgggtagagaggttaagaagaggaggaagtgagacggggaagggaggagcaccttgcttcactatacagtattccaagctctctgctgtccagtaggctgcttctctgagggtcacctcaaaggtatgctatgccgtgtggctcttatgtgcccaggtggtgtggtcagagagtggatgggcttcctcccgccctgaggcaagcacctcttctctgtagctgggatcaaccacaattaataggaatcctcaacatactaaatagcaggcacttgaaaatgggtgtgttttcttccattgtcgtcttttctattgagggttgggatttgggtgggagaggaaagcaaattttattttcttgactataaatttgttattcttggtatcatttcatttttataattatacattagacattggcacttgtgtaaaactgtccctgcagattgagcaggaagtaaaaacaaatggaaatgcttcggatagtggcaggggtgggggttgctaaggaaagggtgggatgggagtgggtaaagagtttgggaaggttatctaactgaatcactactgagttgaatcatggctatcattagccacaggtactgctgattataaggccagtaaaattttagtacctggaggtttgactctaatttttgcactgatggtgccaaagggccctgagtcaaaaggatagccaagggtggagtggaaaaagatatggtgaaggcagaactgctcacaccagctccagaagcacgtcctctgacttcactgccgcagctctttccacacggggccgtgattgaccctaaaaattgcagaccagcacatacactggacactgcaggcaaggtgttggtaactgcctgctctaggatgaatagtagcgttagcagcaccctacagagggtaagtttcagaattgtaatttgagaactccttcaattatattgactttctttggttttccttgtgcattaggtatatattttttgaagtatttttgccaactaaaatgaagtctgtaaattctgttaataaacaaggagttcatccgttgctcacatctttcattggtgccctctgaactctgtgggttgctaggatgtaattttaatgcttccctgcagtccaaagatgattttttcaccacaaatggtaagggatgcccacctacttttataaacaccactgcaacttaacaagtttatttatctatgtccagatttctgtttctgtcctaaattgatctgtgtttttaggtggatcaacttggatctttagacctcatctataaattgaaattatatttttagtcataagccaagtacaatctaactcagaatgggattaaaaattttagaagcagaagctaatatataaatgaagtttgggatttggaactttctgtatctcttaggaggaacaagtaaaaaccaaatggttacattgtgctgctagaaataatgtcattctcaattaaaagggttacacctgtagccacttgacactaacaccatcgagggcaattaatcaggagaaaagtaaatataaaaactttgctcttaacgtcacacactacagggtaattatgtaattctctagcactcaattaagaagcttgtaggttagcaaaatttcagtttctctagttcagccagtgtcttgtccttagtaattatttgctttccctgcagttcaatttctccttggaactctaacaggactaactggaaaaatactttgaccatagctctagtacttccaaataaattcatatctagattttcaaacaaagccccaagatgaagtctaattctgaaaatatctcacaatttttgaatgttctttttatcttaccgacctaacttctcttttccctcccaacttggcctcccacacgttccatttcattttggccattatagtcacatccgtttgactttggttgtgacatcttcctttcaggatgatggaattagatgcagtctgtctttgagtgagactggtcaccatcagaggagttttttctaagtgacgtgactagaagttgaaatctacttccctgctaaagggcacaggggtggtgtacaaagaaagctaccttcccagagcaagcaggctgcattttagctatggaagtgacctgctgtgacactgtgctctcttctgtgggcttaatggttcctttgctatgaagtggcaaattacatgtagagtgtctccttccttttcagagaacagttaatcaaggcaaatcagcaagcccccaaagtgctgtaatttaacatcatgattaccaccttcgaagctatatattttgcatactttaaaatcacctaacttggactgcttgaattacattggcttttagaaccgaaattgtaactatgtattgtatttcatgggaggtatattttatgagctttttggctttcttttttcccacagcaactgccaatgaaggatgaatcccctttttaaaaagttgttgttgttgttgtttatttgattttgagttaggagggataatagagaagtccatttaaaaattatttttagaagctaaagaaagtaattatgcttcctgtgaattgtcttttactggcatctttgttttcctctttgatgttagtaaatttggtgtaatacgtggggcttccatatttcaaagtggaagctttcttctctgaagtcgatatatggttttgaattactagagctttggtcagtatttccttccctatatgtcacagagggcaccactgagaactgcgtgcataggacctcaaaatacaaaattagcagggcctcacagtcagcttcctcatggctagtttttcccccttatattacaatttttgttttataagtcatttttttcctgatatttccaccacttttcagagtcatctacaaaatttttctttcctcaagaaaagagttccttttgccttattccttatgccttccccactggtattgagggttttgataataaattggtaggaaaaaaaagtacctcctagaaggaagccttccccaccatttccaggtgccaactgctaagcagatatattccaaaaatggtaactgtcatgtgcacactgttggttatttttaataagcctcttcctactagaacattttattttccttgttcaccatacaatcatgtactctttaacagaaattgcttttaaaaaatatctggaactatctttaaaaaaactttattaataatcatgtatttttactgatcacattttgaaatgcctaaaagactttattgttctaattatccagatgtacctttgtaaaatagctcttttatgaattagctgataaggctgtatgtttctggaacaaaatattggtcatctaaaaactttctgttttctggggtctgggaaaatagaaaataagatttcaaatattaaataagcttaaaggaaccaagcatgtgacttttactttgtattctggttgatttgtcttgtccaagttatattagaaaagttgaggagtcgaggagcctgtaattaattttcctgtcagtgactgtcagacatcttcctgcttattagagcatccctagcaacaaggctaaaccttcatgacagtgctggcaggtgggcttgccctagcatgtggggcaggtttgttgtttttttaatagctttattgagatattcacatatcatataattcatccatttaaagtgtataatcagatgggttttggtatattattgatttttaattgtggtgaaatatatatataacaaaatttgctattgtaactatttttaagtataaagttcagtgaggtaggccagcttttatgacgcacctgaagataactttggttttaatcctaccctaaatgaagcatatgcctctatttttcctgtccccagtgctgggcttcttcacataccaacatttctgtgcttttaccaacagcattttagctcagaaggctcgcttactttgggcatttgctgtattttggttttgaaatacttgtaatttgacttattcttgggataatattttagttttcagtcattcaagggcacatttggctgacggagctaataagcgtaataaaatgcttagtagtttataccatcttttagttaaacattttaaagattaagactattcaaatgtactttgcggaaattaacctgtttgtatgcctggctttgtttacaaacatatatctatatctatatatatagatacagatacagatacatatctggtggaacaaagaaatacctgtaccattcccacttgctctttgatagccacctcctaggaatggagacaataaaactctgtatttgcatgtg

SEQ ID NO: 23265 - DNA, 2296 bp, Homo Sapiens
ggcggtggctatacttattaaagttggcgggaatgagcgatcagtcggtcctgggctggctgtggtgtagggcgttgcaggcagcgctcacctcctcaggccggcagaatgcgggtggctgtggctggctgctgccacggcgagctggataagatctatgagacgctggcgctggcagagcggcgcggcccggggcctgtcgacctcttgctgtgctgcggcgacttccaggcggtgcgcaacgaggcggatctacgctgcatggccgtgccgcccaagtatcgtcacatgcaaaccttctacaggtattactctggagagaaaaaggctccagttctcacgctcttcattgggggaaaccatgaagcctcaaatcatttgcaagagttaccctatggtggctgggtggcaccaaacatttattatttaggtttggctggtgtggtaaaataccgaggtgtaaggatcggtggaatctctggtatctttaaatctcatgactatcgaaaaggtcattttgagtgccccccttataattcatctacaatcaggagtatatatcatgtgagaaatattgaagtctataaattaaaacagctgaagcagcctatagatatattcttgtctcatgattggccaagaagtatatatcattatggaaataagaagcaacttcttaagactaaatcttttttccgacaagaagtggaaaataacacattaggaagtccagctgcctcagagcttttagagcatctcaaacctacttattggttttctgcccaccttcatgtgaagtttgccgccttgatgcagcatcaggcaaaggataaaggacagacagccagagcaaccaaatttttagccttggacaaatgcttaccacatagagattttcttcagatattagagatagaacatgaccccagtgctcctgattacttggaatatgatattgaatggctcactattctcagggctacggatgatcttattaatgtgactgggcgcctgtggaatatgccagaaaataatggcctgcatgcaaggtgggattatagtgcaacagaagaaggtatgaaagaagtattggaaaaattgaatcatgatctcaaggttccatgtaactttagtgtaacagctgcttgttatgatcctagcaagccacagacacaaatgcagctgattcataggatcaatcctcagacaactgaattttgtgcccaacttggcatcatagacatcaatgttaggcttcagaagtccaaggaagaacatcatgtgtgtggtgaatatgaagaacaggatgatgtggagagtaatgactctggagaagaccagagtgaatataatacagacacatctgctctgtcttctattaatccagatgaaataatgttagatgaagaagaagatgaagatagtattgtaagtgcacatagtggcatgaatactaccatcggtagaagccttctgatcaagcttctgagtttctgcagtttctctgatgtcaggatcttgccaggctctatgattgtatcttctgatgatacggtggattccacaattgatagagaggggaaacctggtggactcgtggagtcagggaatggagaggacttaaccaaggtgccattgaagaggctgagtgatgaacatgaacctgaacaaagaaagaaaattaagaggaggaatcaagccatttacgctgcagtggatgatgatgatgacgatgcagcttaagatgatttacttgttttgtttttgtgtttgttttgtttttttgagatggagtttcactcttgtcacctagactggagtgcaatggcgtgatctcggctcaccgcaacctccgcctcccaggttcaagcaattctcctgcctcagcctcccaagtaggtgggactacaggtgcccgccaccacacccggctaatttttgcatttttagtaatgacagggtttcaccgtgttggccaggctggtctccaactcctgacctcaggcgatccacctgtcttggccttctaaagtgctgggattacaggcgtgagccactgtgcctggccgacaatttacttgtcttagtattatatgtagatatgtgattttttgagactgtatttttagagctgaatttttgactaaagacttaactttataataatgaagatacattagagaattttagttagatattgactttatctttaggcttttgtatgtttcagatgcaaacatattaaagtttcatatatttaaaaaaaaaaaaaaaaaaaaaaaaaaaaaaaaaaaaa

SEQ ID NO: 23266 - DNA, 4188 bp, Homo Sapiens
gccggggaacaagccacaggagagcgactcaggaacaagtgtgggagaggaagcggcggcggcggcgccgggcccgggggtggtgacagcaggtctgaggttgcatcataaatacaaaggactgaagttataaaagagaaaagagaagtttgctgctaaaatgaatctgagcaatatggaatattttgtgccacacacaaaaaggtactgaagatttaccccccaaaaaaaattgtcaatgagaaataaagctaactgatatcaaaaagcagagcctgctctactggccatcatgcgtaaaggggtgctgaaggacccagagattgccgatctattctacaaagatgatcctgaggaactttttattggtttgcatgaaattggacatggaagttttggagcagtttattttgctacaaatgctcacaccaatgaggtggtggcaattaagaagatgtcctatagtgggaagcagacccatgagaaatggcaagatattcttaaggaagttaaatttttacgacaattgaagcatcctaatactattgagtacaaaggctgttacttgaaagaacacactgcttggttggtgatggaatattgcttaggctcagcctctgatttattagaagttcataaaaaaccacttcaggaagtggagatcgctgccattactcatggagccttgcatggactagcctacctacattctcatgcattgattcatagggatattaaagcaggaaatattcttctaacagagccaggtcaggtaaaactagctgattttggatctgcttcaatggcttctcctgccaactccttcgtgggcacaccttactggatggctccagaggtgatcttagctatggatgaaggacagtatgatgggaaagttgatatttggtcacttggcatcacttgtattgaattggcggaacggaagccgccccttttcaacatgaatgcaatgagtgccttatatcacattgcccagaatgactccccaacgttacagtctaatgaatggacagactcctttaggagatttgttgattactgcttgcagaaaatacctcaggaaaggccaacatcagcagaactattaaggcatgactttgttcgacgagaccggccactacgtgtcctcattgacctcatacagaggacaaaagatgcagttcgtgagctagataacctacagtaccgaaaaatgaaaaaaatacttttccaagagacacggaatggacccttgaatgagtcacaggaggatgaggaagacagtgaacatggaaccagcctgaacagggaaatggacagcctgggcagcaaccattccattccaagcatgtccgtgagcacaggcagccagagcagcagtgtgaacagcatgcaggaagtcatggacgagagcagttccgaacttgtcatgatgcacgatgacgaaagcacaatcaattccagctcctccgtcgtgcataagaaagatcatgtattcataagggatgaggcgggccacggcgatcccaggcctgagccgcggcctacccagtcagttcagagccaggccctccactaccggaacagagagcgctttgccacgatcaaatcagcatctttggttacacgacagatccatgagcatgagcaggagaacgagttgcgggaacagatgtcaggttataagcggatgcggcgccagcaccagaagcagctgatcgccctggagaacaagctgaaggctgagatggacgagcaccgcctcaagctacagaaggaggtggagacgcatgccaacaactcgtccatcgagctggagaagctggccaagaagcaagtggctatcatagaaaaggaggcaaaggtagctgcagcagatgagaagaagttccagcaacagatcttggcccagcagaagaaagatttgacaactttcttagaaagtcagaagaagcagtataagatttgtaaggaaaaaataaaagaggaaatgaatgaggaccatagcacacccaagaaagagaagcaagagcggatctccaaacataaagagaacttgcagcacacacaggctgaagaggaagcccaccttctcactcaacagagactgtactacgacaaaaattgtcgtttcttcaagcggaaaataatgatcaagcggcacgaggtggagcagcagaacattcgggaggaactaaataaaaagaggacccagaaggagatggagcatgccatgctaatccggcacgacgagtccacccgagagctagagtacaggcagctgcacacgttacagaagctacgcatggatctgatccgtttacagcaccagacggaactggaaaaccagctggagtacaataagaggcgagaaagagaactgcacagaaagcatgtcatggaacttcggcaacagccaaaaaacttaaaggccatggaaatgcaaattaaaaaacagtttcaggacacttgcaaagtacagaccaaacagtataaagcactcaagaatcaccagttggaagttactccaaagaatgagcacaaaacaatcttaaagacactgaaagatgagcagacaagaaaacttgccattttggcagagcagtatgaacagagtataaatgaaatgatggcctctcaagcgttacggctagatgaggctcaagaagcagaatgccaggccttgaggctacagctccagcaggaaatggagctgctcaacgcctaccagagcaaaatcaagatgcaaacagaggcacaacatgaacgtgagctccagaagctagagcagagagtgtctctgcgcagagcacaccttgagcagaagattgaagaggagctggctgcccttcagaaggaacgcagcgagagaataaagaacctattggaaaggcaagagcgagagattgaaacttttgacatggagagcctcagaatgggatttgggaatttggttacattagattttcctaaggaggactacagatgagattaaattttttgccatttacaaaaaaaaaaaaaaaaagaaaacagaaaaaaattcagaccctgcaaaaccacattccccattttaacgggcgttgctctcactctctctctctcttactcttactgacatcgtgtcggactagtgcctgtttattcttactccatcaggggcccccttcctccccccgtgtcaactttcagtgctggccaaaacctggccgtctcttctattcacagtacacgtcacagtattgatgtgattcaaaatgtttcagtgaaaactttggagacagttttaacaaaaccaataaaccaacaacaaaaaaagtggatgtatattgctttaagcaatcactcattaccaccaatctgtgaaagtaaagcaaaaaataataataataaatgccaagggggagagagacacaatatccgcagccttacaccttaactagctgctgcattattttattttattttatttttttggtatttattcatcaggaataaaaaaaacaaagttttattaaagattgaaaatttgatacattttacagaaactaattgtgatgtacatatcagtggtgacatattattacttttttggggacgggggtgggtggggtgaagagatcttgtgattttagactgctgcagagttaacttgtctcagcatatctgatgtatcataatcatttctgctgtgcagaggagggatacacttaggggctcacagatcccagtagcacaattgggctttggcaaatgggtattttgtgtatagaggaatttaaggagaggtattacttattttcatattgtattttaactgtttctcggatcaaattttttaacttcttcttcgtgttcttccccacctccttccttttccagttcagtatttggagttcaacactgtctctcaatcagatcatctggatctttttctttatctcccttccccttcctaagtcccatttcttggtcataaatattgcattattcacactttcaaactgtgtattttcttacaataaaaaatgatgaaaaaaaaaaaggctttacttcttttgcatgcactttaaaaacaaaacaaaacatttttcaggttccaaggaagagcatgataactgtcagagcttttaattatatttgtaaataaaagtgttcatcacaaaaaaaaaaaaaaaaaaaaaaaaa

SEQ ID NO: 23267 - DNA, 2103 bp, Homo Sapiens
ctgggctttgggagggagaaagagggacctagcgcgggccagcggcgcacggtgggcagctgcaatggcgctgtcgtgtacccttaacaggtatctgctcctcatggcgcaggagcatctggagttccgcctgccggaaataaagtctttgcttttgctttttggaggtcagtttgccagcagtcaagaaacttatggaaagtcaccattttggattcttagcattccctctgaagatattgcaagaaatttgatgaaacggacagtgtgtgccaagtctatatttgaactatggggtcatggacaatctcctgaggagctgtacagttctcttaaaaactaccctgtggagaagatggttccatttctacattcggactctacatataaaataaagattcacacttttaataagacattgacacaagaagagaaaatcaagcgaatagatgcacttgaatttctgccatttgaaggaaaagtgaatttaaagaaaccgcaacatgtattttctgttttggaggattatggtttagacccaaactgcatccctgagaatccgcataatatttattttggtagatggattgcagatggacagagagagcttattgagtcatacagtgtcaaaaagagacactttattggaaatacaagtatggatgctggtttgtcattcattatggctaaccatggaaaagtgaaagaaaatgatattgtctttgatccatttgttggaacaggtggcctgctgatagcatgtgctcattttggtgcatatgtgtatgggacagacatagactacaacacagttcatggcttggcctgctcaacatgaaggtgatgaggatgaagacctttatgatgatccacttccacttcatgaatagtaaatctatttttactgaataaagtaattatggaaaatattttaaactctagaagcttcaataatgatgtgtgattggatggaattgaatcaaactgaaaaagtatttcttatagcttaatggaaaggctactaggaaaaaccagaagtggagaggaccagatgaaaacattagggccaatcttcgtcaatatggtttagagaagtattaccttgatgtcctggtttcagatgcatctaaaccttcctggaggaagggcacatattttgatgcaatcattactgatcctccatatggtatcagagaatctacaagaagaacaggttcacagaaggagataccaaaggggatagaaaaatgggaaaaatgtccagaaagccatgttcctgtttccttgagttatcatctgagtgatatgtttcttgacctgttaaacttcgcagctgagaccctcgttttaggtggaagactagtctattggttaccggtgtatacgccagaatacactgaagagatggtgccttggcaccttgcctggaactcgttagcaactgcgagcagaagctttccagtcacacatcaaggcgcttgatcacaatggaaaaggtgaagaaatttgagaatcgggaccagtattcacatctgctaagtgatcattttctgccataccaaggtcataattccttccgtgagaaatattttagtggggtaacaaaaagaattgccaaggaagaaaaatccacccaggaatgaaaattaagattttgacaatgaagaaagaataagaatttgatttaaaaagacatctggatgtgaactttcatgtatgatccagaaaataggtacggttttaaaatattttatatagaaaagctacaaagtaaattgagcaatgcttttaaagttatctttgttttatagacttttttgttgtatgtattacagtctttataatcttatttaatgtatatttgtactttcaagtactgatggagatagactcaaaacagttatttttttacaattaatctacaaagggaattaatattgttgacttttaaaacatctgctggatatattatatgcaattaatagtagttaagaatttattcatttggtagatatgtttatttggtttttggttgtcatcgatttacattgccactaataaaccatattgagaatttctaaaaaaaaaaaaaaaaaaaaaaaa

SEQ ID NO: 23268 - DNA, 1755 bp, Homo Sapiens
acacacgctatgccttaaattgggccaggctgaggcgctgctgctggagcggccgatccgagacgtggctccctgggcggcagaaccatgttggacttcgcgatcttcgccgttaccttcttgctggcgttggtgggagccgtgctctacctctatccggcttccagacaagctgcaggaattccagggattactccaactgaagaaaaagatggtaatcttccagatattgtgaatagtggaagtttgcatgagttcctggttaatttgcatgagagatatgggcctgtggtctccttctggtttggcaggcgcgtcgtggttagtttgggcactgttgatgtactgaagcagcatatcaatcccaataagacattggacccttttgaaaccatgctgaagtcattattaaggtatcaatctggtggtggcagtgtgagtgaaaaccacatgaggaaaaaattgtatgaaaatggtgtgactgattctctgaagagtaactttgccctcctcctaaagctttcagaagaattattagataaatggctctcctacccagagacccagcacgtgcccctcagccagcatatgcttggttttgctatgaagtctgttacacagatggtaatgggtagtacatttgaagatgatcaggaagtcattcgcttccagaagaatcatggcacaccctcatgcaactggagtctgtttaaggaacatcataaaagaacgaaaaggaaggaacttcagtcaacatatttcattgactccttagtacaagggaaccttaatgaccaacagatcctagaagacagtatgatattttctctggccagttgcataataactgcaaaattgtgtacctgggcaatctgttttttaaccacctctgaagaagttcaaaaaaaattatatgaagagataaaccaagtttttggaaatggtcctgttactccagagaaaattgagcagctcagatattgtcagcatgtgctttgtgaactgttccgaactgccaaactgactccagtttctgcccagtttcaagatattgaaggaaaaattgaccgatttattattcctagagagaccctcgtcctttatgcccttggtgtggtacttcaggatcctaatacttggccatctccacacaagtttgatccagatcggtttgatgatgaattagtaatgaaaactttttcctcacttggattctcaggcacacaggagtgtccagagttgaggtttgcatatatggtgaccacagtacttcttagtgtattggtgaagagactgcacctactttctgtggagggacaggttattgaaacaaagtatgaactggtaacatcatcaagggaagaagcttggatcactgtctcaaagagatattaaaattttatacatttaaaatcattgttaaattgattgaggaaaacaaccatttaaaaaaaatctatgttgaatccttttataaaccagtatcactttgtaatataaacacctatttgtacttaattttgtaaatttggatttttatatatcatattttcttaattcattggacacatttgacttactgcacagtatattgatcattttaatgggaaactttagctttctactttttaattttggtttttcactttctatgccattatttttggattctttttcttagtgtgagctctaaaatcaatgttcttgaaaaagaaattattttgaaaaaaaaaaaaaaaaaaaaaaaaaaaaaaa

SEQ ID NO: 23269 - DNA, 10011 bp, Homo Sapiens
ttcctccgcgaaggctcctttgatattaatagtgttggtgtcttgaaactgacgtaatgcgcggagactgaggtcctgacaagcgataacatttctgataaagacccgatcttactgcaatctctagcgtcctcttttttggtgctgctggtttctccagacctcgcgtcctctcgattgctctctcgccttcctatttcttttttttttttttaaacaaaaaacaacaccccctcccctctcccacccggcaccgggcacatccttgctctatttcctttctctttctctctctctctctctcttttttaataagggtgggggagggaaaggggggggaggcaggaaagacctttttctctcccccccgcaataatccaagatcaactctgcaaacaacagaagacggttcatggctttggccgccgcgccaccatctttcgggctgccgagggtgttcttgacgattaatcaacagatgtacagatcagctctcaaaatgtcttctgtgtcttctgagcgtcttctaagacaattgcattagcctcctgctagttgactaatagaattaataattgtaaaaagcactctaaagccacatgccttatgaagtcaatgctgggtatgattttacaaatatggtccggaaaaagaacccccctctgagaaacgttgcaagtgaaggcgagggccagatcctggagcctataggtacagaaagcaaggtatctggaaagaacaaagaattctctgcagatcagatgtcagaaaatacggatcagagtgatgctgcagaactaaatcataaggaggaacatagcttgcatgttcaagatccatcttctagcagtaagaaggacttgaaaagcgcagttctgagtgagaaggctggcttcaattatgaaagccccagtaagggaggaaactttccctcctttccgcatgatgaggtgacagacagaaatatgttggctttctcatttccagctgctgggggagtctgtgagcccttgaagtctccgcaaagagcagaggcagatgaccctcaagatatggcctgcaccccctcaggggactcactggagacaaaggaagatcagaagatgtcaccaaaggctacagaggaaacagggcaagcacagagtggtcaagccaattgtcaaggtttgagcccagtttcagtggcctcaaaaaacccacaagtgccttcagatgggggtgtaagactgaataaatccaaaactgacttactggtgaatgacaacccagacccggcacctctgtctccagagcttcaggactttaaatgcaatatctgtggatatggttactacggcaacgaccccacagatctgattaagcacttccgaaagtatcacttaggactgcataaccgcaccaggcaagatgctgagctggacagcaaaatcttggcccttcataacatggtgcagttcagccattccaaagacttccagaaggtcaaccgttctgtgttttctggtgtgctgcaggacatcaattcttcaaggcctgttttactaaatgggacctatgatgtgcaggtgacttcaggtggaacattcattggcattggacggaaaacaccagattgccaagggaacaccaagtatttccgctgtaaattctgcaatttcacttatatgggcaactcatccaccgaattagaacaacattttcttcagactcacccaaacaaaataaaagcttctctcccctcctctgaggttgcaaaaccttcagagaaaaactctaacaagtccatccctgcacttcaatccagtgattctggagacttgggaaaatggcaggacaagataacagtcaaagcaggagatgacactcctgttgggtactcagtgcccataaagcccctcgattcctctagacaaaatggtacagaggccaccagttactactggtgtaaattttgtagtttcagctgtgagtcatctagctcacttaaactgctagaacattatggcaagcagcacggagcagtgcagtcaggcggccttaatccagagttaaatgataagctttccaggggctctgtcattaatcagaatgatctagccaaaagttcagaaggagagacaatgaccaagacagacaagagctcgagtggggctaaaaagaaggacttctccagcaagggagccgaggataatatggtaacgagctataattgtcagttctgtgacttccgatattccaaaagccatggccctgatgtaattgtagtggggccacttctccgtcattatcaacagctccataacattcacaagtgtaccattaaacactgtccattctgtcccagaggactttgcagcccagaaaagcaccttggagaaattacttatccgtttgcttgtagaaaaagtaattgttcccactgtgcactcttgcttctgcacttgtctcctggggcggctggaagctcgcgagtcaaacatcagtgccatcagtgttcattcaccacccctgacgtagatgtactcctctttcactatgaaagtgtgcatgagtcccaagcatcggatgtcaaacaagaagcaaatcacctgcaaggatcggatgggcagcagtctgtcaaggaaagcaaagaacactcatgtaccaaatgtgattttattacccaagtggaagaagagatttcccgacactacaggagagcacacagctgctacaaatgccgtcagtgcagttttacagctgccgatactcagtcactactggagcacttcaacactgttcactgccaggaacaggacatcactacagccaacggcgaagaggacggtcatgccatatccaccatcaaagaggagcccaaaattgacttcagggtctacaatctgctaactccagactctaaaatgggagagccagtttctgagagtgtggtgaagagagagaagctggaagagaaggacgggctcaaagagaaagtttggaccgagagttccagtgatgaccttcgcaatgtgacttggagaggggcagacatcctgcgggggagtccgtcatacacccaagcaagcctggggctgctgacgcctgtgtctggcacccaagagcagacaaagactctaagggatagtcccaatgtggaggccgcccatctggcgcgacctatttatggcttggctgtggaaaccaagggattcctgcagggggcgccagctggcggagagaagtctggggccctcccccagcagtatcctgcatcgggagaaaacaagtccaaggatgaatcccagtccctgttacggaggcgtagaggctccggtgttttttgtgccaattgcctgaccacaaagacctctctctggcgaaagaatgcaaatggcggatatgtatgcaacgcgtgtggcctctaccagaagcttcactcgactcccaggcctttaaacatcattaaacaaaacaacggtgagcagattattaggaggagaacaagaaagcgccttaacccagaggcacttcaggctgagcagctcaacaaacagcagaggggcagcaatgaggagcaagtcaatggaagcccgttagagaggaggtcagaagatcatctaactgaaagtcaccagagagaaattccactccccagcctaagtaaatacgaagcccagggttcattgactaaaagccattctgctcagcagccagtcctggtcagccaaactctggatattcacaaaaggatgcaacctttgcacattcagataaaaagtcctcaggaaagtactggagatccaggaaatagttcatccgtatctgaagggaaaggaagttctgagagaggcagtcctatagaaaagtacatgagacctgcgaaacacccaaattattcaccaccaggcagccctattgaaaagtaccagtacccactttttggacttccctttgtacataatgacttccagagtgaagctgattggctgcggttctggagtaaatataagctctccgttcctgggaatccgcactacttgagtcacgtgcctggcctaccaaatccttgccaaaactatgtgccttatcccaccttcaatctgcctcctcatttttcagctgttggatcagacaatgacattcctctagatttggcgatcaagcattccagacctgggccaactgcaaacggtgcctccaaggagaaaacgaaggcaccaccaaatgtaaaaaatgaaggtcccttgaatgtagtaaaaacagagaaagttgatagaagtactcaagatgaactttcaacaaaatgtgtgcactgtggcattgtctttctggatgaagtgatgtatgctttgcatatgagttgccatggtgacagtggacctttccagtgcagcatatgccagcatctttgcacggacaaatatgacttcacaacacatatccagaggggcctgcataggaacaatgcacaagtggaaaaaaatggaaaacctaaagagtaaaaccttagcacttagcacaattaaatagaaataggttttcttgatgggaattcaatagcttgtaatgtcttatgaagacctattaaaaaaatacttcatagagcctgccttatccaacatgaaattcccttcttttgttattctttcttttgatgagtaggttaccaagattaaaaagtgagataaatggtcaatgagaaagaatggaagatggtaaacaatcactttttaaaacctgttaagtcaaaaccatcttggctaatatgtactggggaaataatccataagagatatcaccagactagaattaatatatttataaagaaagagaccaaaactgtctagaatttgaaagggtttacatattattatactaaagcagtactggactggccattggaccatttgttccaaaacccataaattgttgcctaaatttataatgatcatgaaaccctaggcagaggaggagaaattgaaggtccagggcaatgaaagaaaaatggcgccctctcaatttagtcttctctcattggccatgtttcagattttgacctagaaatgcgagctgtggttaggcttggttagagtgcagcaagcaacatgacagatggtggcacgctgtttttacccagccctgcctgtacatacacatgcacaccctctctgatatttttgtcctttagatgttcaaatactcagtagtccttttgtttgcggtttagattcattttgtccacacatgtacccattttaaaaaacaatgtcctcgatgcttctgtagtgatttcattttagccaggtatttctttcttgtgtgtgatgaaccagtatggatttgcttttctaagcctcctgttggttactaatctcacttggcacattataactaaaggaatcccctcaattcaaaagcatagatggatacaaatgtcagaccgtgggtttaatttgtttagaacacatggcatttcttcacaaggtaacctgctgtatttatttattttcttttggttaaatataatttccaaactttgtggtcaggcagcgtctaaggttacgttaccacagactgacagttggtatatgtaccagccaatcccttcattaaatgtatacagatttagttaagtagcattaaataggattcttagaagtatgtcctcatagaacttttaatacttaaggctttgtaaaaactatccatgaagggaaagctcctcagcataactgctcagggaaatagggctaaataactgaacattaaataattggttaaaggtgctgttagtcgagcctcaatgcttgctacaaggatgtatgtacaaggactgactttaataatttgcattatattgtcccaaccagtagtttattttttgccacggagatgtagaagatattacaagctactggatgcactgtcagattaacttatttcattaaagaagttgggagaacaaataggaaaaaaaaaacttatttttctagtaaatattaatgtattacatttcaaataatggtgcctgacatattgaataattattttctacagtgtacgtatgcaacaaagatattccatcatgcattagagtcagttctggctctgcctagctgtttacatttgcaaatgtagcaaacaaggtaatgaagcaactatttctattgcagtagatatccttttgtgtgtgtgtgtgtgcattaaagttgtaaacggtaacatgaaacaaatgaaagttcttgctataatggtatggaaaacaagaaggaaatgaaaatatttttatgcctacttaggaaaaaaagggtagcacttattcattccaagtacttttttttttttaatttttaagctcttaactcacattgttatgcttaagatgataaacatatatcctctttttattgctttgtctatgtttcatatgaaacatttcagaaattattttgataagtgttgctggaatctgcaacgctgatttttttttgcattctgtagtcgcatttgcactccatttttacattaattcgcagttgctttgtatcattgttttgtttgggttttgtttctttttcacagtgccgggtcttcgtttcttaaagttggatggcaggtagagttcaaccagttcgtgactgttgtagcgaatgaagttaaaaaaatgtctttctgatgttgtgttgtcattttcatttttgcatttttttgtttgcatattaaaaaaagagaaaagagaaagcaagagacagaaatcaggactaagtcctctgcttcagtttcattgttaacgggccttattctgatctcacctgtcgcgtagctctaatattcacataaactgaaataaagaagtggaatgaggagctttgacattcaaattatgtgatgtaatttatcttccttaggaattttgatggatgcatctcaaaatgtatagccagacttgagaggtgacaattaaagatctaaaaaagagaggagattcccccaaacaacaatatttaattttcttagtaaaaagaataacagaatgcatcgtggcaatccttaagcaacattatctatgtggactgcttaaatcagcaaaacaccagaagtttggttaacttgggcaatatgacaagtattactttttgggcaaaactactcattaagcaatttctctagtgtgtcggacacaaataggttctttatttttggcatgtatgcctttttattttcattcaattttttttttttctcagacagacatagtagtatcaactagcattggaaaatacatatcactattcttggaatatttatggtcagtctactttttagtaaaatatttttggatagcgttgacacgatagatcttattccatacttctttattattgataattttattttcattttttgctttcattattatacatattttggtggagaagaggttgggcttttttgaaagagacaaaaatttattataacactaaacactccttttttgacatattaaagcctttattccatctctcaagatatattataaaatttatttttttaatttaagatttctgaattattttatcttaaattgtgattttaaacgagctattatggtacggaactttttttaatgaggaatttcatgatgatttaggaattttctctcttggaaaaggcttcccctgtgatgaaaatgatgtgccagctaaaattgtgtgccatttaaaaactgaaaatattttaaaattatttgtctatattctaaattgagctttggatcaaactttaggccaggaccagctcatgcgttctcattcttccttttctcactctttctctcatcactcacctctgtattcattctgttgtttgggatagaaaaatcataaagagccaacccatctcagaacgttgtggattgagagagacactacatgactccaagtatatgagaaaaggacagagctctaattgataactctgtagttcaaaaggaaaagagtatgcccaattctctctacatgacatattgagattttttttaatcaacttttaagatagtgatgttctgttctaaactgttctgttttagtgaaggtagatttttataaaacaagcatggggattcttttctaaggtaatattaatgagaagggaaaaaagtatctttaacagctctttgttgaagcctgtggtagcacattatgtttataattgcacatgtgcacataatctattatgatccaatgcaaatacagctccaaaaatattaaatgtatatatattttaaaatgcctgaggaaatacatttttcttaataaactgaagagtctcagtatggctattaaaataattattagcctcctgttgtgtggctgcaaaacatcacaaagtgaccggtcttgagacctgtgaactgctgccctgtttagtaaataaaattaatgcatttctagagggggaatatctgccatccagtggtggaaatgtggagtaaagaagctggtggtctgcttctgtgctgtatgccagccttttgccttaagttgagaggaggtcaactttagctactgtctttggtttgagagccatggcaaaaaaaaaaaaagaaaaaaagatcaagtcgtctttggtgagccagtaaggtgaaagcttgctgactgtccaaggcacaagagaaaattgaggaattgaaatgcaacctgagtatcaaactaaatattctaatcaaaggtaggtactgttaggtggaattctatcagcaggcaactgcaaatgagaagaagatagaaggacgcccgtcgggactttggagggcattgttattttcccaaagaaagacggccaagggcagaggcatggattctttgcagagcacttccttttggtttttcagtactgtttcatagacagtgggctcacatgttcctgatagtgctgcagttgcttagaaagcatcccagttaattgcagtaattagaacttctggaatatgctagggcagaagtatgtcaagtatgtcacatgaagaaaatgtgaaattcaagagtaatccacacgtgagaaactagacaatgtacattcatgtgttctcttgaaaggaaagggagagctgtaagcttcactctgtcctacaccggagaaaagcaggaataactttaccgtggaaataatgtttagcttttatcagagaaaattgtccttctagagcatagagtcccaaaactcaattctggttttcccctgttttttttttttttttttttcccaacatatgaactgcagcatatcactttttctttttgtgcctcaggttcctcacctgtaaaattgaaaaatatatgtattaataatattattaataataataatggtaatgtagtacttgtttgtaaagcactttgagatccttggttgaaaggcaccataggagtgccaagtattattatgtggccaagggggttatttaaactgtcagttcccaaaggccaggaaaggttggggtcatttttcttaaagacgagctgtaaatatcaactaggcagccaatagtgttgactatgaagatgcaaaactattactaggctgataaaatcatagtttcttaatggctaccaataaggcaaatatcacaataataaacgccaaattccttagggcggactatttgacaaccacatggaaaactttgggggaggcatgaggggggaacatctcaaaatgccaatgtaaaatttaacttacagcaatattcaccagcagaaaatgtctttcatatggaatgatttcatgttgctaagaaaaagaattcaatttgtagtcctgatttgaatactagaatgttggctataatagttctgttcttacaacacatgaaattttttcgttttattttattttgttttcatagtgcatgttcatttctactcacaaacatgttcttggtgtatttcttatgcaaacaatcttcaggcagcaaagatgtctgttacatctaaacttgaataataaagttttaccaccagttacaca

SEQ ID NO: 23270 - DNA, 2821 bp, Homo Sapiens
aagcttttgaatacaacatgctgcaggcatcacagcctcattcattccttcactcagcaaatctttactcagcacctaatgtgttccagatacatttttttttttcagatggaatctagctctgtcacccaggctggagtgcagtggtgcaatcttggctcactgtagcctctgcctccgaggttcaagcgattctcatgcctcagccgccctagtagctaggattacaggcgccctccaccacacacagctatttccaggtacattcttgacgctaggaattcagcaaagaataagacagttaaggtctccgatgctcataggcctcacattttagagagggatgaatgtccaataagcatataaacatataatatgtcagggtcgtatgactacaaggaacagtgattgttacaacccagatgagagggaaaaataaaggattccaaatatcccccttgggaagtagagtcaggattcaaacaaagaactgtatggcttcaagttcatggtctttaatctcctggaggctgtctctctttcttttttcttttttttaatcagtgttgggatcaaattctggctcccctaggaagcatctggcaaggtttcgggagccatcgggttggccatgttatgctggaatatttataagcaccggagggttatccccatgtcgtagaaaatgaaactgaagctcagagagatttgcactctctgcccttttgtacaactcatttttccccagtatgtggaattgagggagcttcacgcttctagctgtcatgattccaagattctacgacatgtgggagaggatcctaaggttcggggaaccgcggaggtttcggggttctagaaatccgaggttctaagcctaggtgctccaataaacccagtgagagccagcccaggtttccggtctgtacccgctggtgcaagcccagagacaagcaggcgccacccatgagcccctctgcggccccctcccgggtcccacctcgcaggccagctggagggcgcgatcctggcgtcccccgacggcctggggccccaatccagaggcctgggtgggaggggaccaagggtgtagtaaggaagcgccttttgctggagggcaacggaccggggcggggagtcgggagaccagagtgggaggaaggcggggagtccaggttccgccccggagccgacttcctcctggtcggcggctgcagcggggtgagcggcggcagcggccggggatcctggagccatggggcgcgcgcgcgacgccatcctggatgcgctggagaacctgaccgccgaggagctcaagaagttcaagctgaagctgctgtcggtgccgctgcgcgagggctacgggcgcatcccgcggggcgcgctgctgtccatggacgccttggacctcaccgacaagctggtcagcttctacctggagacctacggcgccgagctcaccgctaacgtgctgcgcgacatgggcctgcaggagatggccgggcagctgcaggcggccacgcaccagggtgagccgcccccgttcccctccaccccgtctttcccctccacccacaccagcgcttaccccgcgggctcttccgctttctgttcctcctacccctaaacaaagctgctctaccggaaaggaggctccccacgcttggcctaccgaccaacgggaccccggccccacggcgggaagggaagggaaggggatcacttggcccatatccttccaggctctggagccgcgccagctgggatccaggcccctcctcagtcggcagccaagccaggtgaggcctccacacccagcccggccccaccgcactcctgcacagcctgcatctgtgctcccgcaaccagggcagggcagggcagggcaggcacggcttggcaaccctgcgcaccccacccaccaacccacaccctgcgggggaagggagacaatattaccctcatcccactgcatgtggggtcctggtggccgccccctggagccctgcccctaggcttgcagaggaattcctgaagaactcaagttcagcagggacaggccccacaccctggctgctggctcatgttctcctcccacccccaggcctgcactttatagaccagcaccgggctgcgcttatcgcgagggtcacaaacgttgagtggctgctggatgctctgtacgggaaggtcctgacggatgagcagtaccaggcagtgcgggccgagcccaccaacccaagcaagatgcggaagctcttcagtttcacaccagcctggaactggacctgcaaggacttgctcctccaggccctaagggagtcccagtcctacctggtggaggacctggagcggagctgaggctccttcccagcaacactccggtcagcccctggcaatcccaccaaatcatcctgaatctgatctttttatacacaatatacgaaaagccagcttgaacttgtgtgttttcctgcttctagcctgctggcatgtgcagagctcagctatgcttcagaggccacccagcctccagctccatgtccctagggtctctggcaccccaaatgcttcccccatccttcctggtatcgccatggaatatccctcctcattcaccaggtggtgctcctccagtgctccctaaagggtctaaccttaccattatagataacagcctgtgacccaggtccgaaggttaaaagaggcatgtaccaaagggcgcaaactggtgggcagctctgtccaagccatttagaaacacactagtcttcatagctcccctaccttccacattttccactggaagaaaaaatggcaa

SEQ ID NO: 23271 - DNA, 1518 bp, Homo Sapiens
gcacagcagtcagggtcacatgagtgatcatggtacagtgagaagttctccctcccagggccaggtcacagggtttgtttctgttcaatccggattcttccagtaaaagcttcaacttcccacactgaagctgagagcctcccaaagtgctggctacctgctgagcgcccccgtaactctgacacagtagtaatttgagcctctgcaattgccgtctgcttcctgtgaaagtcctttccgtgcccactgacccttgagtgggcctttgagctgctgactttcagctggaacttgaagggaccccaaccctgagacactatggccctgacctcagacctggggaaacagataaaactgaaagaggtggaggggaccctcctgcagcctgcaactgtggacaactggagccagatccagagcttcgaggccaaaccagatgatctcctcatctgcacctaccctaaagcagggacaacgtggattcaggaaattgtggatatgattgaacagaatggggacgtggagaagtgccagcgagccatcatccaacaccgccatcctttcattgagtgggctcggccaccccaaccttctgagacaggatttcaccatgttgcccaggctggtctcaaactcctgagctcaagcaatccacctgcctcaacctcccaaagtgccaagattacagacctgctgccaccgtctttctgggaaaacaactgcaagttcctttatgtagctcgaaatgccaaagactgtatggtttcctactaccatttccaaaggatgaaccacatgcttcctgaccctggtacctgggaagagtattttgaaaccttcatcaatggaaaagtggtttggggttcctggtttgaccacgtgaaaggatggtgggagatgaaagacagacaccagattctcttcctcttctatgaggacataaagagggacccaaagcatgaaattcggaaggtgatgcagttcatgggaaagaaggtggatgaaacagtgctagataaaattgtccaggagacgtcatttgagaaaatgaaagaaaatcccatgacaaatcgttctacagtttccaaatctatcttggaccagtcaatttcctccttcatgagaaaaggaactgtgggggattggaaaaaccacttcactgttgcccagaatgagaggtttgatgaaatctatagaagaaagatggaaggaacctccataaacttctgcatggaactctgagcaagatgtaaataaaattaaaaggtggatggcaagagtgcaaatactatcttcaatccttcagtcccagccagaagaatctctgaaagcatattgtgaatgtatacaatgtagtacaaacaatctctgtgatgattaacagtatgtcaccacttcattttttaaaaaggatcacgtctaatgcccattttcccaactattctttccaaagtaagatataaggtagcttaataaactaagtaaaacgtaaaaaaaaaaaaaaaaaaaaaaaaaaaa

SEQ ID NO: 23272 - DNA, 1653 bp, Homo Sapiens
agcttcgaggccagtgggaggagggaggggccaggcagctgagggccaggaaagatgtgaaaaactctagctggtgaccgagaggaggagtagagtgtgcccttagttcatatgaactagagggagttggtatttgcacagcagtcagggtcacatgagtgatcatggtacagtgagaagttctccctcccagggccaggtcacagggtttgtttctgttcaatccggattcttccagtaaaagcttcaacttcccacactgaagctgagagcctcccaaagtgctggctacctgctgagcgcccccgtaactctgacacagtagtaatttgagcctctgcaattgccgtctgcttcctgtgaaagtcctttccgtgcccactgacccttgagtgggcctttgagctgctgactttcagctggaacttgaagggaccccaaccctgagacactatggccctgacctcagacctggggaaacagataaaactgaaagaggtggaggggaccctcctgcagcctgcaactgtggacaactggagccagatccagagcttcgaggccaaaccagatgatctcctcatctgcacctaccctaaagcagggacaacgtggattcaggaaattgtggatatgattgaacagaatggggacgtggagaagtgccagcgagccatcatccaacaccgccatcctttcattgagtgggctcggccaccccaaccttctgagacaggatttcaccatgttgcccaggctggtctcaaactcctgagctcaagcaatccacctgcctcaacctcccaaagtgccaagattacagacctgctgccaccgtctttctgggaaaacaactgcaagttcctttatgtagctcgaaatgccaaagactgtatggtttcctactaccatttccaaaggatgaaccacatgcttcctgaccctggtacctgggaagagtattttgaaaccttcatcaatggaaaagtggtttggggttcctggtttgaccacgtgaaaggatggtgggagatgaaagacagacaccagattctcttcctcttctatgaggacataaagagggacccaaagcatgaaattcggaaggtgatgcagttcatgggaaagaaggtggatgaaacagtgctagataaaattgtccaggagacgtcatttgagaaaatgaaagaaaatcccatgacaaatcgttctacagtttccaaatctatcttggaccagtcaatttcctccttcatgagaaaaggaactgtgggggattggaaaaaccacttcactgttgcccagaatgagaggtttgatgaaatctatagaagaaagatggaaggaacctccataaacttctgcatggaactctgagcaagatgtaaataaaattaaaaggtggatggcaagagtgcaaatactatcttcaatccttcagtcccagccagaagaatctctgaaagcatattgtgaatgtatacaatgtagtacaaacaatctctgtgatgattaacagtatgtcaccacttcattttttaaaaaggatcacgtctaatgcccattttcccaactattctttccaaagtaagatataaggtagcttaataaactaagtaaaacgtaaaaaaaaaaaaaaaaaaaaaaaaaaaa

SEQ ID NO: 23273 - DNA, 5530 bp, Homo Sapiens
ggcggcccctgcagggcagctgaagccatggaagcctccgcaggtcgctgatcagggccaggcggctgcagcagcgactgcagaggcgctgcgccaagccgggccggagtggtgcgagccggcggggctgcggagggccagtggactcagggttgttgagaggagtcaatggcataatacgggaagccccgaaccacgggccaactgggaagttgatggtcggcgagaccagcccatcctaatttggggttcctggtcctgctccaggagtcctacagcctgcagcccctaccagagagggaggactgaacagcaagggggtgtgtgggtctgagtatcagggtcctggggaagaagcaggcctggctcgtagagtagaagactcggtgccggcagtcaggaggccctgctcctgaagcctctgtgaccttgggcacggccttcactctgtctggggcacattcactcatctggagaacacagggttggactgattacttttagccactcctgacagttgtggttttaagttgggtggtgggaacctgtgcaccagccctattcaattcactggtggaggcagccgtggtctgccaggccctcgctcctggggtgtcctgccgaagggtgagaagagaagccatgccgggcagcggccccagcgagaggatgacgtggcctggcccggccctttctgcgggccccccaacccgccctctctcctcagcccccgggataccgcccatcccaccccttactcggacccacagcctcatggccatgtccctgccaggaagtagacggacctctgctggatcacgcaggcgcacctctccacctgtgagcgtgcgggatgcctacggcacctcttcgctcagcagcagcagcaattctggctcctacaagggcagtgacagcagtcccacgccaaggcgctccatgaaatacacgctgtgcagtgacaaccatggcatcaagcccccgaccccggagcagtacctgacccccctgcagcagaaggaggtgtgcatccggcacctgaaagcccggctgaaggacacacaggaccggctccaggaccgggacacagagattgatgacctgaagacgcagctgtcacgcatgcaggaggactggattgaggaggagtgccaccgcgtggaggcccagctggccctgaaggaggcccgaaaggagatcaagcagctcaagcaggtcatcgacactgtcaagaacaacctgattgacaaggacaaggggctgcagaagtacttcgtggacatcaacatccagaacaagaagctggagacgctgctgcacagcatggaggtggcccagaatggcatggccaaggaggatggcactggggagtcagccggtgggtcccctgcccgctccctcacccgcagctccacctacaccaagctgagtgacccggctgtctgtggtgaccgccagccgggtgatccctccagcggctctgctgaggatggggcagacagtggctttgcagcagccgatgacacactgagccggacggacgcgctggaagccagcagcctgctgtcgtcgggggtggactgtggcaccgaggagacctcgctgcacagctccttcggcctgggcccccgcttccctgccagcaacacctatgagaagctgctgtgtggcatggaggctggtgtgcaggccagctgcatgcaggagcgtgccatccagacagacttcgtgcagtaccagcctgaccttgacaccatcctggagaaagtgacccaggcccaggtctgtgggacagaccctgagtcaggggacaggtgcccagagctggatgcccacccttcagggcccagagaccccaactcagcagtggtggtgacagtgggtgatgagctagaggccccagagcccatcacccgtggacccaccccacagcggcctggtgccaaccccaaccctggccagtcggtgagcgtggtgtgccccatggaagaggaggaggaggctgccgtggctgagaaggagcccaagagctactggagccgccactacatcgtggatctgctggctgtggtggtgccggccgtgcccacggtggcctggctttgccgctcccagcggcgccagggccagcccatctacaacatcagctccctgctgcggggctgctgcactgtggccttgcactccatccgcaggatcagctgccgctcgctgagccagccgagtcccagcccagcgggcggcggctcccagctctgagggggcccattccggcagcggcgcctgcggcctgaccactgattgtagggatgccgttcccccctcccttctcccatgggcatcatcttatttatttagttttgggtgtggaactgtttctttttttcaagatgttaaaacagtcccgtggaaggagcaggggttggagaaaggcatcccaaagcttcgatggagagcagggaagggggacccaaggcaggaggtacaccagctggacaaattgcagggaggggagggagcgagggccaacccggcccctctgtccccttggctcttcagacagggccagccctgctcaggaagtctctggctgtcttcatgtggggaagccgggcttgagttgcccataggcccctgccctgcaccatcctgtccagtgccctgcgcactccatgccgtctcttccaagccaccttgcccgcagcccaggctcctgggccagtgctctctcctcaaatggaggcagccatggcctgaagtgcagatcactgacccagggctcagagcagaggccagaaccactgggccggccggcattccagcctccccagactgctgcccaccttgggactcaggagctcagtcaaggccacaggctggaggagagacggggctgggcgcaaggtggcggagggcagtgtgggttctgtgtctgtctgttcatcccaggctttcccgtcatccctttcctcttggcacttctgggtgtgtcagtcattattcctgtgaggtagctaagcccggcaagctcagtgctggggtaggagggcctgcctgagtcccagctcccagctggagaatccaccagcacaagaagaggaggcaggggcagaaacccaagggggctcccccagccttccaaggtgaggccatctcatctgcaggctgggaggcagggctggactcaggaacccacagcttactgaaaaagccagaggccatgactgcccccagaaacttgccccgagtttctctggggccctcgggcccaacttctgctttgcactatgttcactttggggttggttctcagccatccaagggtctccagtgaggtggctgcttgctgtctgagatgagggttcctaaaccttaaacctctctgcctctggaggagggtggggtattctggcaggatgaatcgcaggatggcgcgtactgaagccacgatgttcatccaggccaaagcagggtgtcctgggataggtttcctaggcaggggcgtggcagagcaggtaggcgccctgcaccctccctgctcccagcccaaggccagtcggcctgggaagttcactgccccaactcttttcccgggaccatactgagtcccccagccacgctgctgacattaccattattattttaccaagtaaactcactccttttcccccacaggggttacacccatctggttgtcccacccactcttcagaggctaggccccacctctgggggttggagggaccctgtgtcttactcgcccctctggcctaagggccactctggttatctgccaaggttgcttgccctcaccccaatgctccaacagccattgcctaactcatgggctctgcccttctgctcggtgccctccacgtgaggcggggcacctgcatgcactgggagggggcggctggcccagccctcggggcaggagccccctctgccacacgctttgtgcctccaaagctccccccgccttggtcagggcctcagaccagccaacctttgtggaataagccccagcccagccaaaccaaacccagatgcctgaggcctggctggggctgcccccgcaggacactgtggccatgccacggagggggcagtggacaaaaccaatccaaagccaagccgggactggctgcggacccagcctcctgtgccgcgcactcacggagctgcgtagtctcctcagacatagtcaaagctttgccgagaaaagaaatgtatgaactatatttgacaacataaaatctctctatttttcaccactggaatttagtcaagcttcaggcccctctgctcctgtctgtgtcttgcgtctgtggccttcctattgtgtcttgtgttttggtggatgtgacagggctggggccacagtctactctgtctctgctgctagagaagccacctgtggaggactgggctgtggttgggcctgaggcctgtggaggaggtgagtgtagccagcagcggccgtctactcctgttctggcctgagaccaccggtgtgggtcacgaggaccctggcccacagtgttgagggtcctctctttcgggggctctcctggggccttcgatgggcttttcttcttgtcagtggagggagcagctccccactcagccctgggacaggccctgggactgtggtggccggtggccctggcccagctctggagtgcatgtgtgtgtgctcagatcccgcatctatgcaaaggtgcaggctgcctgtgaggctccaggcggtggaggtgcggcagctgctgctcaggtgccatgccctgaagaggcagggtacacatggggctgggagggcaaagatggggcggggcctccccctgagagagctcaccctccacagtgacccttttccttcctgcctaatacctcctcccgttgggctgtgacttttcctcctgccctcagcctctgaaacagaaatctttggggcctcccctttccccagcgtctggcaagagctgatgaggtcctgaggaacagtgtccccaggaaccaccttctggagcctagcggccagacgtggcttctcctgagttctagggctcgggccagagtggcactactgcccggccagtccaggctcaggcaggaatcggacgctggggcccgggctctgcacagagagctgggcttgagtggagtttattgtagatttctcccaaggggatcacttagcttctcactgacacacccttcccaattgccacaagcgcaggggtatcttacagcactttggggaggggtgggacaaactgcaaggttctggggccaaggcctacccaggggcctctgcccagagaactcacaaccccctctctgacctaggggacaatgcaaacaggtcacagtgcattcccatattaggccatccccttcacgaagaattcaggggatgtgggaagtggggaggcggggagggatcttgactcttgtctcctttgtccttttgttcagacagagttgtacctgcagcagacaactctgaattaaagcatgaaaacacagc

SEQ ID NO: 23274 - DNA, 2495 bp, Homo Sapiens
ccacgcgtccggcgcgggcgcgggcgcgggcgcgtgcgggctgcgagccgggaggcggcggcggcgacggcgacggcggcggcatggcggagagcgaggccgagacccccagcaccccgggggagttcgagagcaagtacttcgagttccatggcgtgcggctgccgcccttctgccgcgggaagatggaggagatcgccaacttcccggtgcggcccagcgacgtgtggatcgtcacctaccccaagtccggcaccagcttgctgcaggaggtggtctacttggtgagccagggcgctgaccccgatgagatcggcttgatgaacatcgacgagcagctcccggtcctggagtacccacagccgggcctggacatcatcaaggaactgacctctccccgcctcatcaagagccacctgccctaccgctttctgccctctgacctccacaatggagactccaaggtcatctatatggctcgcaaccccaaggatctggtggtgtcttattatcagttccaccgctctctgcggaccatgagctaccgaggcacctttcaagaattctgccggaggtttatgaatgataagctgggctacggctcctggtttgagcacgtgcaggagttctgggagcaccgcatggactcgaacgtgctttttctcaagtatgaagacatgcatcgggacctggtgacgatggtggagcagctggccagattcctgggggtgtcctgtgacaaggcccagctggaagccctgacggagcactgccaccagctggtggaccagtgctgcaacgctgaggccctgcccgtgggccggggaagagttgggctgtggaaggacatcttcaccgtctccatgaatgagaagtttgacttggtgtataaacagaagatgggaaagtgtgacctcacgtttgacttttatttataataacagaaacaacaacctgcatgctcacaatacccagacagtctactagccaaaagtcctgtatgcattcatttattccttgctggacaaactctggaagcagcgtgtgaaacagcgggggaagggaagagcggcgtgagcggagggagtgtgatgattcccaaccgaaagcagctgtctcgcctttagaacgtgcagcctctccatgtctgattacaaacagtctccacattgcagttccaatggcctggaccgtaaggataaagcctgtaatatatgcaactagaatgtctgccttttcaaccccgtattatttattgtattttatagagcttttcactggaaatctacataaatgtcagtaaaccaaataaaagttcatttccaaggggaatcaggagcgagccacacccgaatggtagaaagatctcagggttaactctttatttttgtagttttattatctaaggcacagccattctgttctcacttggttctgagatagtggtgagaacagaggatgagttgggtctgttggggggaatctggacacttgtttattctgacggagttcacttcttcagaaccttcctgaaatgagcagaaattgttcactaggtcttcagaatggacgtccttctgccagagacttccagcgggcggctccaaaggcccaatgcagaggagcccgcggagcatgtgctgagggaagtctgcctggtgaggctggcaggtgggagtctaatgcagtcaggagcatttgcatgcagtgggtggagagtcggccaccaaaggaccgagttgcgctcggaatttgagctgaattccacagccttactttgtttcctgaagtgatagcctactaatgctggcaagcagatgcttaatagtaaatttctaaaatccccgggtctttatcattcagtttgttctgtgcacctgaggcgctcagccgtgggaggaccattttgcgagtgtagccctgtttcactcggatcaggttggcacggccgcctgcgtgtctgtccacctcatccctccgtgtatctgagggagtaaaggtgaggtctttattgcttcactgcctaattttctcacccacattcgctgaagcgatggagagtcgggggccagtagccagccaaccccgtggggaccggggttgtctgtcatttatgtggctggaaagcacccaaagtggtggtcaggagggtcgctgctgtggaaggggtctccgttcttggtgctgtatttgaaacgggtgtagagagaagcttgtgtttttgtttgtaatggggagaagcgtggccaggcagtggcacgtggcatcgcatggtgggctcggcagcaccttgcctgtgtttctgtgagggaggctgctttctgtgaaatttctttatatttttctatttttagtactgtatggatgttactgagcactacacatgatccttctgtgcttgcttgcatctttaataaagacatgttcccggcaaaaaaaaaaaaaaaaaaaaaaaaaaaaaaaaaaaaaaaaaaaaaaaaaaaaaaaaaaaaaaa

SEQ ID NO: 23275 - DNA, 7279 bp, Homo Sapiens
atggaagagttaatagttgaacttcgtctctttcttgaactcctggaccatgaatatctaacctcaactgtcagggagaaaaaggcagtgataaccaacattctgctaagaatacagtcatccaaaggttttgacgtgaaggaccatgctcagaagcaggagaccgctaacagcctgccagcccctcctcagatgcccctgccggagatccctcagccctggctgcctcctgacagtgggcctccaccattgccaacatcctccctcccagaaggttattatgaggaagctgtgccactgagccccggaaaagctccggaatacatcacatcaaattatgattccgatgcgatgagcagctcttatgagtcgtatgatgaagaggaggaggatgggaaggggaagaaaacccggcaccagtggccctccgaggaggcctccatggacctggtcaaggacgccaaaatctgcgccttcctgctgcggaagaagcggttcggccagtggaccaagttgctctgcgtcatcaaagacaccaaactgctgtgctataaaagttccaaggaccagcagcctcagatggaactgctactccaaggctgtaacattacgtacatcccgaaagacagcaaaaagaagaagcacgagctgaagattactcagcaggacacggacccgcttgttctcgccgtccagagcaaggaacaggccgggcagtggctgaaggtgatcaaagaagcctacagtggttgtagtggccccgtggattcagagtgtcctcctccaccaagctccccggtgcacaaggcagaactggagaagaaactgtcttcagagagacccagctcagatggggagggtgttgtggaaaatggaattaccacatgtaatggaaaggagcaagtgaagaggaagaaaagttccaaatcagaggccaagggcactgtgtcgaaagtcactgggaaaaaaatcaccaagatcatcagtctgggaaagaaaaagccgtccacagacgagcagacctcctcagctgaggaagatgttcccacctgcggctatctgaacgtgctctccaacagccgctggcgagagcgctggtgccgagtgaaagataacaagctcattttccacaaggacaggaccgacctgaagacccatattgtgtctattccgctccgtggctgcgaggtgatcccgggtttggattctaaacatcctctgacgttccggctgctgcgcaacggccaggaggttgcagtattggaggcatcttcttctgaagacatgggcaggtggattgggattttactcgcagagacgggatcgtccacagacccggaggctctgcactatgactacattgatgtggagatgtctgcaagtgtcattcagacagccaaacagaccttctgtttcatgaacaggcgtgttatatctgctaacccatatctagggggcacctccaacggctatgcccaccccagcgggacggcacttcattatgacgatgtcccgtgcatcaacggctcgctcaagggtaaaaagccccccgtggcgtctaatggggtcacaggaaaagggaagactctgagcagtcagccaaagaaagcggatcccgcggctgttgtgaaaaggacgggttcgaatgctgcccagtacaagtatggcaagaaccgggtagaagcagatgccaagcggctacagaccaaagaggaggagctgctgaagaggaaagaggccctgcggaataggctggcccagctccgcaaggaaagaaaagaccttcgagcggctattgaagtgaacgccggcaggaagccgcaggcgatcctggaggagaagctgaagcagctggaggaggagtgccggcagaaggaggcggagcgtgtcagcctggagctggagctgacggaggtcaaggagagcctgaagaaagcgctggcgggcggagtcaccctggggctggccatcgagcccaagtcagggacatcgagtccacagtctccagtgttccggcaccggaccctggaaaactcgcccatctccagctgtgacaccagtgacaccgagggccccgtgccggtgaacagcgcggccgtcttgaagaagagccaggctgccccgggcagctccccctgccgagggcatgtgctgcggaaggccaaggaatgggaattgaagaacgggacctaggggacagcagcaccactccagcctcagagactgcacacccccttgcctgtatcctcatctgtgtgacggcaggaagctctgcccagagtggcctcagctgcacgactccagaggctccacgactgagctctgaggccagtgcctgtcccccaggcccacttgtattctttctactgtaaaatggcgcctttaaaaaagatgtaagactttggttcccaactttgttaaaaaacaaaaaaagtgatggaaaggtgtttgaaaggatgctatcaggcgaagtgacatctttctaaccagataggccattgctttcaccgattccaacccagccctggactgaggatggatggttccatgagcccccagatgaaaacctggattcgacagggaagagcttggatccccggctgccccgggcatgagtgtggctggccatgggcactgggctcgccttgcacgcccaccaggagggccaggggcatacgcagtcctgacgtggactttgtgtcttggcgtaccctctccacgtgcccgtccccctcgtcatcagaggtaaaggcatgagaaaatcgcgctgtgaaacgttttttaccttttattattattttttggacagatgcttttgtcaccaagacatgaaaagctgccattcttcttaacctgttttttaagaatgtctttttactgtgtgtcacacttagatcaaggagttttcagaggttccttattttattaattaattatttgtgctgcttttgacaggtagcagagggttttaatacttcactaacagtacaccctcctcccccttgggctagcatccccagcccttaatccacgtcggagccggcaggtgcttctcacaccaggagcctctgggggcaggggctggctcctcgccgctgtacaggacgtttactgctgcttggggccagggcagtcctttgaaagggaagcaagttccggaatttgttccctcatggaactataacaccttagagcaagaggcaggaattccagggcctcctgcccctccccttcctccagcttgtcaagttaaaccactaatgtgttggtgggcctggccgtgctgcctctcctgagtagggtgggtgcaagtagggcctctttcccagctttcttgcttgccttctgtgcaatatttcttggagaatttggatgcctaaggcataaaggaaaaaaacagagttcatagtttgagctggtatttaccccctgggtttaaaaatcagattaacttcttggtctcccggaggccgctgtcaggaattctccagtacgggaagatgcagtcacttatgacgaaataagtcacccctgaacgcctccgcaggcagattcatggagaccagtcccagtagcaaccgccccttccccaagcatagaatacagaggtgccatacttggtgtaagccttccttctgtccactgtccagaatgtcctttttcacacagaggaagagatggcgggaaaacactgactgactccttgggtttcccccagacatactttcagagcgctagctgtgtggtgcacgggactttacagttaggattcatgtttaaggtggtggcgcttgagcccgcaagggccacgttggattactgaagcggaaagcggtctcccatgtataagaaaaagttttacaacacgaattggaagctgcttgagtccacctgaacttgaattgattgcaaagccatctgccgggaacggttttgggttcctgagccatcagccagcctttctttcccttctgatgcacgttcttcccggcctagtccgtggaggcccatcacaccagcatccgtgacgccagcttcccactaggacatccaggcaggtcgggcggggacgccacacgcctcagggccgtccgctgcactgccatagaggagccttccctccagtggtcacttcccaccattgcaggcagacttcccaccattgcaggcagctgggcccacttcatatcacacaaaatgaattttctataaagggaaaaaagtttgctcctccatagatttttgctgccttcgggtcaaatagtttccctggttgacgctcttgggccactctgattggcagcctgctttgccaaagagaactgtgtgaggttttggtggttagtaagagaagggggagatggccagcctgaagtcacggtcctggcccagcacaggtgggcagcagcgagctggcaggtgaggtgtgagcagcacgcaaagtgtcacgtgggccttagccgtcacccaccagcttcctcaccaggcaaggaggccccggagccttagcagggacttgcccgacggcacagctgattggtgctcgactcccagcatgcatattttgttgtaaaaacccaggtttgtaattcacatccacaaccctaagccttttaaagcggaggcaaacgttaacgaaccccatcgtggtccatggagcctttcaaaatgggtgccctggaggggcctgacagtgggttccttccatggcggatactcccttgaaatttcacattccatcaaagtttaaagcatttacttcagaataagttatttatgtgtatatgttcaataaatatagtttttaatttatatctgtacatattagacacacgcgagccatcttgccagaattctgacagtgatgtcattttattcccctcccaaaacatgccccaggaacaagcaccccttgcctctgtggcagctgcgagtgtgtctgatttcataacgaagccaggctgagggcaagaggcccgacaggcaggccagggtccccggagaagccggatttcttcgcaatgtcactggtacttagcagatggtcgtgttcacaggggctagccacctgtactacggtgccgaccgcaatgcgaggaatgtggtggccacgcgatggagctggccggaggacaggtcaggtgagggggccgacccctgcgggctcagggctctttccattctaaccttgagccacagtgtcactcttcagggctctgctcctggctctattttgttaaggtgtcatcagccttcaacctccatttatatatttttataatgttaagccactgaccaactttttcatagaaacaactatcagatttgagggctccctttgtccccctgacctgggcacaggcatgggccatggctccctcttcccagaatctgcggggaactggggcaggggccatctgtctgcaaggctggtagctctctccctcggcttccagagtccacggcagttgcaaggttaccagtgtggatctgctgagtcaccccaggcaccagacttaccccaggagcatgggccactgtccatggggccttccttgagaccttcccttggggctggcgggcggcggcttaccagctgggtcagtcccatctcgcccctctgtgcctatgccctggcgttgccaggcttaaccttcccctgtatcttactcatcccagaattattactggccatttctaaatagacaaaaactaccctaaaatgtggagatttactccttttgaaaagtctgtttcaaaaagtgtggcctcagctctggaggccacccccaggaaggagtttgaggttcattgtcattatggccacagtttggtgcttgtgcacgggactcaaagggcagcgtcgaagctggggttaggtgtagggttgtgagcaaagctcccctgtttgtggccacaccttccctttccaaaaaggctattaattctactcacccactatttggggggatgtaaattttgcccacagactttgccacccaggtgaggtgctgtgttcatgcacggaactgatgtcattagacaccatccaaggatgggcagcctgcagtgtggccggcgactgccatccagagaaaaggcaccttgtgcacagggcggggccgacaccctgagctcacaggtggcccctgcattcaggtggatgtccatccttgaaacagcctcttctgggaacacagcactggaggtctccaggcatcagggttggccggcagggtgccctgcagcttacataaaggtcgtggcaatgtttcaatgttaaactaaactattgccttcctcttacttttcctaaaatgattttctaatgggaacagtcacttcaagtccatgacatagtttgaaggaggataattcattttttcctggttgtcactgtcttctttcttatccccttggtgggctgggttcatactgtgaaataaactaaaatgaaaccaaaacgttcctgccgtaaatacgtggcacagcactgcagaaaaagcagtcacctctattcgtgagtccccaagccatagcagggcgtctgtaaaagaagggaaactgcacccaggaagtggtgggcgtcagacgcatcctttcgcccgtagttcatgaaatagttccggctttggtcttccagaaaatctcaacttcaccgtgcacaagtgttaccgggtctttttagtgtagccatggaagatactttcaaaaggacatcttcagatcataagtcttaggaccaaaggtgtttttaatgagataatctttttgattttctaacaagaaaggaaatattcactttacattttaacatcaacttttaagtgatactcagaattaattgaccatggtgatacgttgtaaaatgttttcatattaagaatgtaattatttccttattgtattttttaaaagctaaagtcatatttaaaattctctttgaaagaaacaggcaaagaaacagcaaagatttttttaaattaaatatgttagtagtgcccacttcaaatgactgtaaatatattttcactgtttctcaatgtatttaattcataaagtaaaaattttatgaaaagaaacttgcaaggaaaatcctagttttcggtccactcgccccactttgtagtagcttcactgaatttcctgctttcctggttgaattttctactgtttcacgtggtgtaaccctagactggcgcccttggcgtgcccctttgtgtatgaataaacttttctcccccaaaagaaaaaaaaaaaaaaaaaaaaaaaaaaaaaa

SEQ ID NO: 23276 - DNA, 1170 bp, Homo Sapiens
cccacgcggaggaaggaagagacgcaggcaggctgcggttacccaagcggccacccgggcctcagggaccccttccccgagagacggcaccatgacccggggaaagctctccgtggctaacaaggcccctgggaccgaggggcagcagcaggtgcatggcgagaagaaggaggctccagcagtgccctcagccccaccctcctatgaggaagccacctctggggaggggatgaaggcaggggccttccccccagcccccacagcggtgcctctccaccctagctgggcctatgtggaccccagcagcagctccagctatgacaacggtttcccaccggagaccatgagctcttcaccactttcagctgggatgaccaagaaagttcgtcgagtctttgtcagaaaggtctacaccatcctgctgattcaactgctggtgaccttggctgtcgtggctctctttactttctgtgacccttgtcaaggactatgttcaggccaaccaggctggtactgggcatcctatgctgtgttctttgcaacctacctgaccctggcttgctgttctggacccaggaggcatttcccctggaacctgattctcctgaccgtctttaccctgtccatggcctacctcactgggatgctgtccagctactacaacaccacctccgtgctgctgtgcctgggcatcacggcccttgtctgcctctcagtcaccgtcttcagcttccagaccaagttcgacttcacctcctgccagggcgtgctcttcgtgcttctcatgactcttttcttcagcggactcatcctggccatcctcctacccttccaatatgtgccctggctccatgcagtttatgcagcactgggagcgggtgtatttacattgttcctggcacttgacacccagttgctgatgggtaaccgacgccactcgctgagccctgaggagtatatttttggagccctcaacatttacctagacatcatctatatcttcaccttcttcctgcagctttttggcactaaccgagaatgaggagccctccctgccccaccgtcctccagagaatgcgcccctcctggttccctgtccctcccctgcgctcctgcgagaccagatataaaactagctgccaaaaaaaaaaaaaaaaaaaaaaaaaaaaa

SEQ ID NO: 23277 - DNA, 209216 bp, Homo Sapiens
gaaatgctacctgtagtatttcagagtgtcgatcacatttgtagtcatcacttaaagaattaatgtctgccaatgttatcatctaaaatgtatttacagaggtcagaagagctatgtctgtcctcctctatgcaaagaggtgatgacatcaaggggtatgtcacaagccaaagtttagttagcctaagttagttagctggtttgcagtttttatccactaagtctgatcttctgacccctcagttttacaactttccactctctgtgctgcatagcacctctccacttctgagttaatcatttctttgccattatctggcaagaattcttatctcttttgctgtcactttataacagggtcctcttatcaacctgcatagagtcatgtgatgagtcaaagcctatcaaaagtttccattcttctgattagaaaccatcatgaaactggatacatggtttacagcaggtcactaatgttggaaaaagtacagagtccagggaaagacttgcttgtaactttatgaattctggatttttttttttcctttgctttttcttaactttcactaagggttactgtagtctgatgtgtccttcccaaggccacgaaatttgacaagctgcacttttcttttgctcaatgatttctgctttaagccaaagaactgcctataatttcactaagaatgtcttctaattcagatactggggatttacaagagtctttaaagcacggacttacacctattggtaagtaggagtttctctattgatcatctatttattctgctactacatacatataatttaatcttgttgatggattttgcattttaagtcatggcttttcctattatgtttattaaaagcacacaataagcctatgtatatatatcacacatttatctttcttgcagttcaaaaaaagcaaatggatatttcaacatatgaatattattcattatatctagtgtttactggtgtcattctaataccctaatcagccagaaaatataatttatactttatcaatttcaactttaatattttctgataatttttaatcagaaataataagctaaaatttgaacaatttgaaacaagttaatcatattgagtgatcattgatcaaactttaacagatagctgtcaagtatttgttacttttcaacccacacaaaagtatggtgtcttattctctgcttataccgtaaaaaattttcattttattttcctggggaatgaaagtcatgcccccacctccaaaaaaaaaaaaaaaaaaccaaaaaaactagaccatcattagtaaaggatttgaagagctactgtttctcgcaacaattagtatattttgtttttacaaacagaaataagtaaataaagctactattcatttaaaaaatagagttacaaacttatgaattttatagcaagactacattcaattaattctaaaagtaaaggactgaagggaagtgattcccagtgatctgtaattatttgtctgttggaagtcaggcccttctgcctttccccagtttttgaaggacctgtgccttttctggcagcatttgcctaggctttcagactggaatttccctccgaatttgcaggggcctgtcatgagctctctgagtctcagctccattataacaagaaagaaaatcaaggcttgagtttttcctcttttttccttcctagtcagctgactccacagaatgcagtggagtcacagattgctttttttatgggccaactacaccctaaagtatatcacttgaggaaatgtttaccaaaaatgttctatacttacgaaaaagaaaacatggggaaggtaagcagggtgtaacacacaatcaattgttctgcagataacacagaaaatacaggcacaagaaagatgagagagcagcacacaaccatttcgcatctttttcgtcgggcagaaccgccgcggtgcgcaggcaaggagtccttcccggcagctccgcgcagctccggttccgcgtccggggccgcagctagagcgcgctcgggccggagacgcggactgcgcgcgcacgggggacgcgcgctcgggggctcgcgcccgcgcgggcggtcttgggctcctgctgcgcgcagccccagctggccgctgccaaaatagagttgagctgggtcgggagaccacgcacgccgatccctcacagtctcccccacaccccatgggtgaattaaagagggtaaggtaggggaaagagacgctgttgcacttttctctgcaaccctggaagaactgtgtttccagctaccgcacgcgcaactcacatcgcaagggaccgaggcggtacactctgagcgtaaacagagaacacctgcagctctggaatcggtcccaccgcagagggctgggaaccggaggactgtcggtccagcccataaggggctgctggggactaaacctcaagaaaagtaccgaagaaggctctcccctggcctcagcgagactaccccaacatcctaaacctgtgcaggcacttccgggcgccggattccgggataacaaaattccagtcaatttgccggtaaaagagacctctttcaggatcttgttcgcagccacccgccccttcccaacccaagcacatcccctccgcctcctggtattgcagccccgcaggtggttgtgaggtgtccgcacctgcaacatcttagtgaccctgaggcggctgtggcaccgggagacaatctgtttacctcgtagcctccacgagggtgctaacggtcgttcccagggtgaatggctggacggagccatccaaagggctgagggagaggaacagagggcggtgaggagccttcggactgaactattggattgaagggcctgacccgattcctgagggagagatgccccttgaatgggtctttctgattgcccagggtagccccactgggaagaacccacgggtgcagctgtagagagtgtctgagggtctcgagggtagctttcagatggcaaattgcaagttgggctgtgttgagtggttcacaaaaccgagcccggtgtatgtagacatcagtcagggtttacaattctatatttaattcagttgtgttgtactaggaaatgagcctccttttgtttaaaaagctgtctccatggtttttaactaggggctacatcttgtatgcacactgatggttacatgaaagttttgtatagatgtctgtgcttgtatagaaaagcagaattaagataaagttgttccttctgcctacctgcaagataatcattcattgtagtgtaaaagcagcacactcaggttataactagattgttcccttaaagttaactaactctgggacactggccagactcttggtttctggtcttggtttacttctttctcccaagtgggatgattctattgaataatatgcagtactaactttagaagctttttatacttacctatatcaagaaaagagccatatctgtgtggtaggaaatgttatacataaaacaaatatttattgaccactcccacagtgcccaatattatgctttgattcatattaaatttccataattcttcaaattaactgcatttgcagaatattttatgcactcagtataatattgcatattatccacagaaggttatgtctgcatacttaggggtacatgatacacagtgcaaacactgtattgagtctgtaatgtgagtcttgctatctggtcccctgaacactctgagtctgattttatttcagtgataacctccagcaagctctgtgctcataaggatctctgaaagtagacgtttcatcagcggaaagtgtgatagccattatgtcaccctaacctccagcgagctttatttagaatgccagccacacaagcccatgttctgattctcatagttggggcttaggctgccagtttcttctatgaagctaaactctagagcctcccttctttccatgcccgagtccatctccaaaacagtgcttctcagattcctcttttctggcctggatccacaggtagtgaccagagttaacagagttcttgggccaggcacagtgtctcaaactggtaatcccaatactttgggagactgaggatggaggatcacttgggcccaggagatccagaccagcctaggcaacatagtgagacccagtctctacaaaaaataaaaaaataaataattagctgggtgtgggtgtggtggcatgtgcctgtagtcctagtgactagggcttgggggttgaggtaggaagatcacttgagccagggaggttgaggatgctgtgattgtgccattgaactccagcctgggcaacaaagtgagaccctatctcaaaaaaacaaaacaaaacaaaacaaaacaaaaaaaggatttctttttctttaacaccttttttttttttttttttttttttgaggcagagtttcactcttgttgcccaagctggagtgcaatggcatgatcttggctcactgcagcctcagccttctgggttcaagagattctcctgcttcagcctcccaggcagctgggattacaggtgcacgccaccacgcctggctaattttttgtatttttagtagaaatggggtttcaccatgttagccaggctggtcccgaaatcctgacctcaggtgatccacccacctcagcctcccaaagtgctgggattacaaatgtgagccaccacacctggcatctttaacacctcttctaacaaaccaagagagatttatagaggaagggagaacagaggcttgttaatgcttctctcctttacttgacccctctaccagacacaatgtctaggattatcttggattcagccttgagcataagttgagctagagaagggcacattgtcagacttccacctacaggcccaacccaatccccacccccagggatgcactaggcaggcaagacaacttcactccgcagctctagagtctaccttaggatagaactagttctttgagttgcacttcctcacgcttcaccttattggaacagacttcttggaaaaatccagttggcttcaaggaacttcaggagggcattgtgctctggggaggccctggggaagtgttgaaatgtgaccaatatgatcttgagagatcaagcttgagaaaaccatgtgaactggaactgaccaggcaagctgataaaggttgtctcttctttagtcttttgggaagctgttatgtatgtttttgtgtggttgataagtaagaaaagatatttggagtgtaacttttaaacaccaaataacctgaatgcagatgaccatgagcacttatatgagcagttttatctggtgataatgtaattgtccccaaggactttgtcaagccctgcaagacaatcaagttagcaagcacatcccactggaaggtgatcctagaatggttagtgattccctttttactttccttacagaatgatgagtttgagtgaagctaaggggaaagacaaaggggaactgatatatatatatatatccagcgtaatatatttctttcctggcactgtctcatttaactataaagtttactttgttaacccaattttactgattaaaaaatggaatcagaggtcaagcaatttactcagcttgtcaagagaatgaactgtaaatagaacccaagaaatattctgaaatacatactctttctccaaagtggtaaccacttgttcttgttgatataaaggaattatgatttaatacaatgttggtctatgcagactttcctccaatggacatttcgagcttaagaaacatatttgtaagtggctttttaatcttcatttccattccacggtagaaaccatatttggatccttctagaattcagaagggtggcacagggagtggtgtatggaaagcagagtggaaatcacatctgggaggactgaggtctgagtggggtgggacaaaggcacttctggtcccctactctggagtttcctggaaaggatctctggagtttggatgaagtttagcttgtgaatttgtggtgtatggtaacaactcgcagggttaccaacagatggtgagaaggaactgagaggaaattcagagcatgtacttgttatagagtcagtgagtatgaggagggcagggaaatcactcaaactgagtgactgaattagatagcataaacaaacatactgttgtaccatgagagggggggatagggaaagacaatttaggtgtcaattaaaaaaaaaagcacttttgacaaacccagctgtgcctcttgcagtgagatatgctagtcccacacccatgctagcatttttcacggtaagtgctggattccttgctcagggtttggatgcctgcagcctctgcttcccggccttctgcaagctccacctgctccagcggcctctacaggaatggaaagaaaattggtcggaatccactgctgggtcctggaatcaacttcccagtttccagacaagaaactctggagaaaacaagtgaatctctctcaagccttggcacacactgtacaccatctcgtaatcgcgaaagttatctccatgttggaaaagcccacgcccttctaattgtgcaacctctgtaactgcccagaccataacactttccctagttccacgccccatgcttgagtgtgacggtaccactgttaagtcttgcctttccaagctcccactttctttgctgaccaagtgagacccaaattgctggactccgcacctctgcggtcccggcactctttgaccttaagaatcagaagctcaggcaggggcttttctgaaggaagaagtttggttggatccatcccctcgctgcaaaagccgaggaattctgaagcaatgcaggatgtttccccttccatcaagaagtttccagtatcgccggatacatttaaatggcagcctagaataatctcgtgctaaggattttgttcctgacccaggttgaagcggaggagagggtgtaaaggatgcaactgcaagtgttcagctagtttcacaaggtgctttgtggcctactagcgccgggatcgtcgttctgttggccccgaggctggacagaattgattccaatggatggagtcccaatagttttgaactggaactggctcaaatttccatttcaattacagagaggaagagatagattagaccacctacccgagattatttcccctgccccactcctttcttaagaccggatctccctgttacattcttctaagggcaccgactataccctggcggggcactccaggacccctgggttgggacaacgtgctgtaaagaaaataagtgaaaaggttcttcagtgaactctttttatacaaagagccgtagattccgatatccaggccaaactctccaaaaagccctcctttcctctggggcaagggtgggaggttgcccgggagggtgggtggggggtaggttggattacccagataattgcttcggctttcgttttcctccgcgataaaaaccgcgccacgccagatcgagatactctcatagtgattgtgaatcaatcgccatcctgctctaggggctgatgttgatgtcttaagtagttattcacacgtgcagcagaaaggctttttttttttttttttttttttttttttttaaacaaggcacgactgctcacctattcaggtttgcttttttaaagcttcgatcaacacgacgctccctggtaattcctatggctgtactgaaatttaacccgtctgtttctaatacaaagcgctcgggatgagggcgggtggagcctacgggcgtgggcgggtagcccagccctctgagccagggaatgaaactggagttctggctaaacttttcagagaaaggcaaaagcagcttctgatgggtttttcggctgggaggggcggaaaaattaggcagacccggagctcccgtaggctgaaaaacttgctcctcttccccctcgggctatcctggcctagtaatggagatctgaaaaaaatctagacttctttcggggtctaaaaggtagatatgtgggacgaaaaaagtaattgtcctggtttcttaaaaagcaccaaaaagtgggaatggaagagaagacgggagaaattgtttcgaaggaggaaggtattgcaagttttgtgcaagtttgggtgggtcatctacccaggcgcgcggggaaagatgtgtctgccacaccttttgcgagcccaggaaacttgaaccgctcctgaaaatcctgatattttttcccgctgcagcccgcacgggtcaagcgcgcgggggctgaccaacactttccaggtcaggtcgagttgattgctcccagctcacgctccgaaatgcggtgctgaaccacgggaaggagggggtggggaggaaggcaggcagttgcatcctcgcgagtggggagtgcgaggcctcctcagctccagccagctgggtgaatggggcgcgcacggccccgtaacgccgagcgtggataaaatatgctaggactgcgcttctccggctcatcaaggctgcgggagcctccccgagccatcatccttcgtaattgcaaccgtcaatcaacactttaagacaaagtcagaaccgggaagggcgagccctggagacctgtctcgtcggaaagaaggaggtggaggggaggtgggggaaaaggagagaagtttgccagaagttggcagagggagtgcaaagaaattgagaacgcgcaaggtagttgagcagagctgtcccccggtctcaccacagactcccaggcctcccgggttctagtctctggtctccgccaccagttacaattcccgcagcggtaagtacggggtgggttcctaagtgtgcttacactaagaggtacagtggcagttgctaagatgtccccggcggaggatgagatgcgtctgtccacccgcggtaggtgtatttatgggtcagtgcagaccaccgctggcgccggcgtttagaccacacagacccggttccacctacttacatctcaactgctttcccttcccgcagccacttggctgtcttcatattgtggcctcgggaacccagaaccattctcaaataacccatcttagacaccgcaaactcgggttcctcctcccacagcttcctttcggagagggctttctgggggacgcccagacccgtccaaggtcactgagctagcgggtccccggcttcaacaggggtcccttgcccagcagaattgaagggtcaaaggaccagagtgagtgctcagagggaggagggagttctgagggagaagaaagggtgcacttggagggcagtaatgagcttgacgctggaagcctggtgccgccgcccctgcctctgcctcttggatggagacccagctgcttccttaaatcccttgcagagctacctgaggaaggtttgtgtgccctcgggtctctggcaagaatcaattccagtggaagattccttgccttgtccactgctggcggggatcttgacatccttccaggggatctgaaatagggctgcccccagggagcgtttcccatcgtcgagttaaaggcctggagcgccgagggcttaggcttctgagctaggagttcccttggttcttaggaaaggtcgttttctctcgctcgagactttctgctctttcagtccccctccatttcgctgctacgcttaggttttggcctggactagactttcaaagcaaaggaaagggcttccctccgtgatacaagctcctgcgttaattttttaaagcatggatttttaaaacccagtccccagccaccgttccctcccgcacccctcccattttgtgaggatttttctttcctggaaagtccacctgtggagagataaatgagtgccagctggccttttgccaccaccactctccatctttcggggatgtggtgggagggtagactggcatggaccaagaagtcgctagtgtggcctaagcaagtcccttctggccctggcagctggcgttatgagcatggtcacaaagcttgtctcactaggtcagcctcagcctcaggttcagcctcaagccaaggcagggtttcttgatacactacaatttcaaggtcctgtcagaccctctttcaacttctttcaactctcctaacttcccccggcttcaccaagcagaggtgaaatcaccaccacacactaggggttggaggtttcctcttaggaccaagcgtttggagtcctgcatccttgccatgctagggtctgggaaaggtgctgtatcataagtgcacccataaattcttcgcattgctgtgggaggaggttcttcttaattaaggctttgaaataaactgattttcaaagttcacgagcaaagcagggcaaccactgcagtgagccctgaaactgactccctttctttattttcttagttctcagtgatacttaaaacaactaggaatactgaaatgtagtgacagtgatacttgatactatcacaaaaattggagcttttggcaacttcagcccacttctccatacaaactaatggacaggccttcataagtttaaatgtttccacgaaacctgaagttgctactaaagctgaagtctaaataactttgatcctgaatatatattgaagagcaaaatgacaaatcaattaagagtcagtagtacctgaattgccaggtgtgggtgggtgatgaacaacccattttatgtacattatgcactgcaaagattggaataatttccaagtcaccaaataccggattgggcagtttcaatgtgtaatctctataccattcaaatagaataaacttagatcttttgagattcaaattcacccccttgtgggtggactctgataattacttcgttgcacagcagattctaaatatgaggcatttcgcatgcagtcaggaggctggaaagaatgtttttcatcttgttgggaggagatctgaaaactttgaagatgcggctgggctggtggtcgaagagcttgcgtaacagatggttctttaaaacattttttaaatgctgggcctcggcctcaagtggatggtcccatcagacaacagaatgaaaaagtacagcctggactgatccttgtattccgtgtggaaacacaggtcactaaaactggaaagtctgtcgcttagatgatcttgggctccagtcgagggtcttttaaaagtgaacgaagggactagggagcagactggggaaagaggagtcgctgccccttcctctaattctatgagtgagctcttggcttgtggcccgcctctcattgagctgaccctcggccccttcagggcgccggggcccacgtgtcgcctcttcagggtctcagtgccctggggagttgaagctggaggacccttgaccgcagaccaactctgcatgtaagaacggtcagctaaattttctcctttcaatggtttaagtgggtgtttaactcccttcatctcctcatccgacacactagcaagggcacacgcccatgcgcgcccccatcccttcttcttgcttcccctcagatcgaggaaattgccgctctggctgcttctccttcgccgccacgctcagacagaggtcgcttctgactagctgtaagacccggctgcatttacatccccccgccccgggccagggtggggtgggagggggtgaggcggggtgaagaggttggggcaggccgggggactggagcctgagcctcatccttattggctggcggctagtgtccgacctgagtccggaacccgcgtccgcattcactgtcttcacccctcaatccagccttcccccaacccctggccctacttacctccttctccccctcgtcttcccccctgtccttcccagcaccgtcaccctcggggctgggaagggccgttctcggtcccgcgcggggagtggaccaggcaggagagggaggttggaacttcacaactccacacttgcgatagtgagcaagagagaggcagagagagatagggggaaggggcggagaggaggggagagagaagggaggcgagagaaagaggagagagacccctgccgatcctgagccagagggcggtggagggaggggaaggagtcgcccgagccgtccgggagcagtggcagcggcacagccggggcggcaatagcagccccgcggtcgcctccgctgcccgccgggagctcggcggttcacggctccgcgccccgggcagctgcgtcctcgccaccgccgccgcctgcgcccttgcggagccgaaccagagggccgggacgctgtcttcctcgcctccttttttaaccctgacctcctcctcgcagcttgggggcggctccggagctgcgagaccggacagggctcagaggtcctgcccggcagccccgaggaggcggaggcacgctccggcgaggcgagagggttgggttagcaggcatcccggtcgccccttccttcttttcgccggagttgaatctgtgctgcccgtgtccaggtgctgggcttccggaccgacacggatcccccatccccgcccgcggtcgccttgtcatgctgcccaaagtggagacggaagccctgggactggctcgatcgcatggggaacagggccagatgccggaaaacatgcaaggtaaggaggcgccgcgcggcgctccggctcccgctgcttccccacccccgggctcgccctgcaggcttcagcctcccgccccgcgcgggcgcgggagtagccccgctgggcgctcgcagccgcgggagtcaagccccctccccaggtgcaggcataaaagtttatggctcttgaacaatgcggggcagaggtttttccaagcaacgtctaattggccgcttctaattaaggaaagagaggcttccagctctatggcaacccaagcagggcagcttcaggctaaaggtactttagaataataagatcattctaagaaatggaatgtctcactggacacccgaacaggttctctgtcattggaattggtgtgtactgtacttcaaccagtactcttgtgtggagggaggcgacccagtctaggaaagtcaactacagaaagaggtgacctccgaaaggattgtcttagcgctattagaatacatgtgaccacaccaaaagcccaggcggacacccgcagccagctcggatttggacaattcaacattgctggcagaactgaagggaacaagttaccccaaccccatcccctgtacgcgtagtgctgagtgagttgggggtgggaggacagcggttcgtttattgcccccttttaaaatctgagatctgaaaatatggaggtcccattcgttttcccagctcttgattgccaacaaaaaaacaaatcccgctggctacattttctcctcattccaaaatagcaaccctatggcttgtattaagcccttcagaagtttatctcatttgctctgggccagggagggaacaatgctaggaaaagtcaccggtgctcttccatcctcgccccttccagggtgcaggatgtgcgggccggcgggcctgtgatcccggaacgcttcctgccatccccttgcgcgaacttgaaaggactgggaggtgttgagagcagagttcagggctggtgcactctgcggtgctgagtgggcggcgcgcccgggcgctcaggccgggggacctgtagtcgccctaccgcggaggggaaaatacgtagctggagggcgtgcgccgtgcgggttgtgatccgttaccccatcggtcatcctggggtctccccaagcctctaggtagggctgtgagagtcccctagagctgaagccccggaggctgacctgtgggtctggctgctatgggaacccggttggtccaaagaagcctttcttccgggcacctggaattccagtttagtgtggggcatcggggaagtggcgctggggggctgggttgggggacctcagccggcagctccggagagggcctacccttggggtcgctgggtgaggccggcacgattcttggctccaaaaggaaagtttctgcttcttgttctggcgcgagaagccaaagacttattttgagagcggagagagaaatgttattggtaacgttttctttggaaagttcgagaggggtcttctggacacactacctagtgcccccaaaccagagaagtagtttttctttggtgcctgggctcagaagtcgccactcactcagcccatggttcgaaatcagcatgggaagcgccggggcaaggcttcgtcggagactagaggcctgcctgtcgggaggagcccctgggggatggggaccccattctcctgcttgctctggttcccgcctgggacgcctccgtaggagcccagaaagacgatccactacatggtcccgggacagagcagcgcgcccaactttgagggaactttgtgcgcctctctgaggccctagctttccaaggcaccgccgtccgttcttctttccctagaccgaaactggggaagagtgtgggcgcttctttgccccgatgagttcgcctccccaaacgcctacttcggctgcaccagagcatctgggaaactctgaaaggtgcccaggcctcacacagcagcgtctccctactcagcctctgtctttgggttttttcaagagagtctctacctcatgcctcggtctttcttcgatgtcgggtccccgaggtaggcacggagtccctctgaaagcagttgcctatctgtgcccctttggtgtaaagttagagtttactttgttgggggaaggggaggtagaaaagatcacagttgggaaagtgcgcttttcgccttgttcctaaaacatgcctcaagactgtcatcgcgattgttaggagagctatcaacgtctaggggctataaaggaatttctgaaccctcggcccttcccaaacccccaggttcctaaaaccctagtgggggtctcttggggctgggattcaggctggcaccgctgggaggacctcgcctagcatccctttattaatatttcacgaaggcaggctcctgccttctctggagcctcttttctcggaatgttcccaaactctggctaactcactcccctgtgagccatcctagggctctgtggcccgggaagagacgcgtcaactccgcgggtctgcgcgcagtccttagccgcaaagtgctgcaagtgacccccctgacggccctttccgaccgaagagctcgggaaccaaagagaaaaaaaataactttattttcaaaagaacaagtcatcactgcggcgatactgtggcggaggactttggcgatggggtgggggctatttctctttcctttttggtaaacaaatcagaggaaacttctgcccggccgtggctttccatcccccacctgccccaccccctgcaaacgccactgattaacttaaaacaaactcggctgcgtgtttgtgcgccgttgggtagcaggaggtagagcctaggcgagagcctggtgcgcccacgggtttcgccgaagagtgcccgggggagtgcgggcagggtctcggctgcgcagacctgcgggtgcccgcccacccgcgccccgcgctcccatacttgacctgtgtggatgtggagtctccgggaaataccggatcaggcacttcctggggtctcctggtcactgcccttcctgtgcatagtttgtcatctttttagctgcgaagacgccttcgtgggtctgcgtccggagcaaggcggttacccgatcccggcagtgagccgcgccgcgcgtcgtggcggcctgatttctgtttaactttaatagggcgatctcgaggtgtttatattttgctatgatgatcggaaacatgtgaggttcattacagggcttcaatactttgaaaccaaaacccttctgtgtgtcttttactcttctggtatttttccccgtacgggcgtcctctattttctttttccttctttttattttcacagattttcaaacgtaaggagatgaaagtatccagaatagaaaagtactgtcaatacggaactgaatgtttcgattatctaacagatctgaaagttgggagcctcaggctgtttagttaaagtgggctgctgctgagaagcgggtttctggggcttcagtttctctgtcggacagagtttgcaaattggtgctgctgtccctgtaagcaaggtgcacttgcagcaaaccacttcaagagggagggaataaagcctgcgcttgtttctctaccttaggcgaaggtgacattttggaatttaacttcatagggatttaaaagaaattctaaactgtcaccttatgcaattcatgtctctatttgttgctttgtggagttatgagacttgtgtttaaaagcggtcagtttaaaatgttaacaaaagaagttggaattgtttgtggcacatggaattatatgaggtccatgcttattgatgacaaaagatgttttacttgtaaaaatagttcagtaagaccttgctaaaaattgtttttattttatattttaccatgtgatatttgcccagcaatcaccaaaatgctttttgttgcaggattaacacctacatgtaaattaattgaatatgtgtatacatttctctttttgtttcagtgtctcaatttaaaatggtgaattactcctatgatgaagatctggaagagctttgtcccgtgtgtggagataaagtgtctgggtaccattatgggctcctcacctgtgaaagctgcaaggtttgctcacacattgctacctgaaaaatataatgtccaacaccaaaataaaccagtggattacttcttttaagctaaatttaggctccttttttaaagactcaactaaaaatgagggagaaagagagagtcttagggagatgattcttagaagtgtgtgtctgatttagttcaaaaggcaaagaaatttatgctgtttagaaaactttgccagtctcatggttctaaaatactttattgtagtaaagtgatatagctgtagaaagacttccatttctaacagtcctaaatattgattttgcttgacttatatatatttaaagcatcgttgttcttgaaagggaatatgacaaactatttcccaaatacattttaacttcagagtatttctgtgctataagtctaaacattctttatccacagacataaaagcctaaattcccaactgtgtgatttcatcttgatttattccaaaataattttaaggattttttgaaatttatatcataaagaccaagaaatcagattttagtttttaatataataatttttataaatatatgacctatttaagtgcatggattttaatatgtaaaatatgctatattgttaccaaaaatataaattatactttaagaatttatctcaggactttttaatacattcccagtaaattcaatattcactatttttcaaagttttttttgtttgtttgtttttgtttttaagtggaaaactcagtacaattacttaaaccaccaccaggaaaatccctccattctctataacaaagtaagaatgtttctctttgtggcaagtgggttaaatatgaatactatcctggtaaatctcatattataaagctacacattttatttttgattaattattttatataaaatataaggaaagctcataccctgtgtgctacaattcagctatctgtgatacatgctttttccttccattagttttgcctttttaagaacagttcccatacttgaatgtattccagtggaattatgagcattttcccattttactctttaaatccttttgcttttaactatccagtgttgacatttgttaaaaaaaaaaaaaaactgaggtgttttgctattcagttttttccactggcattttgcaatggtttatcactgaaattatatcagactacttaaaaacaatgccaggacttcatgagtacctctatcaggaacatgtgggataataggaaaatagattaaaaaaaaatttatctatatagagtgtattttttctgactgttgggataaaatggtgggtagccaaatctccccaggatttgacgtaattcttcaagaataaaactgatgccagaaaaatctccaccatggcctggcacagtttgggaaggttgatgttgctgaaatgtaaaataaaccacagaaccacataagggctcaaatagtgcaatgagaggatttactggtgattttcttaaaatgaaacaatggaaaagacgggtgttagatttataatacgtctcactattttctctgtcttatagggattttttaagcgaacagtccaaaataataaaaggtacacatgtatagaaaaccagaactgccaaattgacaaaacacagagaaagcgttgtccttactgtcgttttcaaaaatgtctaagtgttggaatgaagctagaaggtaagattcttctaaagactactgcctattaaaactctccaaggacatggactgtaaaacaacattgtacttatagcgtggtaacattattttcccagcattttaacactaccgacaatactgtaagatctttctatgtttcatctgcagaatagtctgagtctcatttaatcatggtgaaatctactaggaaaaaaatttaaaatattagttgtctttcccctgcccacccccttttttttagtctggggagcagatgcattagacacaaaaaagggaaaaagatcaggttatgaaaataagactaaagcaatccaactgaaaacaagaataatttgtaaaactattaaaagtaaaatattctttgagtttttaaatcaagatacccttggaaaagtttgatttcaattctttttaaaagaggtgtgcttgtcacaagtgttaactactaatttcatgattcttaagagttaaagcctttaatggtgaaaaggagtttctcatgtaggatattacctttgatagtgtagaaatgtatttttttaaaagataatgactgaggctgcaaaataaaaaattgagaatcaggaaacatgaaaaataacgaactattaaatcattagcaaaggtctgaaaagaacaagaaagtggctcctgaaaagccacacttgaactttgttgaaagagcagaccctatactacaatgtacagattggcaggcagtaaagttaatatgtgactgctgtaaataatttgtagttcatggactactatggtatgttgctgctttctagcctctgacctgcttgctttccatggattaaatatactgcaaataaagcaataacagggatacatatcaccgatggtgctagatacaagagtgcattttatttgatcaatgaggcacaggctatttttatttggaacttttctgttatatggaactcatacttgatagaaatactaaaaaaaaaaatcatataaatctgctgaatagctaacacgcttcttccgaacagaggtagccactttggttattatgaggactgttaatgtcagtatcatttttaagagatcatgaaaggaaataattgatgcttattaattttcttattaccaatcactattatttcccaaatagcaaaatattgtggtagatgcttactacatacagtaagagactcagaagataagtaaatgttgtgattttgcatgatgtcatttaattccttttcaacaaaaataataaggctgcatttctttaccttaaataattaaactttcttttttttaagttaagctttcacaattgtaaatcacttgtggtacatgctcatgcttccttaggagtgatatgaaacaactgaatattcaataaattatcatccagatgaaaaactctttataatcttgtgcaatattctgtatacctagaatttacaataaatttttaatgtgatactaatccaagataaaaagctcaaaaacttaacctccagcaagttcaatatgtcacaagctatcagaggtctctagtttctgtctaattgccattggccactatggacttagagggaactgctaactaacttattagtcatggccgcagactccacacaccactgtcgcagaagactctcttgacagcttctgaaatgaatttgttttaattatgtccaattctacttaaattaaaagcagtaactggtggtcatctgatgtgggctcatcaagtccaggtgaacatgattttccaagaacatgtccccaccccttttgttattgcaacaaggtggccaaaatggctttcagggaggaaggtatcttgtgggaaagtattcacaatttaatccaaaattgggtaactcagttccacacccctgcaaaagaaaaccccaaagcagtttgggtttccataaggaactggcataataaaagcatatactcttagtagaacgactgatactctttcttagcaatgtgaaatatttcttttcttttttttttttttttgagacaggggtttcactcttgttgcccaggctggagtgcagtggtgtgatcttggctcactgcaacctccacttcccgggttcaagcgattctcctgtctcagcctcctgaatagctgggattacaggcacccaccactacgcctggctaattttttgtatctttagtagagatggggtttcatcatgttggccaggctggtcttgaactcctgacctcaggtgatccacccgccttggcctcccaaagtgcagggattacaggtgtgagccaccgcaccacgcctatgtgaaatatttctatgtctaacaaaaattatgaactctcctccatccacaaaagggttaatatgtccctatgtggccaaagtatttttttgatgacgacacacacttggaggaaggaattcataaataaagaggacatggttttttgggaaatctttgtgggctattgtaacgaaaacaaccacacacataccacttcttgtcgatttacatttctaaatatctgaagaatgctaataatttgcaccttatttatacctttccttccttccccccaccccacccccaacagctgtaagggccgaccgaatgcgtggaggaaggaataagtttgggccaatgtacaagagagacagggccctgaagcaacagaaaaaagccctcatccgagccaatggacttaagctagaagccatgtctcaggtgatccaagctatgccctctgacctgaccatttcctctgcaattcaaaacatccactctgcctccaaaggcctacctctgaaccatgctgccttgcctcctacagactatgacagaagtccctttgtaacatcccccattagcatgacaatgccgcctcacggcagcctgcaaggttaccaaacatatggccactttcctagccgggccatcaagtctgagtacccagacccctataccagctcacccgagtccataatgggctattcatatatggatagttaccagacgagctctccagcaagcatcccacatctgatactggaacttttgaagtgtgagccagatgagcctcaagtccaggctaaaatcatggcctatttgcagcaagagcaggctaaccgaagcaagcacgaaaagctgagcacctttgggcttatgtgcaaaatggcagatcaaactctcttctccattgtcgagtgggccaggagtagtatcttcttcagagaacttaaggtatgccaccagctattacaacttacagcaccccttttaagagagacctaactatgttcctaattaatacattcttggtgctgaaaatatgtgttccttaattttctactttgtatgatttacagagtagacgtaattttattaccttgacttcaggactgtggcagcttaaatttatggggctttgattttgtgtagctcttagtttgggggggctggcatttaacataaagtataggaaactcgggcttttttttctaaatagtagaatatctgtattccttttaattcagatggtttgtggcttaaaacatttcaagtcaatgtgaaatagcgcctagtaaactatttttcttgaaaattaccatgtaaagagctatattataatggtgtcatcttgaaggtttcttttgaaggaaaaaatgccaacatttagtagtgtttagactctaaggaatgaaaatgataccactggttagtagtatcaagtaggtatttactactgtttgccttgacattaggttggtaaagcctttgttttcgtagcagattccaataggatgtttactgtcattggatggggaatgggcaaatggtgagtgctagtttacttggtttgggttgtagttctcataatctatgtcttgttgattttagtggactggtacattgtaaacatagtacttgtttgtatagggatctatgtttaaattaataattattttatttcctgaaacttaagtctgaatgaatgtgagaaagttatttagaagtttggaatctaagaggggctaccaaaacacatttggtagtcagtggtttcattcctattttaaaagtgagtcttgaatttgatttccaagtatattttgtcacaaaatcaatttcttccttttgctgtaacggggagagatgtggctgctaaatatctgtgacttgtgattacctaggacaggagattgattgtaaaatttctgagagaaggaaaatgcaaagccgacttttaattttaagagttactgttaaaaatcgtctgtgtaagtagatggtctggggaatgtggaagccacatgcaaatggaaaataatgctttcatagcagtctacattaagcactgttctttgtacatggaagcaaaaaagttacctgaacagacctaaataagttgataaaattccatcagcacgctgttaagactgtggacacatccagctctttatttccacgtcctttattgctacccttaaaaatggctgaaggatatctcaggctgcaaagggcaagcagaatgcactgcgttagcacaattaggccagatattttccgagtatgtgttagggtttgtaaccactctatgataatcagaacatttttcatgaaaaaacaaaccatgcaaacactttcctgatattcttacattcaaaactgtgtccttaatcaaacaggtaaagtatttgaaaatgaaaattaaaatgataattttagatactgtcgaaaggttaggtaatgtaaaaatgaggaaaacacagactttttacaatcaaatgaactgcttaataattatgtcttcataggcaggttgttagattctctgagccttggtttttctcatgtgtaacttgtatatgtggtgtttgtggaggagtattgggagcacagatgtaactacttatattgaggaggttttcaaaggaaaatgagaatatgcagataaagcacccagtaccgggagtctggcatatactacatactcagtaaagtgtggtgctgttttaaattgatattactggggccgggtgcagtggctcatgcctgtaatcccagcactttgggaggccaaggcgggcggatcacctgaggtcaggagtacgagaccagcctgaccaatatggagaaaccccgtctctactaaaaatacaaaaaattagccgggcttggtggcacatgcctgtaatcccagcttctagggaggctgagacaggagaattgcttgaacctgggaggtggaggttgcggtgagccgagatcttgccattgcactcgagcctgggtgacaagagcgaaactccatctcaaaaataaataaataaataaattgatgttatcactgttgttttatgaaaaatgtgcagaatctacataatttttatatttaggatcaaaacaatgcaattatagtctcttagtttaacattggcaaaaactattacatgtgttatagagtagtatgattttattataattaacagttattaatcagtactaattaaggacctaaaattggccaaggggtaagttgggtataaggtaaaaataacgttgaataaaacaacatgtttcctctcagagtttataataagacagtttcataaataattattttaaaaaataaagacagccgcagagaataaaaatatattttacaaatcaacaaggaaagaaataatgcatattattttcatgtaaaaaaggaaacattatgaagtaaatacagctagcggctgtaaggcattaagaaggctgggaaaactttttccactattcctctcttttccctcctctgtggataaattttacagtgacttctttatatagcatgaggttaaatatttggctaaaacataaatatctttgagaatggggcatataaaagcatttttcaatcaattacggtgttgtttaatgcatttatcagtctttcatagaatacgaaaaaaggaaaagggaaaaaagtacaaacgtgagggtcgtctacaaggggtgggagatgttcccagaagagaaagataattttgacccacttcacagtttgccttgggcttactttgaccaggagtgattcaagtattttttggtgaacaaagagtagaattcagaaaaacttaaggatagtttcagtagagagttgggaggtgactattgacatttggaagaattccttttcctttcgtttataaatttactttgtcagaaagcaaaccaactcatttgaagccaggattgagacatctctagggctgtggctttcaatttttttaatcatgacccacagtaggaaatgtattttatggcaggacatagtgtaccaaacacatcacacgggcgcacacacacagagatgcacaaacatacaaacacatacacacaactaaaccaaagtttcaccagatagtacataacctacaagccacgcactctgatattttctatctattctactttagtctaatttatttcatgtttttaaaaaaattctggtcacgactcactaaattgatttcacggcccattaatgaggcatgacctgcaattcaggagaacttgctgctctagaggaggttttatcggccatccattggcgttgcctacctgctacaattaaggataataactccggaaaaaggtctcttcctcctggcgtggcctataagacatctttgaaacccacagcctgagtccccaccctatctttctgtaaaggttgtaattttaaaatatcatttgggaagataaatgctctttcttattcaatttgattttaattatttttgtagagacaggggtctcactctgctgcccaggctagtctcaaactcctaggctcaagcaatcctcctgccttggcctcctgaagtgctgggattacagacaggagccattgtgcctgttttattcattaaatatctgtccttttccttggtaacttcacagcaaattacctatcaagtgatatacttattggacagattttttatacctctaaaacccaaagatgaaaaatcacatatttgctcctaattaggcaattttgaaatgacctctttctcactctctttttttttttgagacggagtcttgctttgtcgcccaggctggagtgcagtggtgcgatcttggctcattgcaagctccgcctcttgggttcacgccattctcctgcctcagcctcctgagtagctgggactacaggtgcctgccaccacgccggctaattttttgtatttttagtagagacggtgtttcaccgtgttagccaggatggtcttgatctcctgaccttgcgatccgcccgccttggcctcccaaagttctgggattataggcgtgagccaccgcacccggcctacctcttgctcactctctcaggacaaattacactctctaccacataggaaaaaaagagaatttcatttgtttactagttaagggaacagaagggccaggaaatttggtaggttgttttgtttttctatacatctacaaggtgcaaaaaaaggtattctggttttcattcaaaagattggaatgaaaaagaagaagttacaactccccaactctcatagaaaccgtggaatttcagagctggaagatgaaagggaaaagggctagaggacacatataagcgagctgctttgtttttttaacacacttgtaaaggacaattctggtcttcatccaaaataatggcttgagaaagatgaaattaatactctgaaacttgtagcttttgcaacaacagatgtgcatcaaaagatactcattgcctagaaatcacaaggtttttcagagctagaagagatcactgagatcatttgaccctacctctttttacatatgaagaaactgaggcagaagggaatgtaatctgcccaagattatccagctactgaatggcagaactgggactggtagattcaggttcaaagaagcagtcctcttgtacgcattccctcatcccccccagcatgcacacgcacacacacacacacacacacacacacacacacacacaaagaggcagtgtaatctttgactccaaagaaaacagtcctttgccagtgaagctaaagcaaatctctaggttatcagaagcccatcactaccatccaattaccaaatcactaataatcagtgagacagattttccctgagtccagatgaccccgtgggagtgaatgagtcactttaaaaagctacaataattctttcaggccactggggtatcattcagtacagtggattcagcacttctgggccttgagtttctgaagcattctctagtgccctaccctctgcggatagtttactctccaggtgaatctggttcagtgacggcatatgggctgtgctctgccgttaaagcggccaaacacgattatatcctgtgctctactagaagctgggcatgttcagtatgggtttcttgttacgtatgcttgtcgagatagcagaaaaagaatgcagggagctcactttggcagcatatacaataaaattggaaagatacagagattagcatgaccccctgcacaaagatgacacaggcattcatgaaactgtccataaaaaagagaacacaggatggtaaccgggtgataggtgagccactaataaaattttctgatctttaaaccaaatctgttgagtgacctatgctcttgactgtttccttgtgtttttagaaattaagagctaattcgagacttttgtattctgctgaaagagctgtccttgtgagtcaagaagattggctttttttttcagttattttttttttcacctgtgtcttgaatatctcacaaacacaagagcagtgagaaaataattcccactttgttaaacaactaatgaatctggaggatctatttgatcttctaatgagaccagatgtcttaagagaattctgggaatggatatataagaacttcccctcggtgaatgattctgatacatgtacgtattaaaaaaaatctaaattaatcctgactgaaactcccaactagcatttctgtggaaaataggtctcagagactcagggagtttgtgccaaaggaatttagccatgctgaagttggtttttaagtatagctttatctaaagcgagggcacaaggggaggagcaaaccttcttttttctctagccaattatggaagctatctgagcagcattatttatctatttttaacattctagatcctttttcctaaatcacagttacctttcccaatgcaggcctataatctcagactttattgaatctgccccaattttaagctatattctttagtaaatttacttagtcctacttttttttttttaagacagggtctctctctgttgcccaggctggagtgcagtggcatgatcatagctcactgcagccttgaccttgtggcctcaagccatcttcccactttagcttcccaaatagctgggaccacaggcgcatgcaaccacgctagctaattttttattttttgtggagatgggatcttgcgacgttgcccaggctggtctggaactcctgggttcaagcagtcctcctaccttggcctcccaaagtgctggaattaaggcataacccactgtgcctggcagccctacttttttttttttgtgacggagtttcactcttgttgcccaggctggagtgcaatggtgcaatctcagctcactgcaacctccacctcccaggttcaagtgattctcctgcctcagcctcccgagtagctgggattatagcgcctgccaccacgcctggtttatttttgtatgttttagtagagatggggtttctccatgttggtcaggctggtctcaaactcctgacctcaggtgatccactagcctcggcatcccaaagtttacaggcgtgaaccactgtgcccagccagccctacttttctatgggagagaaagagaaactgagagagaggatcctgctcggtgtctaccacatttacttgccatatggctgttctttgccttctcctgagagttggggtcaggaatcatgggtccaacacgagcactcctcattgccatgtgatgtcacagagcaatagccactttacttacctttgttttcacttctctggatgcaaagtagctaatctgggaagcacaaggatgacacaaagaaaataaacattaaagtttgttttccagtcaaatttttcaatgaatgaaaattttccaatcaaaatttgatctcaaggcacattaagccatctattgccagttctcatactcatcacaaagttgccagaatgaaataaatcgaacctgcataggtttacaaggaaatgataaaactggtttttcttccgctgaaggtagatatgaaagtgttctgtctttgtgaatttggagagaatgttggaatcagcaggtttgattcatggtctctaaggtctcttcaggtgttaagcatctgcttttatatctttttccaagcagacctgaaacagaaggctttggtgtggctgatagtgttggatgagaatttatgttatttcagcctttcttgcttacatacgtatattgcatgtgtctattgtagactcagaaagccattatctttcttcttgctttcttctgagctttcttcttgctcacaattcactgaaagaatcagctcttctcagtcaatgcctgtttgtgctatggccaactcactgtggggcagtggaacatgcccacttactgtggggatgtgtattgttctttactgggatatcttgaaagtacaccagtcacctcaaaactcccatgcattagttacttctactaaggtaaaatttactctccctaaaatttactgtttttaatgtacaaatgataaaacagctctttcacactttaaaattctcttgtgtccctttgtaataaactcctctccccaccccagtccctgccaatcctgatctgtttttgtccttagagttttttttgttacttttaaaaagaagtaaatttgctttattcgttgagtatacatttacaaactgcaaactcagtttaagctccctgaaacttatggtttcagcgtagttgagcactaatagtttccatggaaacatatcctccatggggcgctgggatatttggtaagagagtagtgatgatcataacttcacactgggtctgcttgttcacatgtcttatgagcgtcctgttcgtattaacctgtatgttatctactggaaccatggggagaacatgagaatagcgaggcacacccaagaaatccatgtttaactagcttggccatcgtcaggtgtctgaatctgaacagtgagagtaggaccacactgctaccgcatacctgactgcctcattctgtgtccctcctgttcgatatagtctggttttgcaaactgaggcttaagcctcggcagccaagagcaagcccttgttcctgttctgatgaggatgtactgaattattttgtattcagtttcctacgatgaccttctctaattacacaaaagaaaacataatgaatttacatatctttgggtcaatttatgaaaaaccattcttttcagtaatacaagtcctttaagacctgttggaaaatggtacagacgtgagcattttccttgctctgctctaggtcatatggtaaaggagaagagaagtaacttttcttgggtacccactaagcacctactctagtgctaggtgctttcaggccattttctagtttgatctttaggacagtccagtgatgagagcacagtgtatggtcatttggtcagagtgggagtaaaagaccatcgctctcgtataacatgttctctgtggaggatacgtccgtcagtcataatgactcatagagatgtcaagttaattgattcgtaaaagtttgctaaatcaattttttttctttttttttgagacagggtctcactctgtcgcccagtctggagtgcagtggcacgatcttggctcatggcaacctccacctcctgcattcaagtgattcgcctgcctcagcctcccgagtagctgggattacaggcgtgcaccacaacacccatctaatttttgtatttttagtagagatgggattttgccatgttggccaggctggtctcaaaactcctgacctcagggtgatctgcctgcctcggcctcccaaagtgctgggattatgggcatgagccactgcgcctggccgtaattgtgcttttttttccttttttctttttttgagatggagttacactcttgttgcctgggctggggtgcaatggcacagtctcggctcactgcaacctccacctcctgggttccagcaattctcctgcctcagcctcccgagtagctgggattacaggcatgcgccaccatgcctagctaattttcgtattattagtagaaacaaggtttcaccatgtcagccaggctggtctcaaactcctgacctcagatgatccacccgccttggcctcccaaagtgctgggattacagatgtgagccaccacgctcagccaaattgtactttcagtaaagtactttactgtttacaaagaacttccatatacatttttttggtcctggtctctgtctttcattttgggagcatggatgtaactggcctttcatcaatggttcagtagtgttgttttttaaagcctacaacagaaccatctcctatgaattgactatcacctgtctaaatgccctgtttacagcatgttgtacctgcaagagcaggatatttaaagtactttataattgataattgccattatcaatatgctcacctctttaccatattccaacaggtcttaaaggacttgtattattttttaccgaagagagtggtttttcgtaagtttacccgaagatacatacatttattatgttggttttttgtttttttttgtttttgagacagagtcgcactctgttgcccgggctggaatgcagtgtcgcaatctcagctcactgcagcctccgccttcccggttcaagcgattctcctccgtcaacctcccgagtagctgagatcaggcacacgccaccatgccctgctaatttttgtatttttagtagaggcggggtttaccacgttggccaggctggtctcaaactcttgacctcaggtgatccacctgcctcggcctcccaaagtgctgggattacaagcatgaaccaccgcgctgggctgggttttgttttttgtttttgtttttttttttcatattagaggaggcccagacaggtgcggtggctcatgcctgtgatcccagcactttaggaggccgaggtgggaggatcacctgaggtcaggagttcgagaccagcctggccaacatggtgaaaccccttctctacaaaaattatgaaaattagcccggcgtggtggcacttgcctataatcccagctacttgggaggctgaggtaggagaatcacttgacctcaggaggcggaggttgcagtaagccaagatcgcactactgcactccagcctgggcggcagagtgagactttgtcttaaaaataataataataataattagaggagaccatcgtaggaaactgaagacaaaataattcagtatgtccccatcagaacaggaacagggtcttgttggttgcagagacttcagcctcattttgcaaaaccaggctatatataattggaggggcacagaatgaggcagtcaggtatgcattagcagtgaggtcctccccagcttgtgaatacctgggtaggcttaccttatctcccaacctcccagtgctcggcactggttcctactgaacaatcggtagaagcaattttgtcagcttgtctgcctagaagtagccacatgcttgtttgctgagaataattagggtccctgcttattccagtacttatgcttttccagcaggcacacagattgctcacagatcttatggaaaggctgccagtgttacttcctcagtgttggggaggtagagcccactaagcctgagccccctgttccctgtctgcacactgtcatacaaagtcacagaataagttaaacacatacacacatgcacacaaacacacacagaaaacatgactcatatgtgacatccctcaacacacttttgaaggactttgccctctgaacctatatggtaaaatagatcttttttattttccaggataaataaagaatgattttgctctgacctattcttctgcagcttgggaagtagatcatacaaatctttgagagttcaacatccatttgcagaatggctccatggaaattggccatttaaactattcttcacgttaaagacattaagctctaacccaagaaaaccacccacagccaagaacaacaaaaatgacataaaccacgtcacctaacccagcagttaggtatttcttgaatatctgatacttaaaacttaactcccctctacacctgtgtcctctccatacagtaggctaacatcaggcagccagtggcatgggcgccctggctggcttcatggggcacactaaccttgcacatcattttctttatcttctcctctctcctccttgtccacttttcttctgtcccaattcgctttttcttttcttacttcattaactctttttcctttccttctaatacctcaggaagcacgcttaggcattaccttgtcctcagctgcatcttcatttacccttcaggtgaaatgtggttgagcaaggaaggcaactcgttccctacaagtctgagaatgggtggagcaggcaagagaaacggttaaatagaccccagagaagggctgcagttaatgataataggatttctatctgtccttccactgtaccaagtgacttccacacagtggcattttccaagggtgagtgcagagggagtagctgctcagcttggatgggtatgggcaggagaggttactgaggctgcaggcttagcaaggtgagtatgcatggatcccacgaagtcaatgcaaaagcaatttgaaaatccctgcttttcaaataggtgtaagggtttctgtccatgacaaggctgttctacttcagtcttttaaccatgtatccacacagtcccagagatggtcactagtgtcttcctcacctttaacttcctccttggaaataattttcacatgctacgttcttgacctaccaggacaaattctatgaattcttcacgtatgtgtcctgggaaggaatagccaaaagctttgacaagaataactaagtctgggctgggtgtgatggctcatgcctgtaatcccaacactttgggaggccaaggcaggtggatcacgaggtcaggagttcgagaccatcctggccaagatggtgaaaccccatctctactaaaaaaaaaaaaaaaaaaaaaaatacaaaaattagcctggcatggcagcggccacctgtaatcccagctattcaggaggctgaggcaggataattggtcgaacccaggaggcgaaggttgcagtgagccaagatttgcgccactgtgctctagcctggccaacagagcaaaactccgtctcaaaaaaaaaaaaaaaaaaaaaattaagtctgaagtacccaggacttgttgaaatgctgcctgatcatttctctcagaaaactaacagaaaaccacattattttgaatatttggaaatgtcaatgtcactcagagtgcacaacattcgggattaactttttttttttttttttttggagacagagttttgctcttgttgcccaggctggagtgtaatggcgtgatcttggctcactgcaacctctgcctccagggttcaagcgattctcctgcttcagcctccaaagtagttggaattacaggcgtataccaccatgcctggctaattttgtatttttagtagagacaagacttctccatattggtcaggctggtcttgaactcccgacctcaggtgatccgcccacctccgcctcccaaagtgctgggattacaggcgtgagccactgcgcccgacccgggattaactttacaaccaaacttgatccaacttctaattctgtaagaataccatttctttacatgacagatggaataattggccaataggtctaaagtctgtcctttattgtgcaataagagcctcgcaaaggtggaatgcaacctgagatcttaaggtcctggtctctgtctttcatttttgggagcacagatgtaactggcctttcatcaatggtttagtagtgttcgttattaaattctataacagaaccacctcctatgaattgactgtcacatgtctaaatgccctgtttatagcatgttttacctgagagagcaggataattacttcatttaaattaaaaacatatttttatgggaatgacccatggtagacactggatacatgttgaattaacgtgctcaagacataaaggacggatacagatttctcaatggtaaaggcaatatgtagacatctttgctttacttttaagcaacattccatagatattgtcaataacctgaaaattcccagaataatgttttaaatgacttcttaattagcgttccttattttcatacaggcacactcatattcatttgctaaaaacaattatctgcatgcacaagttcagggtcccaaataattctccctggcagattttgtgtgtgtgtgtgtgtgtgtgtgtgtgtgtgtatctgtgtccatgtgtgtatcgcagtgttttgagtgcatatcctgttttcacacacattctctgaaatgttggctcattctaagggctgttgtttcatttcgatcactgtatcctgtggactctgaaactgctacaaatgcttcttcaccacacatcttatcagcacagttgtgtgcctttttgatctaaagttgtgatgaataagaggctttacttgttgcctaatttttaaaaaacttaccaaatattacatttccccttataaaataatgatatagattagtgtttgtgcagaagtgttggcaacagaattcttcaaaagttttccgttgagtgatgaaaagctgttatattattttgactagctaatcaaatgtaattggggagcttgaagtgccttagattttccttgtacagttatcaaagcaggaaatgtaactcgcagagctgatgaaagccatctctcatggtattctttcaattatagatcttacagagcaaatgaaagaaaagctctactgctaaaaactcagaggcttgaaatgccccttaatgttaactgctgtattagctagttaacacattattatgtactttaattgattcttactccagctttggagaaaaaaattatggatctgtttggcatgtaaattaaggtggggggaagacacctgagtgcaataacagcactattgctattaacacttagttcaagtaacatcagatacctgcagtgtaaacaatggccctggttcactttggcgtgtttttttttttttgagatggagtctcattctgtcacccaggctggagtgcagtgtcgcgatttcggctcactgcaacccctgcctcccaggttcaagcaattctcctgcctcagcctcctaagtagctgggattacaggcgcatgccaccacacccagctaatttttgtttttttttagtggagacagtgtttcaccatgttggtcaggctggtctcgagctcctgacctcatgatccacctccctcggcctcgcaaagtgctgggattacagatgtgagccaccgcacccggcctaatttttgtacttttagtagagacggggtttcaccatgttggtcaggctggtctcgaactcctgacctcgtgatccacccaccttggcctcccaaagtgctgtaattacaggtgtgagccaccccgcccggcctaaaagcattactatgttgcactcatctgttggtattcctgctgatgagtgttattgaaggagttttatttgaccattgagaattgcttttatgagtttatcaatgaagtgttataatctagtaaaaataacttcatttcagtcatatttggaagggtccagctgagatttttagcttttgaaaggatcaaaccacattacacctgcattttactggggtgtagtatttttctttgttgttgaatcacactcttaaagctgcccctaaaacatttcagccataaatgggtagtcctgacctaggatcaggccaaattcaaattttattcacatattcatttattcactcacacattcatcaaacatttatcaagtttgtactgtgtgtcaatccctatgctaaattgctggagacatgacagaagcaagtgctgtaatcccagcactttgggaggctgaggcaggaggatcacctgagttcaggagttcaagaccagcctggccaacatggcaaaaccccgtctctactaaaaatacaaaaagtagctgggtatggtggcttatgcctgtaatcccagcaactcaggagtctgaggcaggagaattgcttgaacctgggaggtggaggttacagtgagccaagattgcaccatcgcgctccagcctgggcgacagagcgagactccatctcaaaaaaaaaaaaaaaggacgagagccgtcttcactttacaagttaagtcttcatggcagttttctcaattaaagtagaacccctcctgacattgatgcggcactaaacacaatggcaaactctgaccctgaaatcttgtgcaagtacttggttatgacagcacactaataaccccagccctgtttacaccaatgtttaagattatgtttgaactggaaaggacaacttaattcccatagacaacaaggtgagagtaagggagggttcagggcggcatcactaggagagaacagctcgtgtaaaaatacagaggctttggcatagcacttcttggaaacttcaagtaattcctatggctggaaggacaaggatagggaaggggcaaggggtaaagctggacaggtgagcagctcatttatacatacggttctaatatggattttattcaaagcaaaggggagccactggaaaaacttaagcatcgggggccagaaggattgaaaatgtaccagggacatatgcccaccacataatgtcatgatttcggtcctggtataggattttccttaattgccagcatttagcttaaagtgcatttaaatattgttttgtttttaatttactatctaaacttgtactaaaggagttggtatcttttatgtccttagttatttttgttattgtctccaacagacctttttcctctaggtaaattttggttattgatgacatgtatgtatttgaggtcctggtccttgtttcatatttaatttaaagaaatgtaatgttttaaaaattatttatttatttatttattgtagatatggggcctagctatgttgcccaggctggtctcaaactcctaggctcaagcaattcttctgcctcagcctcccgaagtgttggggttacaggcttgatccaccatgcccagccttcagatttcttcagtataacattctttttgaccagaaagttttctttttcttttttagttttaatttttttattgttttgagacagagtctcactctgtcacacaggctggagtgcagtggtgtgatcttggctcactgcaacctctgcctgggttcaagtgattctctagcctcagcttcctgagaagctggcactacaggtgtgcaccaccacatgcagttaacttttgtatttttaggagagacagggtttcaccatgttagccaggctggtctctaactcctgacctcaggtgatccaccacctcggcctcccaaaatgttgggattacaggcgtgagccaccatgcccagccaagtttttctttttaaccttgaactgatttattgctgattatttcatagttattattttaatgacaccaaatcatccttccagtatatgcacacatcgagggggcagtctagcccagtgtgcctaaagtgattccacactagctttttaaaattacatattcccaaattctaccccagacctgatgaattgctcatccattcatatatttattaattcaacatacattaattaagtatccagtatgtgtcaagccctgttctagaagtgggaagaaacaagtgaggaggaagggagcagttagaggggttcagagaagaccaatgtgaagagctgacatttcagctgaaatccaaataacaagaaagaaaacagccttgataaatctggacacacagcactacaggcacaggaatagcatatgcaaaaatcctgaggtagaagctagcttaatattttcaagaaaataaaggaaggtcactacctaaaaatcaatgattgtgggggaaatagggctcttgaaaatgtcaaaaagtttgacaaggtccagctcctggagggcttggattttattgtttggaataggaagccataggaggattttaagcaatggagtgatttcatcgaattctcagtagaaaaactattgcactggctgcagatgggaaaaaagttgaagggaagcaagagagtatacaggaggtccatcaccccaggggagagatggagagatggtggcttagatcagggcaggagaatggagatgggggagaagttgatggacccaggatacatgttgaggtaaagctgatagaatttgccaaaaagactttgagagaagatgaggcaggcaggactcaggtttttggcttaagcctttgggagccatttgtggagaaggggaaccagaccatctaggggaaaatcctgcacatgttctaaaacttccctaaacagatagagccaggtgccagagccagttctcagatgtcacctttgggaactattcatttattctaatccttatttttattcaagaaggcacagctcgaccactccacgcagatataaattcaagctcttcccaaagatttctcaggggtggggatcctctatacattccctgccatctatttaattaattatctttttttttttttttttgagagggagtctcactctgtcacccaggctggggtgcaatggcacgatctcggctcacagcaacctctgcctcctggggtcaagtgatcctcctgccccagtctcctgagtagcaggaattacaggtgcccaccaccatgcccagctaatttttgtatttttagtagagacagggtttcaccatgttggtcagggtgatctcgaacttctgacctccagtgatctgcccacctcggcctcgggattacaggcgtgagcccccatgcctggcccctgccatctattttaaagtttggcagtagtcaagacattcttttatgtacaacttaaatccttccttctgcatcacgtgtcattccctgtggacctgtcaatagagatggaacacgtggctaccccttgcttcatcataaccctttacatgatgacttgctgaattgcagctatgtgaaaacctaaaaaatttagacattagggaatctaaatttatttcagtaattaagacagaggggtataactaagactgatcacctatctatgcagccataaaaaagaacgagatcatgtcttttgcaggaacatgggtggggctggaggccattatccttagcaaaggaacacaggaacagaaaaccaaatacctcatattctcacttataagtgggagctcgctgagcgcggtggctcacgcctgtaatcccagcactttgggaggccaaggcggggagatcacttgaggttgggagttcaagaccagcctaaccaacatggagaaaccccgtctctactaaaaatacaaaattagcctggcagggtggcgggtgcctgtaatcccagctactcacgaggctgaggcaggacagttgcttgaacctgggaggtggaggttgctgtgagctgtgatcgtgccattgcactccagcctgggcaacaagagtgaaactctgtctcaaagaagaagtgggagctaaatgatgagaactcacgaacacaagggaacaacagacacgagtctgcttggggctggagggtgggaggagggagacagcagaaaagataactacagggtgctggacttaatacctgggtgataaaataatctgtacaacagacccccatgacaagagttcacctaggtaacaaaccttcacatgtacccccgaacctaaaataaatgtttaaaaacacacaaaaaagactaagtgcctatgcagacaccagtgtgcaaattcagttggctacgtatgcagagaaataatggctgagaacatttagtgcttcctcccttgaagttcctgattctgaggttggctctgagctcaggaaactttgcactccttgtatttaaagtgtgaaatattacctttaaaggtatttttctccttcagtatgaaacctatagatgaatttcatccgatgtttgcatcagtgtcttggcatagacccaatttgttttcctttgttgtcctttttatgagggtaaagttgctagttattttaaatattttttgtaagctttatcttcaattctttaatgatctttgttgctttttaaagaactctttcaactttcttttctatagtagcacaagaatccaagctatagtctttccaaggcttctctcctcctggggcagagcagtgtcagggtttggattagaaatcaaatccagggatttatctacaaaattacagatgagcataaatatgtcatacatatcagaatcaataaccctgctaatagcaatgagtgtttcatctattataattcttcagtctcccaatattccaacaggacttagtttcccactacttcgaaacttacttaatttacttctagtcatttggaaaaaaaaattgataatattttgtctgatatctttgaagttgaaaaggcttcttgccagtttacttattagcccaagtcagtggtcccttgcagcagagattaatcccagctttgcggactctaaattttatacaatttaggaagcgctcagtgaaaaagaccacaaaaatctctttcttttgcacattttacaaaaacattagacctggagcatacacattgcttgagtccctcaaaaagccatgggattttctgtgcaagtaaaggctgctgaagctgaagctcattagtttcaggtaaatctgcttccgatttgcagttctgctaaggtatttcttgtgtagaatatcatttgggctaggaggaggtagaaataaagatagaaatctacacagatgatgatattttaaaatttggtaaaataggatttaagtctatactacccaaactgactgaaaataaatattaaccccagacatctgtagtgagtttttctttctaaaaataatttctcattgacccagggactatcaagaaagtcatgcctggagactaaagaagtaatttttctctgagctaagttcagcatttatagcctcattagacactctgtggttattcagtcttaagcattccaccttctcctaagctcacctagactagctgataccaggcatagtcccattagttcaatttcactctccttaccctaagaaatttttaatatgtatatcaaacaaatttaaatggaaaatgctgtaagttctcttttagttctgatgaagaatttataaacaattcatattctttttttttttcttttgagatggagttttgctcttgtcacccaggctggagtgcaatggcatgatctcagctcactgcaacctccacctcctgagttcaagcaattctcctgcctcagcctcctgagtaacacggattataggcatgcaccaccatgcttggctaatttttgtatttttagtagagacggagtttcaccatattggtcaggccagtctcaaacctcaaatgatccacccacctcagccttccaaagtgctgggattacaggcgtgagccaccacacttggccaaacaattcatattctacaatagcaatatagtattgcatatagatacaagttttactattatctaattaggaaactgtggggtttcctatggtaagattataaagtatgtcataaaggttttggaggtcctcatactgcagaaatttaatttttctattcgtaaaaggaatcacattaaaaactactaaattatcttacatttcctatttgattttatttacccagtcttgcccttcatgccaaagtaaaaagattagaattcttaagtgactaattaagaggaacattggaaaacataatctctaattatgtctcaatattacacgtgtccatgaatagttatctctaagatgaactccatttggctttaaaataggatgttagagatatttttatgaaaagtttgctctccagagctgtaagttcaacataaatttggaaggctaagggaaagttttttttttttaagtcgtctttattcacttctaattttgcccgaaaaataaagtgacatccttaagtacttttcatttgtgaggtagtttgactgatataaattgtgcagggtagtagttttgtatacagttggttttaggtaatttttcccaggcatctactttcctgttcataataagctgtcagtatatgttagttaaatgaatggatggcagagcccctttgtgcatttgctgtgggcttcggctttctcggtcttttggtttgaggaatagttaaggcacacagagaaggtagcctagcaaatcttataagccagtcatatttgggagtgtctgaggatttttatttttaaatcatctacaagtcaagaatatatactttaaatgaaatgatcagccaggtgctgtggatcacacctgtaatcccagcactttgggatgccgaattaggaggatcacttgagcctaagacaaggagtctcagcatagtgaccctgtctctacaaaaaatttaaaaattagccaggtatagttgcatgcatctgaggttttagttacttgggaggctgaggcaggatgatcgcttgagctgaggaggtccaggctacggtaagctgagattgcaccactgcactccagcctaggtgacagagtgagactctgtctcaaaaaaaaaaaaaaatcactcactgttcctgcataataacttttaatcaaaaatctgttccaaccccccagccccatcccccccaccaaatatatacacaaacctgatttagagctggtttaagtggctggcttttgctctgtgtcaatgtgccacgcctgtgtatgtacctgagcagttaggatgcatagcagagtttcagtttatatgtgcaggctctcaggtaaaagggagaattctggaagaatctgcagggaatactagaaacgtgttggcaatactttataagagagagtaaaaatgaatttatcttttgaaatgggagcaaagctacctatttttccagatatatacgtccttttacaagtcgtcctttttagagcaattgacttctttggtttgaaattatttacccagatggctgcctaacgagaatttgagattaggtcaaatcatttgtaggactattttgattaatgttctttgatttctaaatcaaatgtaccagaccaaacactttcaaagagaggaattaatatccacaaaatattatttcatatgcttttgctctaggtttttccacagctttcagccctgtctcatttcaccttaggaggtagagaaaaataactaacacatcaataattagtttagacctgaaaacactctgctgcacagctgtaatgtttcacaatggtttctgagctaagaggtgtttatgtagcatcaactttatcgaaacaaaaccctaggtaaaaacacattgaaatggcacttaaaacaacaacagtgcccaaaatctgttgtttcattacacttgagtataaggcaaatctggaagttaaattgtcccatattgagaataactgaataaatgtttacataattgctcccacttttgctgaatcttttggtttgatcaggtttagagcagagaggtaaaaaatacatttattaaaagagagcttttgagattgaatgctctaattaactgctaattacttctctaactaggctattttagattaaaaacctaactgtctcaattctagtggattttgaggttgtgatgaagagcagagccgatattcagtgggaccacaggatcaagcactgcctgtgttactcagtatttctctgctcagagacagaaccaattataatatttagcagattttttttattggaaagtcttaaaaattgatcagttttaaaatagatgcacacaaactaccttgagctttactttctgatgaaaacaatctatactatatgataaagaacagatagatatggaatgctggttcaagctgacaaaatatgcacttttgttgtcttagatctagtgaggaaattgattcatgtttggtatgactatcttcacaaggaattgcttataaagaggtagggcctaactcatttatataaatcgaggtaaaggaataccaggagtaaatctaggaaaattaatttttctgtttttaggtgcttctaatactgggaaaccctattggtttcaaagggaacttctaggtgagaccatttttagagaacttgtattccagcaagcaattttttatggagcagaggaagcatttttaattattatatattctaaccatattatatagcaatcagataaatttaaagttatagtctgttgattaataaattcatggtgggttggctataatagcaattttgcttcagtatctaagacaaaatttgaatgatttgagaatgcatgatttacctcataatgtgacacccttttaatcaaaacacccgaaggccaaataattagatcttgtataaaacttggaaagaaaacaccgttgtatacccctacccaccattgaaatctgtttttagttaataaggaagtgggagtaaaatatttgagtgagcctatatataggctctcatgtattaaaagaaaagctatttacaactgatttgttgctaaataaaatcttggatgaacacttttaattactaaaaaggtaaggttacaataaacacaggaaatataaatgaataaagtgtgcacagagtcatgctgctttcaggactataaatagcacctccatctctgctactattattagcaagtatgaacaaaagaagatgtccagaaatagaaaggggaagagcatctccatgagccttgtattccatggcataggaaatgtttctagcaagcccgtgaatttagagggttaattgatttttagaaaggacatttccatgctgtcaatttgccaaggaaattcttttaccagcatgtttgtaaaattggcaggctgatgtttcctctaggtgacacaagatgtgatgaagaattttatctttacttccttacgaaaatcagcgttgattgcttgcctttttgttaacttatttggttactattagtttgcatctacagaggatcagttaacatagttgaaactggaagaactagtgcatcgtgaacagccctgaaccaaaagtcaggtttcagtttcacctgagccactaatgtgctctatgactttggtcaaagcatttacatacatatatatatatatatatatatatattcccctttatatatatatatatatatatattcccctttatatatatatatatattcccctttatatatatatatatattcccctttatatatatatgcgcacacatactgctgtcccttgatatctgtgggggattggtttcaggaccttccacagatattaacatctgagaatgttcaagtctctggtataaaaatggcacagtatttacatataacctcccatgtactttaaatcatcttaaaattataatacctaagagagtataagtagttgttacactgtattgtttagggaataatgacaaaaaagtctgtacatgtttagtacagacacaatttgttttccccaaatacttttgatccatggttgaatccacggatgtagaagatacagaatcacagatacgtaggccccactgaaacacacacacacacaccacacacacacacatatgcacacacatcttctctgagccacagtttcttgattaattaatatagcaaacatatatggagcgcctcaatatgccaggcacattgctaagcagcagggatacgaagtcggttaagatacccagtccttgcttactagcctcgcactgctgggagacagacttttgaacctgtaattagaatgggcaatgggtgtataacagagacgatagctgttataagaacacagggcagagcttttctgtctgtggagggggcaccagggaaaactttgcagagatggtgccatttgaatcaactcaatcttaaagaattcctcttgaatttttcttcaagactgatttggatgaaaatggctatacttggtcctcgtgaggaatcaatgacataataaaagtatgctaaaaagcataaaaaacaatataaatagtctattagtaatgaaatgattcatgggcatgaatattacagatctagttctaatttttgattgcctgtttattaatgtttttttctttttgataatgaattatgagtgcagttatttgagaactgattgtaagactgtagttaaaagtgggagaggccaggcacagtggctcacacctgaaatcctagcactttgggaggctgaggtgggaggattcaagaccaacatagcaagaccctgtctttaatctaaaagaaaagaaaaaaaaaagaaaaaaaaacaagaaagagagaaagaaagaagaaaaagggccgggtgcggtgggtcacgtctgtaatcccagcactttgggaggccgaggcgggcagatcacaaggtcaggagatcgagaccatccttgctaacacagtgaaactccgtctctactaaaaatacaaaaaattagccaggtttggtggcgggtgcctgtagtcccagctactcgggaagctgaggcaggagaatggcgggaacccaggaggtggagcctgcagtgagccgagatcacaccactgcactccagtctgggcgacagggcgagagtccatctcaaaaaaaaaaaaaaaaaaaacacgagagaaacacaaatctcaaacactttaattttttttttttaaatcactatggactggaattaaaaaaaaaacttctccaaatatggatatattttcccataagtagtcatgatagactgaatgattattttttaaatagttacatttttaggggtttacacgtgaaattatgaagatatggaatttagtaataattctttttaaaaacatgtattacttatttataaactatatgtgtattctggtgaaagattgtcctctaggaaaaataagtcttagaattatttctctccagtaggaatttattattgtcctatcttcagccagacagctctgtggtaatttcatttggtgatctctttaataaatattttttggagtgcctattttgtgtgatgccaaatgaagtaaacagtgttttatgtaatatgttccaatatatattttttagaatgaaccatttaccaagtatacataagtcagacattgactgcatatcccactgaacatttccattaatataagtggaaaaaggaaagccgctttgcaaaaaaaggaggcttttttgcttcagcaatatgcaaattaatttgaagcatgccagtagttttaatataggttgattcagaattaccattgtgaataacattcacttctattactgcttttgttaaaactaagcgccaaaaaaggaagcctctttgcttcagcaatatgcaaattaatttggagcatgcaaatagttgcagcatgcaagtagtttagaattagactttcattaaaactaagtgccacacagagaagaggtgtaaaacagagtagtaatctgttgcgtgcacttgaagggttcttgaaagacgtgcataaaccgttaccgttgtagcacaagttgagcagcaaaagccaaagtcgcacatctgtgtcttgtcgccacctctccacttatccactcatgctggcttttctcccagcagctctttgccctcctccttttaacactgtgggctgaggtgaggatgttctagtcaagagtctttacgagccttatatcgccaggctttcagaaaatgtgaagcatggtagtgtgaatttagaaaaaataaaagtgtgtataaaagctcttctgttttcttttcttttttttttgttaagaaacaatagtgtttatttatcatgttttgcttagaattcctttggtattctgttctcttgattttaacaagaagctaaactcaataacatcttttaaaaacaaaacaattttcggttgagggtgggtgaggaagttatatgaagattgagtgggaacctcaacccaaggacataatagacaagaaacagtttttttcctcccctttcttcagaagtagtcttccgcatggtttaatgtgctaacataaccccggttccaatatttcaaaagatacagaacttcccagcatgatgataaagttttcctgtgttccaataataaaacctcaacgtaccagtgatttccagttcctttgtggctcagcaacttgtgaagaccaactaagtcctaagtacccagcctgcagtatcagtgtgggagtcggaaacagatgttcacgggacaatgccatttgttgtcactgtcgatactatgtggcaactttcccaaatgaaattgtttgtggatggaaaagaatgtaagcagtgattcatgcccaggaatttttttttttttttgtctgcaggctaaccgtatcttatttgttttaaatcgcagagcattagtggattaaaaattttaggttaacttactattatagtatctttttcattttttgtcctgtacttctaaaaggagtgactaatttaggtagcttactgagaatagtaaataccttacttgatttgagaattcaaaagcagctgacatcttttcagatttagtgttttaactattgagtaggtacagagttgccatttaaatgaacagcatgacttgcttagcatttttgttaataatttggaggtttggagaattcaaaataaacattaagtagaaacatattttttggtaataggtggcattgcatgatcttggtttgagattttcataaatattacaaaggaacttccactaactcactcactgttagagataatagattaatttgtataaattaaatattaattatagagaagtttaaaatgtacttaaaatgaatttgatacaacaaagctacttaaaagttaggtagaccatgtcatgtgacatgtatacaaactatcctttttcaagaaaaaacctaacaagcgtttaaggcataatatctactactttagtgccgtttttataaaacataaattttaatctacaaatgaaagtcttttaaacatttattcataccaacagatgcctaaggccagaattataaaatgttttatgttgttttaaaaacatatgtatttctcataattaggtttcggcatcacagaaaaattattttaagggtcatacaacaaaatctgacttttaaacaacagccaaaggaaagattggtatcacatgtagaggaagaggtccttaattaagaagcaaattccggagtttcagtaactcattttcactagctaatgtttaataaattgtattaggttagtgcaaaattaattgcggtttttgccattaaaaccacaattaggttgggctgggtggctcaagcctgtaatcccagcacattgggaggccaaggcaggtggatcacctaaggtcaggagttcaagaccagcctggccaacatagtgaaacctcgtctctgctaaaaatacaaaaattagccaggcatggtggtgggtgcctgtaatcccagctactcgggaggctgaggcaggagaatcgcttgaacctgggaggcggaggttgcagtgagccaagatagtgctactgcactccagcctgggtgacagagcaagacttggtctcaaacagaaacaaaaacaaacaaactggcaattaattttgcatcaacttagtagttgtgtggttccctcttcctcggacttctttttctcatttgcaagatggtacgtcagtctggatgacctttagggctctcgcagtttttaattctagtttagggctttgacttctgttctctagcagtcactgttaacattatttgagtatctgatgatagcttgtactaattttcccagaaaaatgcataaaacagaaattttgcatgcaatcccagggcttcatggactcattgaagcctagtgatagtcccaggtaaagaagctagttaaagaaagttagtatcctcacgtttctgtgaagattcaagcaagcatttcaaattgctccaaacgtgggcatcagaactttctgattattaaacaaagttgattgtttttattttctaacatatctacgttagaaatttggcattgataccagcacacttggagaaggcaaaaacacatgagttggtccactaaagacttcaatagcacttggaaagagatactcgtgtgtgttatgtatggcatgtcaagggaagttacctacatcccagctaccttgctttagaacaggaaaggaatgaactaaggtgcacttgcctgtctcaaccagtgaatcaagactgattgtttgtagttattttaatttatgaaaaattcaaaatttaatgctacagaaaagacaatgggcctagggaggactatgttaaagtcttgttcattttctagacccaacagagaatacttgaatgcacagaacaactgaggaaaatcatactttaagtaacaaatacaaactagaaattaattctttcataattaagactatttcaactattaattttcttccaatatacccctctactttttttagccatttatgggtcattctacattttcttaagttctaatatgatctggagaatgtcttggacttctttaaagtaacttcatgcatgtgctctcattagatcctttatttactaccttactttaatgttatacataatacataataaacatgtgaaattcattttaatgaatagtgtaagcctcaaaaaatttacttaaccacttctttgacctagcaaatttataagcgatagtaaaactttccttttacctttacaataatagcttttaagtactcaggctgacaaattcttcatggactcacttttatgtttttcaatttctattaatttctctgtattaaagttgaattagatggatttatgttgcctattcctggcattcatagcaactataaggcatgatcaagaaaacagaaattctaatcctcatgttacagaaatggccccaattctacttgacagaaatgatttcaattagggagtctctgggctaccttttctgtttcaccagaacaaatgttattgatataaggggaaatccttggataccatataacctgctcactctatggagcagagttacttagagtgctccgaatcccatctttgatctctggcgatatttttctctgttatgtcactgaggtcacctggctcatgtgtgacaaactgcctgcataagtcacagtgccagtggcagagatttgtaaccatgcccctggtccattgcctttgaattatttcacaggcccgctgctttacatttacactctgtcggaagatgaacaggggaagggagtaaaatcaagggcagggtctcatcctgaaggacaaggggaaacaggtggaaggttaatggccctggagcgattccacaagcctctcaggcttgatatatgggcctggggcctaaaacgggcattggctttcaaagatatattatttcatttgaggagagacattctggagttcctgcatttgtctgctgatagatgatcctctgtccacaattggttatggcgtgtgagttttccttgggcctgctcccatacataaaaattttgctgagctctccaaccttttgcatgcctttaggaatgggaccggtgcaagcccactggcaggctgttggatttttttgctgctattttagtagttccttttgaaccgtgaggcaagtggggaatgaaagacacttctgttcattcatacatgacttgataagggtggccttgttataaaaaaaaaaaatggtgaaagggatgttaggaatcaaacatatgtgtcattttgggaagacaggctcagtccaaaatttagtcatttgggtttcaaaaagttgcttacataaaagctagatactatcaaatagcttttgactttattactgttttgcactccccaggcttttagcaaatggcttactctatttttctttattatttccaaaaagtttgaggtgatttggagaaagaaggagaacagacagttggaaaaaggtgctttacacagagatccatgattaatttgcctaacaagaaccatcaggcaatgctaccaagaaatatgtctaatggctcaaatgttacaatcaaatagaactggtcactagattaatggaaccagtcacccgaattaaccttgtgtggcctctcaaagttgtactatagagtctaagactgcaaaaatcatttgcctcagcctcttaatgttcatagacttaatattcatgaaaatatttggattctaatatgctttgatttatagtattttgaaatttaattattaactctggtttgagatatatatatataaaatctttgattttatagttcctggtaattgtgatactagctttgtcagagagagaatgcttattttatggcaagcattaaggaaaaatgagctctgtaaactcactatctaaacaaaaggcgatttttctttccagctcttttgtgttccattacccttgtgtttggtgaattctcacaccactgtatgaaatatcaaaatcctatttgtggacattttatctcgaatagctttgtcaaaaacaaattcttcacctggagaaactttccattatcatcacagatacactggcatttaactacaagaagttaatattggacaaatgatcagataatatctgagtatcaataggaatttcattcttggatgagaggcaacaaattgcaaatacttttcacatatatttacaagggatccttatcacaatccctattcatattgccctcagtagaaacatgcagcatctggccattggcccctgttaataatgattacacagatgtccttttcttttcctctggaatattgcaaagtagaggttagaccagaagcaagaagactggagaggcatgtttagtacctgcaagaagatatttaataactttcttagaggaaagattcagaatcaccagttacattgagttgaatgaggagcattagccgtcaaaagaatctgtttttccacttgttgcttggataaatggataaaagcctgccaaggacttcagtccaccagctgagggtaccatagctaaaatactcccaacagaagggcaggtcccaaaccacacaggcatgcttttcaatcacagaataaaatgtagttgttttcgtcatttcagcttgtgacctaaatgcctcattttcatgtttgaaaagttaccaactttatttcagtcctatttcccttcctctgtggtatttcccagtcagtagaccacagtcctgtgggttatatcaatgcctaaagcagagatcaaatcaaagcataccacataactggttaaaatgaaagctcattccgaattagtaaataatgcccgcctgtcttccacatctgtcaaagtctcccagctcagatggacacctccataagctgatccataggaagccaaatacttgcaaacagcctcttaattgctcatttgcagttggacaaaatgctaaatgcagaaagacttcaaaggcaatggaatctgcattgaaaacaggatctcaatacacatagtcgcttattgttgcaaaattagaataacaaatgttcccagcatgaagccaacataaacttgcctgagtattattcaacctgaaacatagtctaccttttttttttttttaacagcaatagaagaggcatacttagcactctgtttgttattctatactgttcattttaatgatatatttaggtctccctgacactttgtatttttacgtgtaattacccatattaaaaaaaaaacaccactcattagtgttctgttctactgacttaattatgccccttaattaaatctcagctaacagggggtcaccgcagtgtcagtgggatttgtcactgtttgtcagcaggtgtctggttgcatctatttctggttttcgtatggtttgaatctatttaagaacttgctacaaccccgtcctcccctccacaccaaccccaaatgccagagacagcattctcattggagggaagaagcagtatctatttgacaggcaactgcttcccaaaagcttgtttgtaagaggaaatttttgttttcattactctagaaaaaatctcctgattaggggaaagatgcttaaaacagacttggataaaacagatgcactatttaaaagatgaataggtttacattctaaaaattatgatcatatttttgtatacaattctaaaagttccttgaagaacaaaaaatatattttgttgctgctgttatgagaagaacatcacattaggtgttttgcatcatctggccattggtgtctttgtacagagtactttgtatcaattatttggttcacgtttttcattttaagaatataaaacaaattacaaacatatgagtcaaaccgaaaaaaatgtcttttgtgtgactaatgtagggtcaataggaatttaattcttgaatgagaggcaacaaattacaaatacttattatttggaatgagtcttagtattaagacttatatgtcttcacatttcacattagaatgttttaaactcatgattttagtatattaattaagggagatataattcccatgtttctgtatataataggcatctaatgttgatctgaataattgattagtccagtcaggcttttataattagttgtcagcttttcagtgtaaagccctcaaaacacctgctgtgcatctacaaaggtcttacatatttattagtgtttttaacctaaaaaggcatgcaacctacctgaaaagcatttaattttttttctggaactaagatgacccttccaacatataccctaagaaactaaggctatatgtctctgagtttttcagtctagaagattttggactgaaattctgatttttaaaaatcataacacttatctttatttaaagataaaaatgtcacagtttttctatggaagtttttcagaactcatatttctaatagtaaggttaagcaagacaatgggttacagatatcaaactatcaacaatgtaaagtagttttgagacttcactgtcattattgtataagcaattttatttttctgggtttacctacaaatgtggtagtcacagaagaagaaaaataatttaaagaaaaatttataatactcagcttatttatttctgaaattcaaatcaattcatttcatcctaaaaagttaactccaactggcttttcttaagtaacaaatgtcatcatttgctgtccaagtaattttcaatacaatgctcatttgatgttgcctctaaagttcttatcacacaagtaataagtaatccatacattacatatatgtgtacattttaaaaaccatttcaaatggtgagataagaatttttatgcattttatggattcctgtacagcctcctcattgtcattagataatgaaaggcttcgccatgtgtgtatcgtaaagacctactaagcaatatgaactctccagattgctttacatttacacagttgaagtatatatatatacagtattgtacagtattgtacagcaatattgtatagcaatgtacagtattgctgggcacagtggctcatgcctgtaactccaacactttgggaggctgaggcaggtggatcacctgaggccgggagttcaagaccagcatgacaaacatggagaaaccccgtctctactaaaatacaacattagccgggcatggtggctcatgcctgtaatcccagctacttgggaggctgaggcaggagaatcgcttgaacctgggaggtggaggttgcagtgagctgagattacaccattgcattccagcctgggcaacaagagcgaaactccatctcaaaataataataataataataataataataataataataaagtacagtttaaataccatagggtaggtcagatattcttaagattccttctttcattcagtaaatacttatcaagtattagtcgtatgccaggtaacattataggacttagagattcaacatgaagagcatagacaaaaatccctgcttttgaggatcatatttatatctattttagtgactaagagcatttatttaagacaattgcactcatgtaattaaaaagcacttataatctggcaagctagcctaatcttagcaatggaatgtttctgctctctttctgtttaagccttcaggagatcataccagttttcccaactggcatatggtgagttcaagtacatttcccacatatgctcagggattatcttaattgtattcctttctgaagcttggaatcaagggaaaaaaagaacaataatgatttagggaaaaataatagttttttaaaggtagatttatagttagtaactttatataggtgaactgatcacagagaagggtgtaaatcatctgaataaacaatggattttcacacttactagaatctctaagaataatattttccatattacagctaaatgagacccattatgtatgctttcagataaactcacaaagctcttacccatgtaaatctcatagatctgccattattcgtaatgaataacaagttttatcatgcattttcattaaaaatgcattaatccctttgtagtaacctctccctaattcattgattcgataatacaagaacagtaaacatttctggcataacaaaaatgtggtatcaaagcatactgtatccataaatacaaaatgtaacaggaaaacaaatacatttatcaaaggaggatcaggttttccagccactaaataatgctatggtcgaatactgctacagtctaatacattaagaactcaatcatagtgccgcattgtgagccgtttgtaccggatctgattcttccagattaaatgacttgttgaaacttgaagatgaaagacaggcagaagtatccggggctctaccctcaggaggctccagggtgggttactgccagtgggggactaatgcttccgtctagtggagataggaggaggaggatcagaagtgacatgtatgtacccttttttacttgtagattatttacttagctcattttaggctctgtgtcctcatctgtaaaacatggcattacctctttcaggtattttactggggattaaatgacttaacacaaattaagtccttggtagatagtatatattcaagaaaagtcaatttcctccttcctttattgatgcttaaaagcccctggtgctgtatttgattgattcaacaaatacttgggcttggcacaaggcactggctatacagttacttccctcttatcatcaccatagaagcctcctgatgtggaaattaggcaggccttggagtcacacttggcttcaaatccccttccatttgcttcccataagctcagcatgtaacttcactgtccttctctaaaaataggggtaatgtataacttacgtggttatctaaaaaattaaatatttgtagagtgcagtgtgctagaatatctggatacagagagatggattagagatggtgtctagagcacaacagaatgaagacctatctcaaaaaaaaaaaaaaagaaaagaaagaaagaaatggtctctacccttaaagagggggatacacatgtacaaaactgtgaatcccaatgcgatttttgtggggaatgtgttcgaatgctgttcctgaacatatatctcagcatttccaaaacaaaaattacatttcagaaactcagtagataagaaacatctgcaaaagaccgacacaatttatcttcaaactaacaaatgtgttgatctatgtgcatttgatatctctatacttatataggatgctaggagacaattgttttaagtctgtgtggtgctcattttctttgcgcctaatgtaagagctgtttggtccatagtcacctctgtccattctagaatagagggtggtgagatggggggtggtgtttttactcgtgagtcgtttggagattatcaggctaactacgtgataaaagatgctgaaacactggtttgagttagggtggagaaaatgtgaccaactcccagagtccagtatgattcacttactgttgttaagactttctgccttcctttaattactatgtcaaacaagccttatttatgccaaacaattaagtctattattaatggagaggtaagagggtggggagagaatgagttccggaaactttttttttttattttgagagggagttttgctcttgttgcccaggctggagtgcagtggcacaatctcagctcaccgcaacctctgcctcctgggttcaagctattctcctgcctcagcttcccgagtagctgggattacaggcatgcgccaccatacccagctaattttgtatttttattagagacggggtttctccatgttggtcaggctggtcttgaactgccaacctcaggtgatcctcccacctcagcactccaaagtgctgggattgcaggcatgagccattgcgccggcctgacttctggaaacttttttagaaataaaagactcagctaatagactacgatatgttgagtgcagtgatagaagttccctaaggagagtaaaatctcaacaaatgtgagtcctctttttctctgcaatcctgacctgtgctaaaattggggacaaggccgggcaaggtggctcacgcctctaattccagcactttgggcggccaaggcggctagatcaactgaggtacggagttcaagactagcctgacctacatggtgaaaccccttctctactaaaaatacaaaaattagctgggaatggtgacacatgcctgtaatcccagctactcaggaggctgaggcaggaaaatcacttgaacctgggaggtggaggttgccatgagccgagatggtgccactgcactccagcctgggatatagaatgagactcctcaaaaataaaaataaaaaattggggacaatatcgggtagacaaattttagtttctaaagtagctgaagggtctttgttcaggtggtttctgcctttcagctttgacctttatctgccttgttgcagcccatgcatactcttcctcttccaatattcatacatccacaaatgtccctctcccttcaacacatacacccttcttcaccaacacacacacacacacacacacacacccttcctcttaaagcttattctcaagaaaggtttaagtttgtcctttcagttcaatagccatctttcctcatggagtttgtcaggtcccttcttttgtaattctcctacttgtactctccatccactttatttccctttttttttgagacggagtctcactctgtctcccatgctggagtacggtggtgtgatcttggctcactgcaacctccgcctcctgggttcaggccattctcctgcctcagcctcctaagtagctgggactacaggcacgcaccaccacacctggctaatttttttgtattttcagtagagacagagtttcaccgtgttagctaggatggtcgcgatctcttgacctcgtgatctgcctgcctcggcctctcaaagtgctgggattacaggagtgagccaccgcgcccggctttatttcccttttatctgttctttcatcccttagtcacattttattttttttatttttatttttatatattttttgagatagagtcttgctctgtctcccaggctggagtgcaatggtgtgatctcggatcactgcaacctccgcctcctgggttcaagcaattctcccacctcagcctcctgagtagctgggactacaggcacccaccatcatgctcagctaatttttatatttttgaagagatggagtttcaccatgttggccaggccagtcttgaactcctgatcgtaggtgatctgcccacctgggcctcacaaaatgctgggattacacgtatgaaccaccatgcccggccccttgctaacattttaattttgtttgtttattgtaattagagatggagtctcacgtgtggcccaggctggtcttgaactcctagcctcaagcagtcctcccacattggtttcccaaagtgttggcattagaggcgtgagccatggtgcccagccccttgtttttttttgttgttgttgtttttgtttttgtttttttattgaaacaataaaaaactcctctccatctcatcccacttgctcttgttgcccaggctggagtgcagtcgcgcgatcctggctcactgcaacctccacctcccgggttcaagtgattctcctgcctccgcctcctgagtagctgggattacaggcatgtgccaccacgcccagttaattttgtatttttagtagtgacagggtttctccatgttgctcaggctggtcttgaactcccgacctcaggtgatctgcccacgtcggcctcccaaagtgctgggattacaggcgtgagccaccatgcctgaccgcccagccccttgttatttaaatctttcctcttccactggctctcatcagtccacatgaatgtgcaaagctcccctcctgaaaatagaacaccacattacatgggtctccctgtctgtcaccgtcctaccttttctcatcatgacacctttgcccttttctccacctcttctttttggtgttaacacagccaatactgtaggactgcagtgctaaagccgggcagcaagctcactgcatttgcacttctccatgggaaatgcctcttgtgaatcttaaacatcatcaaggagcttagccacatcttctcagccctcatcctctctccccattttaatccttggccatccttgaaattccttctggcccagacttcttggtcactactcagtactcctctctgagtgcaccttgctaggtttcttcactagctcctctccctctacccaatcttaaacaatatttttttctagttttctcttattggtttccttactttctcatccacacattcttagtgatttctcccacaaacacaattatgccatactttctctcgcaaactccacagcagcatcgtgaattgcttgctgaaacataaatgatcatcacctccaataagcctcatttagttctgcaactttgggttttgttttgttttgtttgttttgttttttgagacagagtcttgcactgtcacccaggctggagtgcagtggcaccatctcggctcactgcaacctccacctcctgagttcaagagattctcatgttacagcctcccgagtagagactgggtttcgccactttgggcagactggtctcgaactcctgtcctcaagtgatccgcctcagcctcccaaaatgctgggattacaagcatgagccaccacacctggcctgcaactttgtacaactttctttctttcttttgagaaggaatcacactctgtcgcccaggatggagtgcagtggcaccacctcggctcactgcagcctgcgcccccaggttcaagctactcttgtgcctcagcctcctgagtagctgagactataggcgtgtgccaccaagcccagctacttcttgtatttttagtagagatggggttttgccatgttgcccaggctggtcttgaactcctgggctcaagggatccatcctcctcagcctcccaaagtgctgggattacaggcgtgagccactgcacctggccctgtttctttcttgcactgtcaaacaacacattctctgcagttattatcctgggttgtctggtttgatcatatcactcacaactttctattgcatatgcagaaaaaattagaattcctcaaccaggtatctcatcatcactgtcttcctctccatctcgtctcacctgccaaactcaaagccattgatttgactagtctaaatgtaggcctggacgtatttgacatggggactatttgaaatggggactatttgaaatggggactatctggcaaaatctgggatgggatgtaagatgatcgcaattgcacactcactcctagcctggtttctgttagttatatgtctaccccctcaactctttccaacctctttcttgtcactgtttcctctcacaaactctagcacagagttttgaatttggtagttacaccacaaaatttttaacttgtcagaaattcatttatgattatatgcaaatgacttgtgttgatttaaagcagtagttcccacaccttttggtctcaggacgctttgcacttctgaaaatgaggactatggagacctttagtttatataatgtattgggagttaaaaacagagatatggttacaaatcaagcatccacaaatacacattccatttgtcaccagagtgatgatgtcattacatcctgtagcctctgcacactcctgacaagtggagggtgaaaagggcaaataacatcttggtgtaattggaaaaatagttgtaacctcttgactccctggaccatactcgtaaagccactgatttaaatattatcactcctatgggtgtctactctttcattgggattaaagattgatgccaaatgaatacattttccaaccttgaattttcaaatcagtaagtaagatcagggacatccaggggaacaaaaacccttctcagtgtcctgggatttctctcccagtggctgtgagactgtactcctggaggtagggggcatcagtgagaccagggccagtttgaggacagcacagatgtctctaggtaactgacaaacagacacaggtttccctgagtgtcagcctctgccccctccctaacacacactcacattcacgtacacaataaatcaccctggagtgcgatggaaattccaagaacttcagcattgtcttaacctgtgttctggtgccatcctgagccttgaccacattgactggcttttaaagtaggtgccattgcattcattcttctgagatcaatatccctctgggtctccccagcagctatggtctttctgcttggccccaagacaattaagagaattaatggggagaccatgtccaaataaaagactggagttattgctttaacgtgcagcaactccagtatttgcattaaattattatttgctttgtaatatttgatcaagctagggttagggactagactgacttttatagaagagtgatgcactctaacagtgactactatttattgagctcaagccttaagttctattcatttattagctcactaaacccttacaacaaggggagtggggagggtcaatattaattagaatttgactgcagccagaataaactaaagctcagggggtttagttatttgcccgagttcacactgatctgctggccactggtggagcctgtttctgtaccagacctgtctgattttgcacctccttaccctttgctctctttcttttttttttttttttttgagacagagtcttgctctgtcacccaggtgggagtgcagtggcgtgatctcggctcactgcaacctctacctcccaggttcaagcgattctcctgcctcagcctcctgagtagctgggactacaggtgtacactaccatgcccagctaatttttgtatttttaatagagatcgggtttcaccatgttggtgaggatggtcttgatctcctgacctcgtgatccactcgcctcagcctcccgaagtgctgggattacaggcgtgagccactgcacctggccccctttgccatcttagttattgttctcatcccatattcctgtgtctaacattttggtgtgtgagtgtgtgtggaggactgatgtgcacatgtggagtggggagcattggtttgctagaattttctagagctttttattcaaagtgtggtacatgaaccaccagcattggtttcattagtcagcttgttagacatgtagaatcacagtcccccgaactgctggatcactgtgtattttaacaggacccccaggtgaactctaagtgtgttcaagtttgagaaacatggatcttgagcacagttgtatctctctgaacttttttgagagaattaagtgaagccattagtagggtttcctgcatagacacatattcaacacctttagtaaaaaacaaaaagcccgcttcttaaaagaatatgctttactttgaaagtttgcatttatgctatcttgtctatttaatgctatataatttcagacataatatagtaactctacaagacctccttccctgtataaaaagacgcactataagtttttgtagtcatctttgaggtctgtctgtagtgtgctttattaaaagcgagcaaatactgaaggatcccatttaagtatgtggtctgcggtggagtctaatttgtaccactaggcaaaggtcacacagaggagctcgttaatgcacttactccgggatgaaatcaatctccatacttcaccatattgatctgatagctcattggcgcttccctccgtgaactggttagctcacgtgtgaatggagagagatagatagctttctgggcctgagaattctagctggggtgccatccagggcaaaaggtggatgtttttacatcctcatttgggtggcccttttggtttctggtgttaggctcttgtgctggtatatcagttagtcagaaaaaaaaaaggttttaaaataaataagttgcttttctaccatgggtttattctttttcttctgtagtttttatgaatcatgtgtgctcaaaagtatggatcacatttatctgaatacaggcagatgacttgctttaaagtgtaacattgatattactaaaagacaggtcttttttttttttttttttttttttttttgagatggagtctcactctctcgcccaggctggagtgcagtggcacaatcttggctcactgcaacctccgcctcccaggttcaagcgattctcctgcctcagcctcctgagtagctgggattacaggcacatgccaccacacccagctaatttttgtattttgtatttttagtacaattagacttgtagttttagggatttcaccatgttggtcaggctggtcttgaacacctgaccttgtgatccacccatctcagcctcccaaagtgctgggattacaggcatgagccaccacacccggccaacataggtcatttcttaatgaaaagataacctgctcagtgcaatcttcaggactcaggagtctcccctatgttcctttttgtcaaaactcaatgctattgatgtatatatgtggtcatttaattgcagaaacaccaaggaagtagggcttggtgaatccggctcataaaacacacacatgggtactaattccttgaagaaatgggccaaaataattctagaaatgaggtagaaacaagccaacaagccaaatatttccaatttttaaaagatgtatagattccagatgcaaactggataaaagcagactcagatcccttctaactttgagacacggttttccagagaaactatgaatattgagaaaacagcagcctccaaagccgccaagacttgatattttcattacgcttggttacaagctcgttgaaaagtgtttccggttcatccttgaatctcttccaatctaagcacaatgctgtgcacatgagcaggtggctttgtagtctatagactcctcctagacttccttttcctagattttaagtcaaattttgcctcgaggaagagtttgaagctcgagtctgaggcaagtatctagcccaaactttcgcaaaattgaattaacctcattctttggatgggtatttctaaatttttaaaaatttcttggccgggcacagtggcccacgcctgtaatcccagcactttgggaggctgaggcgggcggatcacgaggttaggagttcaagaccagcctggccaatatggtgaaactccgtctctactaaaaatacaaaaataaaaatacaaaaatttgctggttgtggtggcacatgcctgtagtcccagctactcaggaggccgaggcaggagaatcacttgaacccgggaggcggaggttgcagtgaaccaagatcacgccactgcactccagcctgggcaacagagtgagacgctgtctcaaaaaaaaaattggtttttttttttctttttttggagacagagtgttgatctgttgcccaggctggagtgcagtgacgccatctctgttcactgcaacctttaagcaaggggtttaagtgagtctcgtgtctcagcctccagaatagctggggttacaggcgcgggctaccacacctgcctgatttttgtgtttttagtagagatggagtttcaccatgttgcccaggctggtcttgaactgctggactcaagcagtccattttttgcaacctccgaaagtactaggattacagatgtgagccaccacgcccagcctggatgggtatttctaaaatacacatctattaaatgccactttttttttttttttttttttttttttgagaaggagtctcgctctgtcgcccaggctggagtgcagtggttcgatctcggctcactgcaagctctgcctcctgggttcatgccattctcctgcctcagcctcccgagtagctgggactacaggcacctgccaccacgcctgacttattttttgtatttttagtagagacggggtttcgctgtgctagccaggatggtgtcgatctcctgaccttgtgatctgcccgcctcggcctcccaaagtgctgggattacaggcgtgagccaccgcgcctggccaaatgccactttgaatgtcaaaatatgactgttcttcagatgaaaaaatagcctttttagacaccaggcaccaaaataactttcagaaaaagtagtgttcttctagagttctcatagatagaaaagaacataaaggaatatgttaaacataacaagaagactggacatatttgtaagattccaaatcttaggatataattctgtccccagcctttgtgaagacagatggtcacaatgaggaagagggtatagtttacccttcaatcaggctccatctgacctcctttttaataaaaagaaaaaaaaaaaaagatctcactgtttcccgggctggagtgcagtggtatactcatagctcactgcatcctcaaactcctatcctcaagcaaccctcccacatcagcctcctgagtagctgggactataggcatgtgccatcatgcctggctgagctctttttgagtaattgaaatagcaatgagatgcccagagtcctcagtttgaactgctgtgttcagcctagtgagaaatgcataggcacttcagataaagtggcatgagacttcagggaacaaatatagaacaatgctgcacaaattcacctgaccttgagcacctggctggatgtccattggtgaatgttgttagatactgtctcctacgaatgggttatgattactacttggtatcttctaagtaaaagtccttaaccatcaccaagtaatatattttttttttgagatggagtctcacactctcgcccaggctggagtgcagtggtgccatctcagctcactccaagctccacctcctgggttcacgccatcctcctgcctcagcctcccgagtagctgggactacaggcacccgccaccatgcccagctaattttttgtattttagtagagacagggttttaccacgttagccaggatggtgtcgatctcctgaccttgtgatctgcccgccttggcctcccaaagtgctgggattacaggtgtgagcccccgcgcccggccagcaagtaatattttttaaaaaattttttggcagtgaaaagtctaatgagacataaagaaataataggaaaagtactactagatgggcctgaaaatgctttggttctctaacttgtgtgtaatggccaacatcattaagacaaggacatgtgacagactaattttgaaaatttattctcatgttactgcatttttgttattctagttatcaatctacacccataccacaatgctgctttattttgtttgtttgtttgtttgtttttgaggtggagtctgtcatccaggctggagtgcactatcttagctcatggcaacctctgcctctggggttcaagtgattctcctgcctcagcctcctgagtagccaggactacaggtgtgcgccaccatgcctgactaatttttgtattttgaatagagatggggtttcaccatgttggccaggctggtcttgaactcctgacctcaggtgatctacctatgtcagcctcccaaagtgctgagattacaggcgtgagccactgtgcctggcctgtgctgccttcctgacactcaaacacaacagggtatgagttgtatgatcagctatggaaaacagactgtggtatgtatgtatgactgatatgtggtaacaacccttctctaggcctgtatctgtctacacaagcagaaactgttggtcagttcaattaaaaaattaactgatttaatgagttggctgaattaccttcttgtttgacatgagtcaaccagcccactccagcaaaacagccaaccaactcagtcactctgtagaagcagcgtgtcattgaacaaccaaacacacagtacatcgtgcacagcataacgatgcttcataaatgatggactgcatatatgatggtggtcccaacatattataataatgtatttttactgcccattttctagtaacacaaatacttaccattataagtattgcagtgtagaatagtaacatgctgtacaggtttgtagcccaggagcgatagactattccatatagcctaggttcatggtaggtgctaccatctaggtttgtgtaggttcactctctgctgttcacacaaggatgaaatcacctaatgatgcatttctcagaacatgtccccatcattaagcgaagcatgacctgcatgcatgagtaattatgtgtgtgagaagccatgagaatacctctagaaacacaattcttctttctctgaaaaatgctttccctcaaagaacagtgcatgctcatggaaaatgtaaacgatttctttctataaatatcaaacccattttctctgtgattcatatttcaaataaaacacacacaagatcaacacttaaattgggtattatttctttttttaaaataaacctttgtcagaatattatttcttctttttttctttttattgccactcctcctctccagaatattattcctactgtgtgaaatccaaaggcaatgggaagggatacagttctgtctttctcccttcttacaagggagacaaaagaactcccttcgtcactcacctctgttagaaatgcattcctttaatacaaagagtatttctcccattttatgatgagaataattgggaaaaagaaattcaatactttatctttcacttctcagccacctttggggaacttatattttgtatatcaggatggctgtgctatgcataacttcttacagatcttgatatgctatctttcatcattatattcagatataaacccaatagttgtagagattactaacagtgagtaaaggaaaggctatctagaaatatggaagacataaagggattgtcttgggactgacctacagagtccttgcctcatggggacagattcaacagggcaatgctgacgtcttaggaagggagtgtgtaggcggtgtgtatgttgggtgggaatgggaaaggcagtatagtatcatagcctgcatattcttctcctttaatctagaataggaagaatatgaaagtagaggtaataagaaatatgccataagacacaccctcttcagacagtgcaaaagagctaggtgtggttttgctaaaaatctagctaatgtgattctgatttcaaaatcattaccttgcagcttgtgtagaatgttttcccctgtttaactggccaggacaaggaaactaaaatatttgtcaaaacttgtgccttacaatgttgtaaatgatgtttccatgtccctccttttgagatttaagctatctagtgggagtgggtgcctatactccaccctgccgagctgtaagcaattgtaagaggggccactgacaacttcacctctgagtcttctgggactgagacccagaataaatgctaggcctcagttcatctcccaaacagaatcactttctcttgtttttcccccaaatcggaaggagtgtctatctagattttatgtccagataattccaaggttctatcatttggtatctatggttttgtattttgtaaacttccaaaggacttcatttcccaaatcacaaatttctttacatttgaaatagagaaatcaaattatcattaatgtatttctttgcaggaaagaaactgggcaatattatattttaaaaaaataacttacagaaaaaaataggaagattgttctttactcttatatgaaagaggcatagtgaaagagcactgggcttggattcagaacacctggattcccatcctgtttctggcacctgagtagccttatataaaccacagcccacctagcctgagtttcctcttctataaaatgatgtagttgaacgaaatgtagctatcagatactttcagcattgattcagcaaatattaattaagcacctgctgtgagcctagtaccagggtgtgattcagcatgtaacaggatgggggtgtccccagtccaggtaatgaaagggtagaccattcacagtgtcaaagacagaaaactagataggacctattactcttagcatgctatgtttagggcactggcataaatatttcccactaaatattctacactatctagaaatttttaacaaagcaaaaattgttgtttacctagacctaatctttctgtagtttagggccaaacttcgactgttggagctccatcttcaattgctactactttctatgaatccatttctgggaatctctgaaggcatagactgactgtacacttagcactgtgacattaaggggacatttaaattgtgtgaagggacaagtcctctacttgtccctggggaactgagcagaggaattctcccaggagcctttgtacccagagaattcccatcactgaacagtccttagggacctctcctttacctctgccctaatttcggttgtacttttggtgagtaatatttaggccactcgaattcttttctcctttctttggccaactgcctgatggaagcagccagccaaaaaggacccaaggacattttagcctctataagccttttttttttttcctggctttgtaaagcaacctatgaaggaagaagttgcattaaatgacctcaagggagccacggagcatgccctctggaatatccctcaccttctccctttcttcttaaccctactatgccaaggaccttcattgtgcatctattttacaagctggagggcaaccaaaatctttcttaatttatgccataatcactgatatccagatgatgggtctgctgcacacctggaattcttttattttattttattttttgagatggaatcttgctctgtcgcccgggctggagtgcagtggcgctatctcagctcactgcaacctctgcctcccaggttcaagtgattctcctgcctcagcctcccaaatagctgggactacaggcacgtgccaccatgcccggctaatttttgtatttttagtagagacggagtttcaccgtgttagccaggatgatcctgatctcctgacctcgtgatccacccacctcggcctcccaaagtgctgagattacaggcatgagccaccgcgcctggccacacctggaattcttttttggctgatggcattgttgcctttaaggcggtgtctggaaaatgagaattacaaacataacctcattatgctattagaaaaatgaccatcatattcacaactgccttcttgacattccaagcaacccagaggaaaatatatcaagctgagaaggattctgttttcattacttgaatattgtctgccaggttagacatgtgagaacattgctttaattatacataagagatttctaaactggagaacaggaaacaggtagtggtcataaatgaaacaatacccagaaagagaaggcactggaaaatatttctcattaatctactttaaaatatttcttttctagttcatgaacattttgcatcacctgaaatattttccttcgtacttcatttagcatctttcatattttgcctttatttatttatttatttggatttcagtttaagtatttttaacaggatgtctgctatgtggtgtttttaatagggtgtctgttaagttttagttctttgcccaaagttacctggttagtgagaataccaagatgggtgcccaggtctctgagctccaaagctatgcatttccttatagtgtttagcagccctggcatctgctataatggagcctaaaatatatgcattctctccatttctgtgttgtcttggtttatctttgtaataaaacagaccattagaaagttgtgctctaggaccaaatcgtcttggctcttcttaacattgccatcagcgtacactgagggcattcaaaagaacactctctgtgaggctaaatattgtatctactgtggggatattgttagagccctgtttacataatctggaattctctgtcttggaaaaacccacaaattttgctcaggagtccagtagtaggagaagatgttttgcaaaaaagtgctttgattgttatctcatgtacaaaaagaaatcatgtcagtaatgggctctggctacaaggaaccaaattgtggctcatttccaacaactgaaacaacccttatggagcttattttggggctgatcctgatccttggctttgacttattttcctgcctttatttccctttatcctcatgtcttcatttatcccattcatcttatatgtgagtttattcatctcacatgtaaactgcttccaaatcttttcttaaggatgtgacattatccatatctatatatgcatacatacagatatttactgttgaattattgattccacagagtgtaatactttgtatgcttcctgatgcactaagtattttgcagggctatgtcttgttggtccaattcatttataagttccttgaggataacaactaggtgttatattcattcaagtcttgagagtccccagcactaatatatgttgttcgctttattgttgattggagtatatccacaatctgagaagataaatgattcctaggttaaacatgcccttgtacaaatcatcctttttcataccagtgtcaaaaaatcaggggctaggtaggctatgaagtttgtcaatacacgaattgctatgttctttactttgcaacttcatgaaagagtcaccctactgcactagctgaatcatcatgttgagcacaactcttaagggaagtatgggaaagctaacccaggagtggcagagacctccttttcctcctctatcttaacatgtgtacatgctttgactttgaagcaatggaatgtgattgattccctaagccactttcaaaaatagtcccattacctgttagtgctcaccttaatcagatcatataaattatatgtggctatatatggaaacttaagaaacagaaaagtctaccaggactgcggtgacaaaattcctgagtccccagatatgatgaacttatcattagtttgtaattaattgatatttcaacaagaagctttttgaaacgtggttaagaggaagaataaaagctggccaaactttgtcctttggtttgataaattctgagaatgtagctataattctatgcaaaagaagcagactaagttacattatataccctggtgattatatgtttcttcacagtgctgtttaacatttacatacaatactgtaaacctcaaagatgtcactcacttatgtaattacctcacagttatataaatgaaaaacctgacatttaataagtgacactagcatatctttatataaagtagtgttacatttaacatccctggggactaggtatatcgtgtataccatgcggatggatgttctggatgaatgaaacttaactttggaaacattgcactttgaaagaatttttaaaatttttgataaagactctctaatacaaatcgcaccattccatgactttttaaacagaggatttgataagcctgttcccaatgacttgtcatggttgtgaatgctcactgttggaccctaggttacagagtggtttctttagcggttcctgaagtctaggcctctgacttcctgtactgagtgactctggattgagctgttcaagaagcagaggaccagcctgttttgctttctgtctaccccttctgctgacagctatcatgttcatttcccaactgctgtgctactcgttcactttacacctaaacatgtgaacgttgggcaggaccgaggaggccctgcttccatggagattaaggatgtcagcagaatgacagccactaaactccacccctacctctgctttacttccaattttacttccctttactcccattcccaatttatgaagttcccaaaatctggccccaagacaatgaaagcttattttgtacaatttaattttcagtctatatgcactcaagttttgaaccgcttactctaagaattttgcacaatccaaatccattaatgcaggttaacatattacaaaaggttacatgaatataggaatgatagtatgggatggagttgatcagggaagacttcctgaaggaggcgccttttagaatggtttctcaatgcattgatggatattttaggtaaggtataatgctatatgccttgttgctaggaccatgaactcttcagatattggctctgctgcttatttgctgtgtgacatttggaaagttacttaacttttctacctcagtttcctcattggtaaaatgaggattataataagttctgcttcattgagttgttgtgaagattaaatgagttcatgcatgtaaaactctttttttttttttttttttgagttggagtctcactctgtcacccaggctggagtgcaatggagtggtctcggctcactgcaacctctgcttcccaggttcaagcaattctcctgcctcagcctcccaagtagctgggattacaggcacatgccaccacgctgggctaattttttgtatttttggtagagaggggatttcaccatgttggccaggccggtctcaaactcctgacctgatccacccgccttggcctcccaaagtgctgtaattacggatgtgagccaccgtgcctggcctgcatgtaaagcttttaggacagtgcctgagagtacaatgtaagggtttcccaatagtggtagtagaagtaacaagtcataagaaagatgcctacagcaaagaggcaatgcttaccaaagaactaggatgtaataagagctgaagttgacatgggaaaggacatttaaagaaaaacttctccatctttttcattatatggctcatatttaaaaaataatatttacatgtcacagcagtatcaacaaagcgggttgctcgcagtctgaggcaactgccctcagtttctggctgctgcaggccaacctaggctagaggagaaggaggcatacggataatctattcccagcatatactgattagggagatctggtttagtgaagattttcgaagagaagtctagggaatttggaagaggtgattgtccaaaggaacagtgtgaccaaaacagatagttgtagtaactgtatatgataaaacagaacaagagggagaagtatggagatggtgtaggtccagattctgggggactattgggcgtgacgtacatgggagatgaaatgaatgaaaactggggtttggtgggaatagaaaagagagagtccagatctggcaaaaggaggttagggggaggtcctttgtgctgcattggagaaacatggaaaggggccagcatagctcagttatccaaggaagtgttgatagataggactttgtattatggaacagcagcagcacaattagaaagcacattggaatcacccccagttatctctgggcagggaagaacttctggttataaatctattgagtattgcaacaattgactagggcgttttactggctcttagttctcttgtacagtagtgtttttagtgcttgtttaatcattgttaatgtgaaatcattttttcttggactttgtagcagtttattatagaggttgcagataatcatcagtgttctttatgaaaacagtaaaggattaatgcagttgtgtgtctgtcctgcccagagcaggttctcattaagatatggtaagttgattttgatttgtttgggttttaatttttctctcccctcttcagaacaaacttctataaatgtcatcattgttacaaaaagagatggaaattcatctttagggatttttttttctttttgccagaaagaaaaaaagaaggaataatagctggacttaatttgtaatgattctgaagcatcttcaaaatcattttctttccttttctatttattttttttgagacagagtctcactccgtcacccaggctggagcgcagtggcgtgatctcggctcactgcaacctccgccttccgggttcaagcaattctcctgtctcagcctcccgagtagctggaattacaggcacgtgccactatgtctggctaatttttgtatttttagtagagatggaatttcaccatgttggccaggctggtctcgaattcctgacctcaagtagtctgcctgcctcggcctcccaaaatgctggcattacaggcgtgaaccaccatgcctggcctttttttacttttttgagacagggttttgctctgttgcgcagactgagtgcagtggcatggtcatggcttactgcaatctttacctgctgggctcaagtgatcctccagcctcagcctcctgagtagcttgaaccatatgcgtgtgccaccatgcctggctttttattttatttttttgtagagataggatcttactatgttgcccaggttggtcttgaattcctggatgcaagtgatcctcctatctcagcctcccaaattgttgggattacaggcatgtgggccaccttgcccagcctcatttttttccctacattatactttgttccaagagcattctaacaggaaacactgagagagaaaaaaaaagtgattctacaagttaaaacctgcttcagcacatccttctctgaccccctaggaagcctccccaagaaatggaatggtataaactactcccgttttccttgtgcatatggcattataataatggattcacacttctgtctcctctcattggagtgtgagtttcatgaaggcagggattgtattttaataatctgttttccctcaagtttctaacacaagacctgacacaccaaaattaacgatcagaaataagaaattagttcatatctacttaaaactaccagtccatattgtagaatgttttctttaaaaatctctttcttaaagtttaatcactggccaggctccgggggtcatacccatagtcccagcactttggaacaccaaggcaggaggataccttgagtctaggagttcaaaaccaggctgggcaacatagtgagaactcgtctctacaaaaaagaaaaaaaattagccggcatggtggtgagttctggtggtcctagctactcaagaggctgagatgggagaattgcttgagcccaggaggtcaaggatctatgacgtcaattttaaaaagcctctgcaataaggaaagtaaaataacagctcacttgctggactattaaaagggaaatgggagggggccgcaaaaaggttttgataggctaaatgtgggcttgacaaagatctacacatttttcttctaattgttggccagattcactcctctgtttttttttttttttttgagacagagtcttgctgtgtggcccaggctggagggcagtggtgccatctcggctcattgcaacctctgcctcctgggttccagtgattctcctgcctcagcctcctaaatagctgggattacaggcacccgccaccatgcccacctaattttttgtatttttagtagagacggggtttcactatgttggccaggctggtctcgaactcctgaccttgtgatctgcctgccttggcctcccaaagtgctgggattacaggcgtgagccaccatgcccggcctagattcactcttcttatgaaaaagtacaagtttctaatgattaactttctgggttatgggaagttgtgcttcataacaatatgggacttgtattcctttacactctcatctataatatcaatataaatagtttctctgataagtaactaggtttctgagataagcccttccttttattgtagctgataacacacgattatatgaggtggtattgctaaccactagtgagaggttttgctatataatgtggaacttaaacttctttggtcttcttcccagaactgcctagatgccactctaaattgtttattgacagcattaatacctggagaatttgcttaaaagaagtagattatttttctccccttcctttttctacccacacccccataactctgtttttcttaaaaaataaaaaatcttcaaaattgtcaacattgctcaattgttgagaacaagggaacaagccaggcatcacatttaccctattttttttattcatagagctgcgtaaaaactatgttatccaaagcaccatgaagctgcacactcaccaatttcaagataatataaaataccacataatcaattatggaaaataatgaaatggaatgttggcatagaaaacctcctcggagagtattaaaacaaggaatcaattgctcgagtggcgggggcggcgttgggtgttaaaattaacaatcagtcaagtctttaccaagggccagctgtgggtgcagacctgcagggcacgtgtgagaagggtcagatgcaagttgctgaggtagtcactgccctgtaaagattgtcattaattctacaaacaatgaaagagttgtttgcttatgttgtgggctagatgcacaagatacacagaaaactgcagaagtgaaagtaattcagtcatttgttccttcatttagcaagcatttattaagtggcttttttttttttttgccaggcaccagggaagacacttgggagctgtagcttcagaatccgtccctgccctcagggaaggcagaacaataagcaaacaatcataatactttgcgaaagcagggagattataggagatgccgtgttagacacaaaggaagacaggataatgtgaacagcacagaatacaaaacaaaaatgaagtactaattacagaaaacagataggctcaatttcacctattcctgcaatttttagagaagcagaggaacagaggatatgcagattttgaagtgtgtcctcagcatcctaaaagaaaagaaatctaggaaaagtcagactgttttttgcttgttttgagacagagtcttgttctgtcacccaggctgaagtgcagtgacacgatctcggctcactgcaacctctgccctctgggttcaagcaattctcctgtctcagcctcccgagtagctgggattacaggcgcctgccaccagacctggctagttttttaagagacggggtttcaccatgttggccagactggtcttgaattcctggcctcaagggatccgccagcctcggcctcccaaagtgctgggattacaggcataagacatggcacccggcctcagattgttgtcttacaattttagtatggcttaattgtggcaaggtcttgttaccgtaactatttctgtcaagttatatatgaaggacaggaaccatcaaatgcaaatgaagaggaagaccccttgatgagatggctctagaagacatacgtgtgtgtgtgtgtgtgtgtgtgtgtgtgtgtcagggtcttgctctgtcacccagcctggaatgcagtggcacagtcatgtcttacttcagcctcaacctcctgggttcaagcagtcctcccacctcagcctccggagtagcaggtgtgtgccaccacacttagctaatttttacatttttttgtaatctccctatgttgcccagtctggtcttgaactcctgcactcaagtgatcctcccacctcggcctcccaaagtgttgggattatggctgtgagccaccacacctggctgacatacttctcttaattttcacccaccttttctccttctgttcatggccagaagatagtctcagttcttccatttttccacctgcaaaatgggaataataaattttcttgtataaataggttcttaagctggaatcctttttaggtgtccataaatagactttggggattctacagtcccccacccacttagaaatttgatgcaacattaacatgtatggtaattgtttctggggagccaatttcaaagtaaagtattttgggcttccctgaaataagtgctaaataaacaactaatacttcacatcacagaacaacataacaaaaccaaattaccatcatagactaataaatctgaaataagatgctgatagtgtatgagaatataataaaacccagagagagcaaagtacacctggctttgaaatcactccttagcacctgagaggatcagttcctggaatctgctgtgtatgcaatgacatgcatattgctaggacattaggccacagctccttgggtcagctgttggcagggaacatttgggcagatctgcataagctgctgcccaccacctggattgtaaaaccacatgccattctggagactttccttcaaagaaaaatgtgaactctcactgtccactaaaccactaaatactgtttgggtgaacattctcccgcaccagaatcattttcaaaaaggcagtgactgcgtttatcttgtccacccttatatgctagggcctggcacttataaccaccaaagaattggctctcaacaatagctatttacttaatgaatgtaactgttttggtcagaacatactggtttgaaacatttctgatggagatgtgctgggggatgccttttcctgatcacagagcttgattatagcttcaatttctgtaagtaatttctttttctcttctaaacagcacttacatgatcctccagttgggagccttctgttagttgttatttctgcatttgtgtgttgctttacacttcacaaagggctttcccatccattatctcattgcatcttcacaagacttgccccatatatttttagccgagaaaatataaggctggagaattaagtagcttggccaagctctcatagctagaaagtgtggaactgtgcctcaaatccttgtttttgctctgtgtttggtggtttcttgagctcactgtgtcctgaaattgtggaaataaagttagccagaaactcttatcactactaatatatcagtgacagctattcggagtcttatggaatggccacataaaaatgaatttgataaagtgaattaaatgtatttgttttataaaattatagagcctcttgatataatttggagacagcctagattgtgagagggagaatgagaattcttattttgagatggaatcttgctctgtcacccaggctggagtgcagtggcatgatctctgctcactgcaatctctgcctcccggattcaagtgattctcctgcctcagcctcccaagtagctgggattacaggtgtgcacaacgatgcccagctaatttttgtatttttagtagagacagggtttcaccatgttggccaggatggtctcaaactcctgacctcaagtcatctgcccgcctcagcctcccaaagtgctaggattacaggcatgagccattgtgcctagccaataagtctttagacatacccctgaacctctctgacacccctgttttctcatctgaaaaaatggataccagttctgctaacttcaaaggcatgttttgcacgtcaaatctaaaatacacaaaactcttaaaaatattacacaacatataaatggcagttgctttttcaataatgtatagtgtatgtctaaatatggccattgcatttgggtacaccaaggtttttgtccggtaaacatcacaaaacaaaaagtaaactgatacaaatagctatagaaatggataaatatgctgtccatatttaaatacgaggactggacatgagacagatgtgcatttgtcattgaagaatgcagttccctggcggggaaggtggaacgtgcataagatccccgttataatgtagcacttttcattgtaatcctcatagcaaccttgtcaggaagatacttactgttcttgggcccgtttttcagatcagaaaactgaagtttagagagtttgtggcaaaattgtccaaattataaaagaaattccagttagcaccgacatcatgcttggtgagtgttctcttcagtccagcacaatcggactttcagttaacactggttacaaaacgggctgtgtgtctttgtctccaaaagtcctatgggctgtaatgctaattttcttttatatgaattcttttggcttggcagtttgctaatatctgtgtactatttcagcttcactttaatgtactgtattcacttttagatacataagcataggcaatctggggtcattctaatggagcctactcaggacaacctgaggcacctggacctaactctaatagctctattaatgttaggtagaccagtttaatggagtgcattctcctagcagttcattgattataaatacttagcttaagtacctacgtgtgtcctaaaaaaactatttgtccgaatgaaaatcctgattttcaggagcagtgatatgaattctgggcacctgtgcttcagtgaccatgggtggagactttcttgtttatatgtagtcctcttatgttgaaaattacacaaaaacaaaaaagtagtgaataacagtgtcattttttgttttttttgtttgtttgtttctatttcttttgcaggttgatgaccaaatgaagctgcttcagaactgctggagtgagctcttaatcctcgaccacatttaccgacaagtggtacatggaaaggaaggatccatcttcctggttactgggcaacaagtgagtgtagagaccaaaaaaaaaaaaaaagcatctttttattaagcatgttcagaatggccggaatttaactaggtcagaagcactcttgtgctttgaaagggagagattggctgccaataatttagaaaagatgacttggtgcactctgttcctgctctgatgattatagttaaacttgtaaaagcaaacataatcatgaacattctgctgcttccagtctgctgggactgaaagtcctgcttacaagggtccgaagaactggtaaatgaaacgtaatgattagtacccaggttttctttttcctcgagcttctgctttaacccaagacacttgtttgtcagctgttttaaaaccttataacttgtggagtccttactattttggaaaaatattggtgaacgagatggatttggatgtcatgaataattgaaatagttggtataaaggcaaatgagaagggaggggaatttcagttttcaagatccagtcattcaaatgaaagatagagagaataaaattactgttaggtcctacacctttctgaacagatgtttgttcgatcaacaaatatttattgagcatcctactctgtgctagttactttttgggggctttggtgtatattagtgaacaaaataaaaaggttcctgcccctgcggaacttaatgttgtagcagggagaagctgacattaaacaataatcctaggaaacaagcctgtaatatgttaaaggtcaaagtgctactgaataaaagaaaaaaaaaaaaaggaaagaaccaatgaaaagaaaatcaacactcatccacagacatgtgttgcagtgtgacccataagttgcactgtgaaataggaatggttggtttggctttattggaaatgtaacatttgagcaaagtcttaaaggaggagagacagctttgtgaatgtctttggagagagtctacttaatagacctaactgcaactttacaggaatttaggcaagtctctccagtttcttaaccctccgttctacaactgatgtgctatttaaataaatgtgtgggacacagtgattccttcaatcctttgggtcatacctattcagggtcccactgcattgttcagcaatggtgacttcagtactcggcaccatgatcttttatgttcagccataaatgtttatgtgctgtgaaaccacagcaatgctatttggaaatgaagggctgtctccacatcatttgctgtattattaataaatcaaaatttcccaatcaaactaaaagcaagcactatttcagagtttttgcaaattgggtcaattcaagcatctccatcactatctggtccttgctatctgcacctctcaggagaaaagcgttgcagaggagaaaataaagtctcaatgggtttgacttcctgtgctttcaaattttttttggcattttcattctgggacccaagtctttggagaaaatgtacccattttcagagtctaatcattgggtgtgcctcccaccttcaccgaactaggagctgcattggaagtacaagactgggcccactaattaatttgatttcatttccttctgagtttcagaaatgaaatgggtttgtgccattctttttctcaaagcacttccattcctgctctttagaaatatttcttatttcacatttcattttgccttaagtgctgcccgtgggtgagggtaattactatttaaaaaatagagaaaagtgcatttcttgctgtctgattttcaaaaccaagaacaatcaaggaatggatggtattatagttttttggatcaattactggtgctttgtgttttgtcatcagaactgaatgaggaactccatggtggagaaatagttatttccttatatgtttcctgcagcctggattcttccagctcccctccccaccctttaaatatgtttcctgcagcctggattcttccagctcccctccccaccctttaaagtgtgccacaggtctgtcagaacccctcccttcacttttttcatccggtccagtggctaccctagtaatgattaattgtaatcagacattctcatttatggcaattatggtagacatgtttattttcttttgcggaatatctagacaaaacgttttgaatttatctctgtgcttcttgcgtttcataggatggaagcaaaagtgctgcaaaggaagacttcaaaagcctgtaacctctctatcagaatgagacagatatcttaaagcacggtcatatacatgtacttcttttatatcctcacagtacctagcacaaagctgaatatgttgggcacatgatacatattacctgattgaactaaatgagaactattgtatctctcctggttgcttgattaaaacaaattaagtataatttttttgagaattataaatacttccctgagtgtaaaaatgggaaaattagatttttgctacaacaacattactttgtgtacacaaattttaagaaggtagttaaaacaatgatgagtggaaagaaaggaatatattaagtataagagtaaagcaatatgctagaggaaaagaggatttataaaaaagaaaagaggccgggcacagtggctcacgcctgtaatcccagcgctttgggaggctgaggcgggtgggtcacttgaggtcaggggttcgagaccagcctggcgaacatggtgaagccccatctccactaaaaatacaaaaaaattagcctggcatggtggcatgcatctgtggtcccagctacttgagaggctgaggcaggagaatcgcttgaacccgggaggcagaggctacagtgagccaagatcgtgccactgcactccagccttggcaacagagcaagacgccatctcaaaaaaactaaaaaatagaaaagaggtggaagctagaagatatatatatatatacacacacatacacacaaatatatctacatatatacatatatatacacatatatatacacacacatatatgatatgaaagtagttgaaggaggcagaaaaaaaagaaaaaaagaactgcttcctgttatgtttataatccaataacaattgagctgtggttagagtatattttctttactagtgcagaccatgtgctctctggtgtgtgtgtgtaaaattcacacatacaggtgtaatttagaattggaacaacctgttttcgtgtctccattccaaaacttcctggctatgtcatatttagcaagtcgctttaccttttgaggttcagtgtcctcacctgtccagtggcaactatgatgttatctaccagagagaattgcagtaggaattacaggaagtattctgtgaaatgctgacacaaaaattagaagtcatcaaaactaggccagcgcaagggtgacatttatggagtcaacaaccccacgaagaaaggactattatccctctttggcagatgaggaaccaaggcaaagaaagatgaagtggttgattcaaggtcaagacccatctagtaagtggcagaacagatggtcagatcgaggccaactagtgctagagtttgtgttctttaccaacatgccataccgtttatctgattaactcacagatgctgcagagcttgccttcacgccggcatttaatatggtcttcatgtgtaattccagtgcatgacagactctatggaaattccaagcaaaacaaattcatttccttttttattgagactaaatggatatgcttttttttgtggtttagttagttagttagtagtttgtttttgggggaattttctatatggcattgtaagcacattgttacagtagatttaagttattcacaagcaattttaatgtgattgttgcttagtgttatgaaattattttaatattaagaaaaaactaaaactatgaaaaaatcactcataatgccaccacttgaatcaactttttgttgaattctcttccaatctttgggggaaaacatgtatcttaaaagaggatttttctcatttttctaaataaaataactcgcctgccccagagacatattgacctgctatcatggatttgtgtggaatgtgaactttcaaacactgctagaagtgtgtttccatgaagcactgtattgaggccatgttgttgatatcatgggaaaaagtaaatggtattaccccaatacagcatgcaaaattcccctaaaggcagcttggtactcacttgtaggagataaatacattttttaatttagttaaaacaaatgcttctgatggcctgataaatgaagggaaatcaaagatgtaaggggaaaaacattagacacaggtctgcagccaatagtgataagaggcataattcatccacctaattaatgactgccctttgcatagtgcttttcactgtgtactttcacaggtaagccccattacacagggtcagagaaagtgcggggaaatttcagaggaggaagtgcaaagagaataagatgggtgttctaagctgtccagatgattcagcttctataaggaagtgccttacccctaaagtgaggatatttgattgtactctcctttgtaagttgaggaagacaccattgcttaaaatccttctaggtcagaggaacagtgacaggcaattactagatgaaactttaactaaactcgccacctttttcagcctcagccagaagaaatacaattcactcattatagatttccaggtttacttacagtattttctcaactgccctgttgagaaaatgattacttctgaaacaaatgaaaatgtttatactgagtattttgagattggcaaataggaatattaaatatgcctcagtccacaatatcaggaatgaagtcccaacacaaagggaacaccagacagtgattttgtttcaccttgaaagcatgtatgtcatgtctacacattgctttatagtgaccctttggacagacaaaggaatgcaagaccccaggtgttccgtagcccaatcttctggctttttcttactaaacacagctcactgtaaataatgtggtgaatttgtcatagcagagaaaaaagaaaaagactagcctggattttaaaaaatgagtgactatccaggaaattgctccttggagcttgaaaagagaagaaaaataaaatagcacagcctttctcttaagcccagtggctcacaagtttgcttaataaatgtttgcagaattgaactatgtctgttcatagttcattcagaactagagaaaccaaaatagccccactgcaaagagcagcccaggacaccagtacatagtatattgaaatgaggattcagtgtttcacttaaccctgtaagttagctattatgttttaattgcgtctttgaatcaggcatctacataaatgtatattaaatagccttgttaagcaaaaaggaaattatgattatcagtaatattaagcacttcaaatgttctatatagtcgcaacttagttatgaaaagaattatttcctatccaatattttaaaaactacacacgcacatatgcacacatatatctatgtatgtataaaataataatgtactttgaagtggggtcaggttttagtatttgcatattgttgctaattaacagccactgtaacatcatcctaagggaaaggtctactgacaacttattatcttctattattgtgtatcatattaaaatgacaggcatcttataatatacaagtcatcaaaatttcagtgattagaattaaaagcaatttaggtaaaactgttttctactttttcatgatgagtgaaatttatctaaaggggacatcagtttagagtattgcttcaatatctcccttgaatttaatgacacaaagattacatgtaagagagcaaaaaattaattttactaagtacataaaagacaaggccaactgctcctgaaatgagcacaaactctgcattcaacaatgaaaatataattatgtttgtaataaaatgtaaggaagttggagatctgaatgttgtttcaagaataaatcacctatccttctttagagctgtgcaatttgataaatatccttgaaagaaatgttttctaagcccccatttaataagcatgtttgagctttcaaattagcatgtaaataaatgtatagttataaatttgttggtaaaccaattgattttttgaggtccatctcactaaaggtctctcactaaatatataatcctatgaaacagattcctttccgttatagtgtactacattttcacatatgaaattcttgtatttgaacttattattatacacctgttagaactatacacaacaatatttaattaactccatcttaataatggaaaattaataccaacatatttgtgtttcattttagtatggtcttcctgattcaggccttaactagtgattttcttttcttttcttttttttttgagagaagtcttgctcttgtcccccaggctggagtgcaatggcgcaatctcggctcactgcaacctccgcctcctgggttcaaacgattctccagcctcagcctcccaagtagctgggattacaggcacttgccaccacgcctggctaatttttgtacttttagtagagatggggtttcaccatgttggccaggctggtctcgaactcccgacctcaggtgatccacccgtctcggcctcccaaagtgctgggattagaggcatgagccgccgcacctcgcctttttcttttttttttttttttttgagacagtctcactctgttgcccaggttggagtgcagtggtgcaatctcagttcaccgcaacatctgcctcctgggttcaagcgattctcctgcctcagcctcctgagtagctgggattacaggcatgtaccaccacgcccagctaatttctgtatttttagcacagatggggtttcaccatgttggccaggctggtcttgaagtcccgacctcaggtgatccacccacctcggcctcccaaagcactgggattacaggagtgagccaccgcacctggatcttaactagtggtatttactacaatatactttgtatatattaagctacagctacagcgcattccgttgattccaagcttaaattgttaatcttgtcccatctatgattcttgataatcatagaagtgagaggtaccttattatcatcacctaacttaactgccttacttaaagataaggacaccaagggatggagatttatacgtacttgtccaaggctcttcgtttgtaagaggcagcattggctcgggtctcttacctagtctctggcttttgccaccactgttgtaccatcaggccttcctgctctcattcactcatctatcccattagtctcagtaaaatttgtattattattatctgaagtagttgactatgtgcagtttttaaagaatttatagcataggcacctttttaaagtaaggactttccttgaagtagaaagttcccctgtaagagaactggcaaaatgatagttgagacgtcactttgtgtgctctgcaaataatcccaatgtgccccacagagttcaacagtgtgtcctgcctccttccagctcagggttcaggttgcccaggtactgacccttctttcacatattctgaaacagaaaccacaggagttcttacaacacttgatgtttaaatttagtgcgtagatgccagcacctggctaaagcaggtagacagtgctgtacatgatgcaagagctttcctctaacacacattaactgtggctttttcatgcatagttgactctatataaactgattgacacctttgggggtcatctttccactgactcataatttttctcactcttgaaaaaggtttctgtacacccagtattctctagttaaagctgaaaattcaactcatcatatttacacaataaaaaaaatccattctgccttgtttttaattgcaaattctactcaagggactagttctcctgcttaggaggcagccctgtgccttctcctagagaagcaagtgcagtcaattatggtaatgaaatgtcaataaatataaaaatttaatacagtctgctctgggtgagtggcagatgaggacttgcctcccagacaaatttgctgctgctgcaaatattaaatgaacctaaaagagtatctggttgcctgagagctctccagtaaaaaaaggatgggagcgtcaggtaccaactgggctttcccattatgctgtaatcgcagcagcaaagccagtgctatcactgacagccatcccaacatcttaacttgttataaattgaacttcttatgtccccatgaataatctaagattggtgcctagcaacacttttttttttgagacggagtctggcttcttcccccaggctggagtgcaatggcacgatcttggctcactgcaacctccgcctcccaggttcaagcaattctcctgcctcagcctccccagtagctgggattacaggcacatgccaccacgcccagccaatttttgtatttttagtagagatggggtttggccttgaactcctggcctcaagcgatccgcccacctcggcctcccaaagtgctgggattacaggcatgagccaccgtgcccggccagcacttttttttttttaatgaaaagggaaataagccttttctttttttgcttccagacaacggaattattctcctaaataaagttattgctgtctttagagagaaacacattaatctgatgtaatctaatgtaatcatctgagaatagcagttttatgtcatgctttttaggaaacagaaaactaaagaataatttatttgtatttattttaaatttttaaattaacacttctgctgttctataaagaataatttaaatgtgattctttcatcatccacaaacatccaatcttgaactatgattactttaaaatgtagtctcataatacaagtagaaatatatctgcctttattttcctcatgcactagttaatattgtatatacatagaacactctcctggattcacttttcatggacagtatgtttttctttcaccttattcatgagagttaaaattttttatcttatgtgatgatgtaatttcataatataaaaaaggcatatatacttgaaaaatttaggtagccaaaacctctttcctacaaagcttatcaaaagtgattatatttatcagacatagtaattctgatgcattttagaatcatggaatgtgcctcaaactacttgcatggggaaaatcccttctgttatcaatctgtattgtggccaggcatggtggcttgggcctgcaatcccagcactttgggaggccaaggccagaggatcacttcagctcaggagttcaagaccagtctggtcaaatagtgagaccccacatctctattctattttaaaaacctgtattgcaatctgattttacccatagttcttacgactcaggtgaaatacatattgctgattctgatagtccttaaaactgtgattctgtattgcaggtggactattccataatagcatcacaagccggagccaccctcaacaacctcatgagtcatgcacaggagttagtggcaaaacttcgttctctccagtttgatcaacgagagttcgtatgtctgaaattcttggtgctctttagtttaggtaagaaatccttttctcatgctgtgctcaaccaacgattgctaaatgatgttgaagttcaaatatcttgtggtccatgtatgtttttgttctatcaatataatgcccttcctgtcaaattatgaaatcttcaaacgtgaatatattttcatatatatttctgcatgatgcatagcccttcagtggatacgttggggaatggaaaatgagttattcaattgactcattcaaatgagtcctggtttttcttccataatatacagataagcaataaccaaataaagctatgacaaaggtttaaaacagacagcttaggaaagatgtatggtatcaaattttagccatctttctcccattggtaatttctatgtgcctttcgtttcaacttgctatttacttctgtttttattcttctaaaatatgaatcgtaattaaaaacctgtatttaaatctctatcgggattaactagagaatgtttataaccagatgcaccactatgcaagtacaaaagatgacagttgtcaaggggaaaggatgattctttaggaaagctttggaaaagaaagataactaagcaagacagattagctaaatcaaggttctcagtgagtcagttgagaaaaatcaccacagcttggaataaaaaaaggattaaggagatggatttttattgacttcaaaggaacagattttcctgtctgtcccttacttgatttctgtattttgttggcttaataaagccaacttaaataaactttttgccaagtccatttattacttattggcagacagctgagggaggcaacttcccttgaatgaaaaaaatgcagaaatcagattcaccaacatatgttttttctttagtcttcagttataagatagttgtgaattcatattctaaggaataaaacaataaaacaaactgcaaagtaaaacagatgtgtctactctccaaatttggtactttatttttaaaattcttcttgacaggactgcacaactgttgctaataaaggggtagtttgaagtaatagaaccagagttaatttttcatgtatagtcaacatttaaaataaaaagagcattttcatattttggaaaatgtgataaatacagcaaaaagaaatgttactgaaaatttaaatggacaacagaatttcatggatgtaacgttcaaaggtttacaatgccaagactggatcctgtgtggtttctgtattaaccacaataaaaaggaaagttctgttcaagtaagtctgcatcttttacccgagaacagtgtttagaatgttaaaaaggaagatagcaagcatacgcctgcttgctgtaatcgcacaaattattctggtttatgttaagatcttagtcttttaaactagtgcatttgatcactaattaaatggaaaatgtggtaatatatgtataagaaactgtatagcatcttagtgataaaatatttacagcgtcatctcatttcaatggtattttaaattagttgaagaaatgtattacatttgaagatgtacatattaaccatgagccatctttagttttcagcacttttaactttccttcatcatcttccaaaattattatattctctgctaatactataaggagggggttgggctagatctgagatgctttcaacttttgaacctcaaaaattatcttcctgaacaactgggccatgtatttaccagaactttagtcatacactctgatgtttaatgagcacttcgattgtttcaggagcccagtacaccagtgaatagctggtctaaatgtccattaaatccatgtctatttgttgcttaaggaagaaaggaaagcatggctttcagatcagaggcaaatagaattctggccgagagtctatttttttagagaagcaggagaaaagtaaccagtagtaaaattcaagtagtttctaatttgtgagtggaaaaactttttactctgtagaaacagtggctaatcaattttttgaatttcacctttattgaggtatatagataattaactttaggtgcctcagctagccccaaatgctggttttacctgtgattaagggtgaaatcataccagagtcactcttgaaagttaaggccaagtcctaagctggtacctgctgtcccagatgctcctcctgagcctcgagtcccctgagtctgaagcctgctatatttttgtctcagcccagccttgagactctttggtcctggagaaaaatgaagattctgtggactagtcagaggccagggtctgttctgagagatgactgcagcagtattctcctgtgagagatgaaacagtgttttccagatagatttggtgagagaaggtgggatgtggtcccaagcaggtgcagcgttccaagctagaagcactaccagtgtgaaagcttaaaggcaagagagagcaaaatgagtttggggaactgttagttgatggatacggcttgagggaagcagcagatgtggctggagacatagacaggagcctggacatggacatgaaagccacagatgcattcaacacatactcattgagtgcttactatgtgtccagcactgaagaaggcactggggctatagtggcaagaagaagtaagtgccatggctttcattctctagacaattaggaagtatagcagtgttcttaaggcgacggggatgcggtgaataacttaagtcgatttgcctttctggtagcagcatggaaagtggactggaccaagaacagtgctagaaaccctgttttcagaagttttatttttattttacttatttaatttttttttttttttgcttttattcctggcatgctgtgatttatttttagaggtggttttttttttttgaaatggagtttcactcttggtgcccaggcgggagtgcaatggcatgatctcagctcaccacaacctccgcctcctgggttcaagtgattctcctgcctcagcctcctgagtagctgggattacaggtgcctgccaccacacctggctaatttttttgtatttttagtagagacggggtttctccatgttagccaggctggtctcgaactcctgacctcaggtgatccacctgccttggcctctcaaagtgctgggattacaggtgtgagccaccacgcctggcctagaggtggttttaatactccctgtggttggactgagatgaaggatacaaaccagttataggtttcaagccacaagatgtggcagagttgagagggaaaagtctagggtgtgtttggggtttctggatgtctagctggaatagaaacatctacaggaacagtaactgatcagttgattcaaagcgggtcccaatagcagtcatcactttctaatctaaaagtcattcttcactaaagtttgttactgctgacacaaaaagctcatgacaggactcaaaagaaaagtacagtggactcaagtccttctagtttgctctctgacgtttcccccctcagattgtatccatgagcagacatcagttgggtaagctggtcaagaaaggaaataagtaaaaaatgccctctcagcacatttctctgtgtataacatcatagattctgtaggcccaatctctgttagttgttagttttaatgttttctttacatttctagcacaatgcttggtacatagtagggacttacaaaatgtttactgataaaaataaataaatgggccaggtatggtggctcacacctgtaatctcaccactttggaggccaaggtgagagaactgattgagccccacgggtttgagaccagcctgggcaacatagtgagaccccatctctacaaaataattagccaggtgtggtggcagacacctgtggtttcagctacttgggaggatgaggtgggaggatcagccaagatcgtactacttcactccagcctgggcaacggattaagatcctgtcttagaaaattaaaaaataaaaataaacaaatagtttgaaacttaaagcgaagcctttaccgaagcaactcgtgataggtaataggaggtggtttagctaaaagccgtattcaaatacaggttatttttcagagaccactttttccaaagaactctctaataaataactcctcaaaattaaattatttctgttatcagtttgcattctcccagtttatgagaggagatgtttattcataagctctttgggaaagctaacgtgaagaaaaattagaaagaatattactgactaaaaccaggtggcaaatgcatttctgttctaagcaaatgcaagatgataggctttcagcccatgttaagtaatagtagttaagacaatgttgtacaattctttcttggcattgatacaatcctgtttccagcaaaatgaatggagaaaatgttatatttgttcatcatgatagctctttgcttcatactaaacttccaaattttgaatgtgacatttgattatacacatcccaggtaagttttgtcctcatggagacaaacaccccagggaagatgggttatggttgcctcagggaatgactcaactggcccagacagaaaagctactgcatgctaaatgtcctcaccagcctgtcacctgatcctcatctgcagagaagcaacgggcataattcaagaacaaaactgattgaagagttgcttgtttcatccacaggttcagttcaggcattctgtagtgtctagtcacgatttctttatcttaaaaaaattaagaacattatcttaaattataaaaggtcatctaagcaagtattataatgtctcagaataaacagtattgtttattaataaaaaatgtgacttgaacacaagttgaaagggattttcaaaatggatgggtaagaccttcagggcttgaaagaactttattttattatttattcttcttaattttagagacagggtcctgctctgttgcccaggctggagtgtagtggcatgatcataactttctgcagcttctaactcctaggctcaaatgatcctctcgcctcagcctcctgagtagctggggctacaggtcacactcattgcctggctaattttttaatttttttatagagacagggtctcactatgttgcccaggctggtctcaaactcctggcctcaagcaatcctccctccttggcctctccaagtgctgggattgcagccatgagtcacaacatctggccctcccttgaaagacctttaaaatcataatttggaaggaaaaaaacagtatttctaaggcagagcagaacatttttctctttgttgtggctactttaaactgtataagtctgaccccaaacaaagttgggggcagggctctatggttgttctggttttctctttttattcttttattttttctgtgctaagtgaaatgttcttgttttcttagtgaagcaaagttcttttatctgtcaaattaataaactgtaaggttcatgaacacagtgtatgttttactcctcatgtactgcctggcatataggcttttaataaatattgctttcatgaatgaaagaatgcctttcctcccaacttctagattaaaaagaaaaaaataatgggaattgaaaataattagctaaaaaaaatgcaagcacaaaatttgaagaaagagagactagaaaacagattctatggataactattagaggatttggcatcttcttttcccctttagaaagtagggagataagtcttcacattatgaaggggattttttttttttttaatttttagtacagacgaggtctcactatgttgcccaggctgaactcctcaagtgatttgcctgcctcagcctcccaaagtgctgggattataggcatgagccactgtgcctggcctatgaaggggattagtataagtaatgtagagactaaactgagtccctcctctttgcaaataaaataataaatgaaattaattactgatgatcagcatttaggttctatttgaagttgtaacactaacagtgtcaaacaccaaaatgagccatagaaggaagtggtggtgatgcttttcttcagtaatgttaataataaaatgtcctcaggtgaataaatcacttagtttctctcttacagaatgaagagacctaagagaacattctcctccagttttgtaattaaaaaaaacaaaactagatgatttatccaacattttaggttcagatccaggtctagaactaataaccccaaatgacagtcagtactttttctgattcagcctactttcctcttcggagacattggatctcatcaatgagcatattaaaaatactgtgtaaagaagacctttgaagacacaggtttgaactgtgtgggtccacttctgctcaaaatttttttttcaataaatacagtcagccctctgtagctgcaggttctgtgtacaaatgcaagtccaaaatacagtatccaaaaggccgggtacagtggctcatgcctgtaatcctagcactttgggaggccaaggcgggtggatcacctgaggtcaagagtttgaaaccagcctggtcaacatggtgaaacctcgtctctactaaaaatacaaaaattacccaggtgtggtggtgggcacctgtaatcccagctattttggaggctgaggcaggagaatcacttcaacccagggggcggaggttgcagtgagctgagattgtgccattgcactccagcctgggcttcagagaaagactctgtctcaaaaaaaaaaaaaaaaatatatatatatatatatatatatatatatatatatatatggtatccatcagatgcaaaatccacatatacagagggctgacttttcagatctgaaggtttcacagggtagatggcaggacttgagtatttgcagatttgagtataggcaggggtcctggaactgatcccccttgtataccaagggaggactgtacttactaagacactatttatttatttatttattaaggcaaaatgatataagaaattaggacagtcatctgaagaatgtggacaaaaataaaagcaatatctattggtagaagcagggaaatacttcacctgaatttccaatttttattgaatatgctaagtaattatatagctcttaattcactcagtttctaaataccgtcatccctcagtatatgcagggaatcagttccagcacccctgtttataccaaaatctgcacacactcaagtcccgcagtcggccctgcagaacccgagcatacaaaacattggtcctccatacaggcaggtttcgtatctgtgaatactgtgttcttatctgtgtttggctgagaaaagtctgcataagatgtggactcacgcagttcaaacctgtgttgtgcaagggtcaactggatattgtcagttttgtttttctctatgtgaactctgggtttcagagctccagcaagctcccagaatgcatttgcctcacagctttggtacctctttcttaaagacttcctccttgtagctgattgtcacctcttaggtatgacgttttctttggaccattcactagacattaggaaagccaaatgatcatagctttcattatatatatgtctattttaggatgtattttaactgcttgtgatggtaaaaggaaaaataataacaaaacaaatagtcattcttttcccctctggcagtcactggcattaaaaatcctaaagtagccaattgcatctctaagatttaggtggacgagctccctggggcagggcagggtggagtgggggtggtgggcaggcagagaggagtgtagtaagtttgtacattctgttttcaagtacagccgtccgctttcctgaagggttcaatcataactcggctcttgcaatatgacactgacattgttaatagtaaataaaatgtttactagctgaaagatttggataaaagtcttttagatagggaaatttatttgcagtggttagttttccaatagtctttagtttctgatataggaatgtttttcttatttgaattttgtccattatttcttctgctttgacatttaaagaaatatctaatgcttcttttccctttacttaagtgtgtgccatttgtcctctggcattcaatatcagaacctggcagaggtttgctgtcaaagctccctatagagtggttggtaaggcaacatgcaaatagggagactggccccataccccaggcccagtcaggacctctgcccagagcttataactccagcacaagccatcatatatgggaactctgtctcatcacttttgagactctctctctctctgaatatatacacacacatacatacacacacacacttcatttgaaaatgaaggctttataaacaagccaagaactgcagagcaactactgatctcacatctcacttaagagacaacagagatttgtaggaatagcaaacattcagccattaagtgaggcatacaaaagactgctgtgttaacatagcccagaaaaccacggcacttcaatcagaacgtctttctccttgtctgtttttctttaaaagaggacccttcctttttgtccgataggaagtactattctgaatctaccagcaaggctggcatgtgctctcttataaaaggaaaagacttcaccatgcatagcctcttcaccctaactgctcagttgtttgctacccctggcaaggatgttctaattgtgcagtggagggtgtgaactcgttgctttaactgcagttccattagctaatcggagtcctgatgtcagtgtgacattgtggtgtaaatcatgaaggggtttttctgccacttcctgtggagagaaaacagttttgcaggatcacctgatgattggccattgtggggttgtcttcttgaaaaagaaaagttgttctgacctgggctgtgctcaggatgcctacattttgcctttgcaaagcgatgaaccccccagaaaggaagtgtatggggggcactgttggagtctgagtgctcccttccctcagcacttctggagaagcctggaaatactgtagacacagttttggagaagagaattcaaagggcttacaaaaggagagtacttttttgtccacttctctagaagaggcacagcaacttgttgagtttgtgttgtgttgtgttgtttttctgccaccaaattaggtgttcctattgtgtgggaggtgaaaaagagagcacaaatctattaataagtaaagcaactgaaacaaagggaaaaatgaatccccattttgcttttttgcaacattacatccagttaataaaagaggcttacaaatccaacagagatctgcttgcaggaactaactaggaagaagaagaagaagaagaagaaaaaaaaaaaaatccaacagagaaatttgatcactgatttaaattgtgtttgcagtgcctaaagcaagatgaacgattcattcactgtaagtcagaaggtgacagtaccaggtgtaccatttgctatatggcaaatctacagctgctctagaaagtgaaatagcagtgcctgttcttatcccttagttgactacctcatcactggaagtgctgtaagagcttcagaagggtggaaaactagtaaaaaatgtccaattgtgcatcaaaatttatgcttattaattctgaaataagcattatagtctaaacatcataaaattctttttgcttggtagctgcataaaagttggttttgaaacagcaaaacctgattttcctattatgtggcaattctccttcctgaagctggtcacaatatttgctttattgctggcttcctctaaatatgattacatactcacccacacacacactgccactggctggactgcaaagcctagtgaagcagaacatttacctcacatctttacccaagagcattggttaaattgttcttcatgaagtcagataagcaaaagaaatatcccagggttcttcgtacaattagcattcattctcagtgtttaccttttcatatgtaatattctaatttagaaaaacactcactagacacttgtcaaataactgcacatatcttcatactaatgccttgctgatatatatgcacctgagggtaatgctggcaaataagcatttcctaaaatttatgtaatcatttgaaattcagaaaggattgattagcattcaagagatgccactgttcaatatttacaccatagagatttggcagaagcaaataatggcatataaagttgatgcttgtcttaattaaatgcagtataataggtgttgtggattttttttttcttccagtgagcaaagcagtttagcaatgaccagatgtaattcattttggagttctaagtttgaacttaatcaatatgaacttacagccatggaagaagtgattatcatttgttatttgctggcacaagaatataattgcctaaatagcatttatttaagcatatttctgaataccttatgcctaaaaatatttgtcatattttagctgttaatgcttatcttgtcattttgctaactactgctatttagtgagatgatttttcagagacatattggccaggcaagctaggaataaccagcaagaaaaatcaagtgagaatgccatgtgctcttggttgatgtttctcgctgctttagctgtgtcaaccactctgttcaaatctcagaatagagtggctgtcttagtaccagctcagaagagcgtagttggttaacgtggttagcccagatgctgcactctagtggactctggacaccccagggcctcaggtctgttctacaatggaccaaatcagtgactcacatctgagtcttgcattagatcttctttctagtttactgataaaaatctgataagtcttatcttgagttgtggctgtgtttggttaagaaggttaaatttcaaacagaccaatccaaagccaggagagaagaacaaatagaagtacaaggcctctcatcagtattgaaacattaaatcacacaaaatatattgagtggccactatgcagaaccattgtactaggcaagctatgaaatgacaacatagagtcttttttttgtttgagatggagtctctctctctccagctggagtgcagtggtgcaattttggctcactgcaacctctgcctcctgggtttgagtgattctcctgcctcagccgcctgagtagttaggattacaagtgcctgctaccacccccggctaatttttgtatttttagtagagacgggatttcaccatgttggccaggctggtctcaaactcctgacctcaagtgatctgcccaccttggcctcccaaagtgctgggattacaggtgtgagccaatgtgcctggcaagaactggcaatatatagtctttccaaagagaaggaaactcctatgatacagagctgcattttggatccccaggacactgttctgaataaggcgtggtacaccaagcgaagagtccaaaacatgccatgccatcagcaatgctgcatgcatctcttgtctttctttctgttccttgttttcactgaactaatgcacgttccacacacatgctattctccttgattacattttattaatcagaaagcctttgtcaacccccatgttacataaatctcacagcaatcagaggcttcatgcctcttcagtttcccaactcctctgaaaggagatgatttttcagagacatattggccaggcaaactaggaataaccagcaagaaaaatcaagtaagaatgccatgtgctcttggttgatgtttcttgctgctttagctgtgtcaaccactctgttcaactcctctgaaaggagttgggaaactgcgtgggatcactccaggagccttagcaaggggcactgtccctaacacccacatcccaagttacccagattttggacagcaccaatgtggcctcagccctggaggaactgagtcccagaacatcagcatggaagagaacctatgctgttgctgaatacaaacacgtcttatttctgagtaagaaaatttaagctaatggaggttaagtgacttgtacacagtcatgtagagtcaggatttgaactgaaatttttgaactccacacgcaggaaaagagcacagatatggatttctatattacagaaatagtgcttttgcatttgtttcaaaattagacttactatttcttggccatccttttcaactaaatctaaaattttcattgtgaagtgtaaaagtgatttcccagaaacgtggggaatgtacattgccttttgctgccttaggactcagctgtgcatgctgcatgctgggtaccctgaactttggagggcagaatctctcctacagtcactcacactttgactctctccactttactctgggtacatggagctctgtgccatccataaaggtcagtgtgtcctgagtggccatgctggactcaaattgggcaattctgcctaatccgtcagcaggaatgatcatattcattttgtcctatcttggttatacagtcaagcgttatataatgatgttttggtcactgatggactatatatatatatatatatatatacacacatatatacacacatatatatatatacacatatatatacacatatatatatatacacatatatacacacacacacacgtatatatgtacatatatacattatatatatatggtcatatatatgatagaagactataatggaggtgaaaaattcctattgcctagtatttaccctactatatactttgaagttattttagagcatattctttatacctatgtatataaaagaaaacttactataaagtagcctcaggcaggtccctctgggggtatccagaagaaggtattgttataggagatgacagctctatgtgtgttattgcccctgaagaccttccaatgggacaagatatggaggtggaagacagtgatattgatgatcctgaccttgtataggcttagaggctaatgtgtgtgtttgtgtcttcatctttaacaaaaaaagtttaaaaagtagataaataaatttaaaaatagaaaaaagcttatcgaataagcatataaagaaaattttcatacagctgtacaatgtatttgtgttttaagctgtgttattacaaagagtcaaaaagcttaaagaaattgaaaagtttataaagtaacaaaggtatagtaagctatggttaatttattactgaagaaagaaaaatattttttataaatttaatgtagcctatgtgtacactgtttataaagtctgcagtagtctacaggaatgtcctgtaccttcccactcactcaccactcactcactgactcacccagagcaacttccagtcctgcagtctccacctatgataagtgctccatacaggtgtgctattttttatctcatagactgtatttttactataccttgttttctatgattagatgcacaaatactcactgtgttacaactgccttcgatattcagtacagtgacacgctgtataggtttgtagcctaggagcaataggctttaccacatatcccgggtgtgtagtaagtttgtgtaagtacactctatgatgatcgcgcaacgaaatcacctatcagtgcacttctcagaatgtatccttgtcattaagcaacacatgactgtgtatataagaattgatagcacacctgaaataatcctttctctgtaccatttatcccaagagaaagtaattattatagtagtgttaatactgctaacatctatgtaggaatttttaagtgcagatttatttaatttttaatttttaaaattgtgataaaatctacatgagatttaccattttaacaatttttaagtatgcagtttagtggcattaagtccacacacattgcaactgttaccaccatttgtctctagaacttcctgtcttccaaaattaaaactgtgcttatgaaacagtaaattcccaattcacccactgctcagcccctgcagccgtcattctgttttctgtggagaacattttatttacaaagtaccctattcttataacattatcctttacacataacacaacattgaaagtttagtgattttataatacaaaatgtgactggactcagcatggctaacgtgctcatgaccacacagctaggcatctgagagagcccatgctccaagccagggccactgattccagatctgctgtcgtcactcacaggcaaggaagtcttttgacttggggcctgaaataataaagcatgaggccaggtgcagcggctcacgcctgtaatcccagcactttgggaggccgaggcaggtggatcacctgaggtcgcgagttcgagaccagcctagccaacatggtgaaaccccgtctctactaaaaatacaaaaattagccgggtgtggtggcatgtgcctgtaatcccaactacccgggaggctgagacaggagaatcgcttgaacctgggaggtggaggttgcggcaagccaagattgcgcccctgctctccagcctgggcaacagagcaaaacttcatctccaaaaaaaaaaaaagaagaagaagaagaagaagaatgcatgaatgaggaaaaagagaggcgttcatgacaagtttcttactattgaggtgatatggcctaatggtgatgactgcaaacttgaattcagattcttgttctattgtatccttaggaacgtgtatcacctcacttttttccatctgtaaacttgaaataataatgatctacctgaagcatgattgtgatggttacatgcaataattattaggaagaacttaccataatggctggcacatagtattaataagtgattattactcaaaacatctgtgaaagtcatagaaatgaaggctgcttatcgggtaatgcctcttctcagatacaatctttggtttacagattctgtgaaaaagatctttctcacgtcagcaataactgatacattaattcagtaccaagccatagtttgaaatctttgatctactaaccaaaggcatcattattatccttgatgttttggaatatgtcagagtaagcagactcaagccgcttcactttaattcatctatcataaatcccaaaatcaagccaaggtctaataataaacaattaggcctcttcctaggttggtgcaggccctagatgatgagaaagtggaatggctaggctcacacctgccctctgggaatgcctatgctaggaagctcttcacttttttctttcttttttttttttggagatggaatctcactctgtcacccaggctggagtgcagtggtgcaatctctgctcaccgcaacctccgcttcctgggttcgggcgatttgaacacacacaagaaagagcacagataaggatttcacttaacatcatgcctggaataaagttcatattaaaaaacaatactcagtatgttcgattataatagctacatcttattgtcctgtatgagcagagtacattatacctgttgtttctaatcttcataagcaagccttcgatgaaagtatcatttgccattcctgttttactgtctttccctaagatcagagaagtcaaacaactatacaaaattgctgagctagtaagtaatagaactgggatttgcacactttagacatcaaagtctaggttttctccactattcactgctacttttctggttcattgattaagtatgtagatcagaaggcactataccagtgcttgtcatttatgatgaagctaacccattctaaatctgatccttctagatcctacttgaaagtacaagggctgagtaacaatcctgccttcttaaatgcttaataattccccctcatcaacatgccatggtttcagtcagagctgctttctattgatcggtttcaagaagtatcacagcttttatcaccacggtcagaagcactgctgaaattatagggtatttaatcccttatgctggcctacttactctaagcagattttcttttctttatcttttttttgagacagagcctcactctgttacccaggctggaatgcagtggtgtgatcctggctcactgcagcctcaacctccctggttcaagcagtccgccagcctcagccacccaaagtgctgggattacaggcatgagccactgtgcctggccagattttattttatttatttatttatttatttttgagacagagtcttgctctgttacctaggctggagtgtagtagcacaatctcggctctctgcaacctctgtctcccaggttcaagcagttctcctgcctcagcctcccgaatagctgatattacaggtgcacaccaccacacctggctaattttttttttttttttttttatgtttttggtagagacgaggtttcaccatgttggccaagctggtttcgaactcctgacctgaagtgatctgcccaccttggcctcccaaagtgctgggattacaggcgtgagccaccacacctggcccagattttacttttaatatgaagaaacatctgctgtctaaattcctatcctcttacaaatatttactgtgaacagaatttgataattgattgaaaatcattaccagattattagcctagattattagcagattctccctttcctaatattgccagcatcaaactcaatggagtgaaagaagaaggaatgaagattaaaacatgaatttgtgtacgtttttaagtattttaagaataccaaaataaaagtgtcatatgaatttcttagtatgtttctgatatagacaggatagagtttagtaattagcaatttcttctaattttttttaaaaaaagtttattgttgttacttgctacaagaaattatgggacaaattggataaccacatgtgctggcatttgtccaggacagcccatatcaaaagggattggggtccatgatactgtaacagtatcatttctaattataacttcaaggaaattcctctctcaaagaggtagctaagaaacttattcttgtcttacaaaagaatagggtttttaggatttaaaaacaggttgatgtgccatttttcctccaacttatgtattttagattctattttgattttcactgatccatggtatttcgttatataatgtaccccacagtttattgattcattctccgattggtggatatttattacaaacaatgttaaaagaacatttttctccatgtcttcctgtaatatattgttggacaatcactctattgttggacaattacttgcaactctagaaactgtcaaagtgttctccaaagtagctgtaccaaattacatttctaggcatagtaaatgagagcttctatttttccatgtcatcaccagcactataatacagatgctgtcattattctgttttaatttgtatttctgattaccagtgatattgaacatctttctgtttctttgaggtacctgtttatcaatgtttttccatacaatttttgctttttaaattttcttaagaaatacttcccaaccttggaggtcttaaagtacattctcctttaatttttttccaagtgtattaaggccttgcttttcttaatatgaatctttaatgtccagaatttaattttgtgtatggtgtgagggggagatctagtttttattttatttttcttaagggtagtcagtttttcccacactgcttactgaatcgcttgtctttcccactgtttttaatgccacctctcttatgtattcaagatctgtatatgtgtgggtctctttctggactttctactttgttcctttggcctatttgattatctcagtgctaatctcacatgttttatgcatttttataataaatcttaatatctgcttgagtagtccctccaccttttatttcaaaatagtcttaattagtcttaggcttttgcttttccacatgaattttaggtttggcttgctgttgttccacaaagaacccagtggggtcttgagtaaaattgcattgtatttagagattaatttggagaaaaattattttcttgggagtattgagactttcccgttcatgaacatagttcatctttcctttagtcaggtgtactctgatgtccttcaataaagtcatacaattttctccacagaggtattgtacatcatttgttactaatttattctagctattatatagagttggtttttataatgcaaaccttttctgtagttaatatccatgtggctggatatttttatattgcatttttatttaacaaatctactaaatgcccttattatttgaaatggcttttctgtaatttatcttcaaccttctgtgtagacattcatagtctgaaaataaatacagatttatcttttgcttttctggattccatttctgatcttattttgttggttagacaatattgacttggtgtgataacaggtactcttgccttatttcagtcttttataggaatcattctaaagtcaaatgacttgatatgaaaagtgttgtctattttagtagtcttctttttagtagaaaaaagagaagaagctattgatcttggagagagatccaacagctattttttctttgccttttatttcaacaaattattctcttatcttttgttattttattgttctggttctagcttcttcagttgacgattttattcatctaattttcagccatacattttcattgttcttttgttttgttttgttttgtttctcatttgatgaaagcatttagtattagaaagttgcctcttggcacagccatagttgtatttgtggaagttttgatattggagacagacattcaaggctgctgtgggtttatgcaagtcactgtacagaactctagggggcaccactcacactatagtatatatcaatgcatccctaagagttgtgtggtacacaacaccagtagccctgtctggtagccctacgtccagtgctaaatattttgtcatctcgattgtaatcgagatttatttcacaatgggttttaaaatttccaaacaaatggaggttttgattatctttttatttttggattataagatgatttcactatgaggttatgcatattactgaatctttcttttgatgtgatatttagttaattttaataaatatggcatatatgacacagtctcaattttagatgtcagtatttatttctttatatcattattgataaatttgttatatcttctgtgtagattatttcttttattattatcgtgtgcttcttattttctttctttcttttctttttatagagacaaggtctcactatgttgcccaggctggtctcaaactcctgagctcaagtgatcctctcgcctcagcctcccaaagtgctgggatcacaggcgagcaccaccacacctcgccacttattttcttttaatgttttgatcttttaaatctgctttgtctgatattaagaatgttttatcagctttttaaaattaagattgacatcttttttcccattctccttgttttctcctgttcagttgatttagtggagtttcttgtgtttctgtgatttaggtggttttcctgtaagcagcagatgtctatattttatttggcttttctttaatctagcctacaatccctttaaacttttaaatttgagatcattttaaatctacaggaagttggatgttaagatacatataggggagtcccaagtacccttcatccaatttctccaatggcaacatctcacataactatcctcaatctaaaaatcagaaaggcagggcgcagtggctaacgcctataatcccagcactttgggaggccaaggtgcatggatcacctgaggtcaggagtttgagaccagcctgaccaacatgcagaaacccagtctttactaaaaatacaaaaattagccgggcatggtggcacatgcctataatcccagctacttggaaggctgaggcaggagaattgcttgaacctgggaggtggaggttgcagtgagctgaggtcatggaattgcactccagcctgggcaacaagagataactccatctctaaacaaacaaacaaacaaaaccaggaaaatggcattggtatagtctgtagactttaccaattattcagtttgcatatttcaccagtttaaatgcactcgtttgtgtgtttgtatgtgttggggggtgggttctggcaatgttatcacatgtaggttcatgttactaccaacataatcatgatacagaactttttcatcaccacaagtttcctttgcgctagcccttttatagcacccacccctccctccattcttaacacctgacaatcactaatctcttctccatctctgtaattttgatatttcaagaatgttatataagtatatagtatgtaaccttttggaattggcatctttcactcagcaatattcccctaagattcatccataagtgtatcaatagtttgttcatttttatgattgtgtagtgttctttggtatggatataccacagtttgcttaacccttcacttattgaaagacatttgagttgtatacattcagttttggggtactacaaataagctgctatgaatatcatgtatgggtttttatgtaaatataagttttcatttctcttggataaatgcccaagaatgcacttgttgggtcatatgggaaacataggtctataatctattttttaagaggtgagtttgatctatttactaataaaccatcctagtttttgtatgtaggaaatgttttaaatttggccacttcttggaagatagtttaggtgaatataaaacttgaagttgacaatatagtctcttaacacttgggaagtcttttggaagtctactgtcttttctttttgataatttttaaggtttttctttattgccagtgtcttatatacttttactacaaggtgtctgagtataccggaagtgcacatccaattagagggcactgaagaattctgctattctcttttcatatgtcacttctatgcaaatccctctgctaactcctatcaggcatatgttggagcctcacagtctactgtgtcttctagtttttaagcttttttcccccttttatctcactgtgctgctttttgcataattccctcttcaactatatccagtctagcacatataccatcaacttagtgttttgaataattgttttttgttttaaagacttctttttttttttttttttttttttttaagatggagccttgctctgttgcccaggctagagtgcagtgacacgatctcagctcactgcgacctctgcctcccgggttcaagtgattctcctgcctcagcctcctgagtagctgatattacaggtgcctgccaccacgcccggctaatttttgtatttttatagagatggggtttcccatcttggccaggttggtctcgaactcctgacctcgtgatctacccgcctcggcctcccaaagtgctgggattataggcgtgagccactgcgcccagcctaaagacttcttttttttaaaaaaaaattattattatcattattatctttagagacagggtctcactctgtcacccagcctagaatgctatggcatgatcatggctcactgcagcctcaaacttctgggctcaagcaatcctcccacttctgcctcccacatagctgggactgcaagtgcatgccaccatgtctgtcttgctttaaagatttctaatagacccgttttcccattaatgtttaaatttggcttctattgtttcattacgtatcttttaaattttttcattttttcctttttaattagtcaatttatttattaagatttttttcttcttgccttgtcttatggcactgatatctttctttttagatgaataatatctctatttctctcttaaacacctcaagcaaactgattttgaggtttttgtcagattcttccatagaaataatttcttctggagtgagttgatgttttatttttgctgactttttccttagcaatatatatcttgctgtatatgctgtatgtaaaaagtgtgtgtgtatgtgtgtgtgtgtgtggtttttcacattattagttgcagacttactttgagtaagacttttggtggctgctcttgtttccgtctctttctcctgtcttgtgttttctttgctacacacactgtgctcactcctctgcatttagcatttctgtattagcttctgtctgactctatgagatcctgagtccagaggcaagtcctatatggtgtttaggcttctgcactgtggtcatactgaagatactttagatccagtcacagaggcagtgggggccctgctttaactcccagtccggggatatatttttgccctgctaccttgcctagttccacagcttaccaaatctatagcttgggcagtaaattaggattagttttgtttttttttttccccttctttcattccttctaatagcctccttttacaaaaggagtggaagtttggaactcctgccccagccctgcgccatgctttactttaagcaagacctagctctggttgccacatgcatggttgccacactttaggccccaacacccttcagaagctggactccagctactgttcactggactccagctattgttcataatttttttttttttttttttttgagatggagtctcactctgttgcccaggctggagtgcagtggtgcgatctcggctcctgcaacctccgcctcccgagttcaagcgattctcctgtctcagcctcccgagtagctgggattacaggcgtgcgccaccaggcccagctaatttttttatttttagtagagacagttttcaccatgttggtcaggctggtctcaaactcctgacctcgtgttccacccaccttggcctcccaaagtgctgggattacaggcatgagccaccatgcccggctactgttcaccgtttaaatcctggccactgctctgcatttctgctctgtttgtgacagagatgttgacattgtttgagcctagctatgtccttttctctccctttgtatttttctgtcattgatatgtttgtaacaggaagagtgcaccaaaatgagaattcaccacaatattttgactagaagcacagcataactcttctgtttccaaagagcctgaaatgtttgaatcctcccatcaccaccaaccaccaccgccaccatcatcccagcactgtttctctctcacacacacacacacacacacacacacacacacacacacacagaacaacactcaaggccaggatctcctaaagccttgtgccgtgggtctccggtctgcctttccaagtttgtgtctcaccattctccttgcccatgtcagcacactgttgcccagcaaactgagcaatttgatcttcctggagcctattctatatcttactactttggggctagtttgtgttctgcctctcttcttgaaatgccattcaaaacaacccccagtctttcaagctcagacaaactcttcctctatggaaagacctaccaaatctgccatttgggaaagaatttccctcttctattaacccattacattgtttccaatttttattacatttgccatgatcaaaataccattttaaaacatcttacccagtctcaaacacttaacatagtcttatactgaagatgttaactgtttattaagaaactcttgtgtactagatgctgtccaaggcctttttagatacatcgttatctcatttaattccttcaccaattacggtatgaggtgaaatttgctcattttacagataaggaaattgagcgtgagtaagtcttacccaggtccttatgaaactagcagattcctaagacctctctgagacctactaaataggaattgctaaggatggggcccaggaatctgcattttaaccacctctttatatgatgctctagcactcctactgtttaaacctcgttgctcatcagaatcatctgggggttgagggaggtggcttaaaaatattcagaactgggcgggcgcagtggctcacacctgtaatcccagcactttgggaggctgaggcaggcggatcacaaggtcaggagttcaagaccagcctgaccaatatggtgaaaccccatctctactaaaaatacaaaaattagccaggcgtggtgtcacgtgtctgtagtcccagctactcaggaggctgaggcaggagaatcgcctgaacccgggaggcggaggttgcagtgagctgagactgagacactgcactccagcctaggtgacagagcaggactgtctcaaaaaaaaattttttttagaactaccaaattggaatttccagagtaatggcaattttttttttaccagtttctcagatgagtatgaagcaggtggttcaccaattcctgtgtgaaatatacctaggcaaatgtcagaaactggtaggccattgatagaatttgtgtgtgtgtgtgtgtgtgtgtgtgtgtattataaaggtgactcaacatttaaaatcaagagaatccacataaaatatgaattccagtttctttctaaaaaattagaaggtcgggttacactaggttcttatgttgcaggtttgtttgattattttttaaaggcagggtcttgctctgttgtccaggctggagtgcagtggcaatggccatagctcactgcagccttgaacccctgagctcaggcaatcagcctcagcctcctgagtagctgggactacaggtgcatgccaccacacctataggctatcatgttgcaggtttctaggtgccttgatactttgatgtccctaataatgaaagtaactgcaagaagggcagtcagtttatgcctgaacataaggaaaaattcatatattagaagaacactgtacacagatataagtacaccagataaatgaatataagctttactaaagattcattaccaaatacaattttactcttcaaaaattttacttatcaaaaatttattgaagatacctcataatctcttccctttaataaaaattaaaatgtaaatgaaataaaattataggattcctaaatattaaagactactaagtacaagaaacaagattagtaaatattaacaaggttactaaatatcaaccatgagattcttgagtttctaatttgccattcacttgcagaagttcacctgtgagttttgcattggtagataaagaaattcatctatctgctacaattggcctcagattctaggtgaatctggtctgtctacagcactccaaatataaagaagaaataatgatagtttcactttctgtaaccctactcagtggattctgttgctctacttgtttagctgtaactactgtcagaaattttctgtggaggccaacacaggatagtcggttttttaatgtgatacagttgtgattgtaacaggctgtataaatagccatcagtgggtaccatggaaaccacctggaattctttatctctgtcctagaaagtactggagcttttgtacagcaactgaagacatatttaagatctttccaagtaataaaaaaggtctttgtgcattttaaacattaaataaaattaaatcacaaataattattaaatagcaaattactaggttaggccctttctctagctctctgggaatcatggttttcagacctatggttctcaaactggggctggaagtcaaaattaatgaacaaattaccccaaatattcttagtactttcaaaaatttatttggaaattacacatttgtctgctataaagttgcaaaggctaaataagtttttactgattaaaaatttacataataatttacttatcaaaaaattacataatatgactcatattcccttgtaaggatacataaggatagagaacggaaaatgtatccttatgtatgtatccttatccttgtatccttttttttttttctggttccactttgtttttattcactgaaaccaataaaagagttgaacacagcaaaacttggaacaacaaggaattaactgggtggcagcaaagggcaccaaaagaaaagataaattgcccaaaataaataagggctggtgaggaaaataaaaaatgtttccgaaaaaagtgggctgtgatgcaaggtactgtgagataaagaagcaattgtttcacgcaaaaaatagaggggggcacctcgctgaagccagcgaggccgctgcaccacgtggtgtcaggagaccttagcaatggcccaggttcgctggctgcatctgctgtgccaggcgcctactgtgcgctcctctcctcatccagcaaagctcggcctacatggaggtttgctgactcccccaggccaccttagttcctctcggagtctgtatgggtctgggcgagatgcaggcagcttatctgtttatggggctgcctcctccagtacacggagagctctttgaggcaagggacaatttgatctgtttcttcatccttaaaatttctgctgcttttgctgtttctgtgatttccttggtttctccattggtgtgcttaaagcgatctcctctacacgaacgctagggcagagcacattttcgcacaggcagcgccgcagcttgccctggatcttgtcgattgagttgaagtcggacacgtggaagacatgggtggacttgggctccgaggcgatctcctccagctcctccctgagcgcctctcccacgtccacggtgaagacgcggatgccggcgcgaatgccggcacggtgggcagccgccgtggcgtccagcaccaggtcctgggtgcagccattggtgagcagtatggccacctgcttgtaggcgcagtccccggagcggtggccggcgcgcggggagaagctgcgggctgtgatgtggtgcagcgcttcgccggtgttggtgttgccctgtggtaggcgatgcatcgggcggccgccttgacctcctcccgcgagccgaaaacgcccagttcgaaggccacgttgggcaggtcgctggagcgcacggtccccatgcagtcggggcccgcctcgaaggtatccaccaggttgactacccactgctgcaccttctcaaagtcctccttgcccacgctggaggaggtgtccaagaggaagaccagattgtagtggacgcttttgcaacctgtccgttgggcctatcagccgccgccccgactccacagcggcagcatccaaaggaagccggccacagcattccctcggagggcagccatggctctcctgttcttggggacaggcttttcttggccatttaggccaagaaagacgcagttagggcctactgcagcatggcctagcagggaggcactcgggctgccagcaggagtccaatcctgggcccaggcccactggaagcagcagctgggagaagacaccagccccaggcagccccctcctgggggtcacctgccagcaactcgcccactctccccccaataatctcacaaactcagactctagacaagacttgcagtaagtctggaggctttccccaggccagggggccagagaggatacatacataaggatatgtaggggaaaattagtcaaaaataaagaagttaagtgaagcgcaaatttgagggaaaaaaacttttaaataaaaatctccctggtaaacttcaaattcactaaaatcatttctatgtggatgattttctcttttctttaatatattttagtagctaaataatctacacaaatgagatttaaaaattgaactccagacaaatggaaacgtgaaggatcctatgagcatttcctgtccttataagggtggaggttttttcttcttcatctttttgtctccaactcctagcccagtctttggcatgcggtacttttttttttttttttttttcctttgaaaccaagtctcgctctgtcaccacgctggagtgcagtggcacaatctcaacttaaaacaaccaacaactcttgggttcaaacaattctcctgcctcgacctcccgagtagctgggattacaggcacctgccaccatgcccaactaatttttgtatttttagtagagacagggtttcaccatgttggccagactggtctcaaactcctgacctcaggtgatccatctgcctcggccccccaaaggctgggattacaggcatgagccacctcacccggccacacgcagtacacttttagacagagtctactttgcacttcttggtgctgtttactggcacacatattcaaaagagtgaccatggctgatgagtgtgggtcgcaataactgatgcgtggccaaaggtgtttcccacaacagttggctttgattcaccgtgtatcttctgcactggctaccgtgtagttatgccttgcccttcatgggtcctgggattacttgactgctgccgaggctaacagcctcttttttattctgattgtgacccattatattagtctgttggccactgactcactagtacttggaagcaacccacagctatgttgtcacatccacgtattcccctcaacacgcagcaaattggggtgagaccaaggaaaggcccatgcacaaaggaacctgacagctgtcagcagtagcacctgaggccaattgtaggcggtaatagcacacactcagaaaaccatacgccagcagtgtgtgtgcatcacaatgccgggagtgcacatattgtgggctcctcatcaacagggaactcatcctgcattgcttttatatcccaactgtacttagcacaagactaaccatacagtaggtatctgtgcctataatgatttcaccaatatttctacatatgaactactattcatcatttagggtctcactaaatgttgcttctttgaagatatttgcttgaatcccctatggcattttgtagttacctccatgcagtaatgataatatccaagtcattcgttccagagtttatatcacttatgtaaagcgtataactccaaagctttgcaataggtgttcaagcagcatataatggatggatggatggatggatggttggttggttggatggataaacattaattgcttagaagccaagtggagcaatttgaaggagcactctctcctatacttcttgttttgttatgtcaattcatgaaatccccagaatgacacataaaaggaaaccaaaatcaaattaaaacttatgaacctaaaccatcttgtgtcatccttggtagacatttagtggaggaaatatgaaattgtactattcattcaaggagttaataggtaaaccagtttatccatcactaacttgtttttatagcatcaacatggtgtaaagacaaaaacaatcttgaactctagtaactatcatctatatttaatgcctctatgctacaacagtaagactctggatgattatcagtaccacttagaattagagcttcttgttaaataattcatacatttgatggggaagagcttcaaacaatgctcaaagctccagtaattaatgggctaattacgagatgcttgtaaaatggcttaaacactgaaagttcagtgtaggtataattgttttagagttaaccctgtgtatttaaatgtcaaaaaaaatattcagtgaagatgagtagagggttgggagagagaagagagatcataagatatcacaccagtttagaagtcttcactattgatttaagatttctaaaaaggctctggaaaggcagaatgcaggccttcctaatgccccaggcattttccaaccatgtctctaatcacataagaagaacatcacccatgagtcataggactctgggtactcttagaggtcagaaaccgctgcagtgcaagtcctttcagcctaatcgcctcttcactagcaacgcccaggttccacaagagtgctctgtttcattccaggacccgtgggagttaagaattgaaggtagttgattttttggttggttcatttgtttgtttttcctccctgttgtttgctgttctcagaaatgacctgctctctgagctttcttggagtgtaaggcatttcaattctagaaaggtggggctgggaggaaaatggtctccttgactgcaaaccatctagctgaaatgtctttcactcatcccactggaagggggaaaaaaagccttctttagaagatgaaacattgtcttgtgtcttttagcatcgttctgggcagtcagtctgttaggacatattgggcgattataggactgtctttttagagaaagccatgggtttcaagttagcaggaaccatctatcaattcttaagattatgccatgatttactgtcagagcatcatgtattctgattttctgcctcccatgaaacattgtgctttccttttctattgatgtatcaactataatagttacaagcagctacagaaaaatcaatagcgagctttcattactgtgtacatcaagtaaagagccccccgctgcaagagcacaacttgttagatgctcaccatggaaggtgtacaacactcaactgtttttttcccagactgcattagaaaaatcaactatagaaaaattataaaatagtatcatattctacatggaagcacagagaccctataaaatctctcaaagggaatggacaggaggcattatcatgtttcaaaatgagcacagcatttccaaagtgaatataaaggtatttaatgcgattcctacgtggtttttgtttctggttttcttttgcatttgtcttcttaaggtcatcaggatagtgggaggaaatactgaattagtatttactagattgactgcgtaagcagaaagtcaccactggctgaagtgcatgctgcaatagtcatgcgctcaacacccagccaagcaatgaggaccctaagaactgtgtgaatacagagtaatattaccagggtcttaatcagatccaggagtcccagacatacatatgcaaagttttattctctttccaagcacatgttggaaaaagaaaaagacttaggattttaaagcaacaaatacctttatttgcctttgggagcacattagctaccaattagtgcatgtaaattgagactgctgaaaaagagaatgtatgaactgatagtctgggtgggggactctcaaggcctcagaagttctctagcatttcagcatcaatttgggcaacataaagagatttccaaagcaaatcctaacaagtcctgaatctgaaccatgtacaaatcataaatcccatggaattcccaatcttaacatgtgcaatgaatgtattcagatctatatatttaagtaattagttcattactttctgatagttatgatctacataaaggttttccatatgttactgttatgatccaagtccaaactccagttattttttatctttagagataatatatttagcaagaaggcaaaaacgtgcctgataatttttatgttcatataagaatgttaagaaactacaaaaatgtgttttgaaatattacagtaacaaacaggaaacaaactaaaaccttgagtaccaggttaacttccccaaaataccattttaaaatactgatgaatttgaacaagtggtttgatttttgggcatctgttttgttttaggggaagggaggaatatttaaatgataaaattttcaaatatcccatttttttcatagttttcccaacttttgtggattttttttctatttcgtttttctatgcacccaaaaattatgtgagaattttgcatttgcctttgacattctaacaacagaatgaactgccattcagctatggtcactacattgagagtttaatgctccaaaaggtatgctctgcaaggactgtgaaaagattaattagtctttgctggtttcatcagaggatgctgagaaactggcaacaggctctctcctgcaccacagcccaagaggaagatcctcttttccccagcaaaccaggtagcaatgacatctgcaaggttagcctttctatttgccagtgtccctgacaattaaaacagtgaaaataattcatgcattgccaatcttaattacactcttgctttcgtttattccttttgctactttcctggctggtgttttgcatgttacttatatgcagtagtacttatctaaagcctactttagagtagttgtccttacaagaaatggaagtctaagtagagtggaatagcatttggatgattacagattctctgtgaattcagctaacactttcctcaaggtagcactcatgctcctgttaaaagtacattctttccacatgcttttttcacatagttaaaaagaaatccttccatgacatactgaaccctaataccaaataagctggtgcttcccctgagccacataggagaatgttggctctgagaatgtcgcagcatccctgcactgctgtgatgtgcagtcaacagagggtacgagctctggcagaaaacccagaacaggatattatgcacagtaggggctttccaacccagctgttccaagccctatagggtcaaaatgatggggaaatccagaatgacagtaattatgccatcaaccttacggctccctgccagagaggttgctggttagacatctatacatctagtagctgtttaatacattttttaaaacaggtatagtgaaagaatgcattttaagcaggaattgaaaatgtactaagaatgagacaataatgtatgagcaagtacttactttgtttcttactttaggtaagaaaaaataaaaggaaggaggaaaggtatggagggggagatagagggatggagggaaaagaaaaggaaagagaagtagatagaaaatcaaacacagatgaaagcaaagacaattatgattataattatttcattccctaatcatgtaagatttgaattttctaattaagaaaaaagaacaaaattagttcatatgtcaaaaagaggattctaaaattgcactgacataaatgttattctgtgattcagttgcattcttaaattggtgtgttatttatgcaaattatggtaagaaaaataattttggatatttttgttttacaaatatatttttcactttcaccacattatttccagaagtatctttccttccacaggggttccctgtctgctcttgcttcctccagctcctcaatatatgtacctttcagggttgtttcagcagtcctgaagttgtgtgtgtgtgtaagcatgattaagagtacttttgtgggagtgtgctattgccagcctcacagatggtgttatttcctgtgttagacttcctacttactgatagctgggctcacacttgacatcctctcttaactgcctctagaccaaaacatgcaaagtcttgcagtgtgggagggaacctgtggctgtgcattgggttcagttgataacaataatcaccagccctgatgagtcaccagagagcaatggggtgatactcaagtaccagagagatggtggtggtctctggtggccccaccactgtccaccacttgcaagtagataaactggtcattaaaggagctgtggagagccagatgcagtggcacatgcctgtagccccagctactgcagaggctgaggcaggaggaacacacaaggccaagagtttgaatctgacctgggcaacatagtgagacccctatctttaaaaataaagaaataagtaaatttttaaaaagaaaggcattatgagagtttcagcagaacatttaggaagggtcttctagagataatgatggacaagtcagtaagctgcttgttcacacactaatgtccagttcatgttgactgctatctacccacgtcttctcttctggcacctgccttagtggctggaagctctctcagaagcttaaaaagatgcttttattttacctacccaacaaggtttctacgcattccagcctccaaggaggggtggttcccctttgtgaactgagatttaggaatatctatgtttacaactccgggactaagattcaataaagcttcaggagggtggaagtgcagcttgtgagggcaaaactttagaatccagtggacttcttaaggtcatctgaacagtgagagtaagtactaggctcttatcccacttccaccaccaaccaatgcagaagtgggattaagattgataatcctgagatagcattaaatgttttgatacaggcatgcaatccataataatcacatcagataaacagttgttctgtgcacacaatctaacatttatgcattttttctttaaaaaacctttctgcatccaaatggcacattcattaagtttaaaatgaagcacaaaagatagagataaaatgaagcaactctataattatataaattataaatcttactgtaataattatacagtagacttggagaaagacaggcctttcaagaattggtttttagagatgtgtctaatgccttaaagaagtgtttgctttaaaatcttgaaaaagcctcatgtagaagtgagatgttgtaaagtcatcattggctttggccactgccaggtcgactaccagtttgctatttgtgatgtatttcactattttggaacttacaaagctattcctgatttccttctgttaatggaggattaatgacaatgctgaatccacagataataataaaaaaattttttttttttttggacagtctcactctgtcacccaggctggagtgcaatggtgcgatcttggctcactgcaacctccaccttttgggttcaagcgattctcctgcctcagcctcccaagtagctgggattgcaggtgccagccaccatgcccagctaatttttgtatttttagtagagacggggttccgccatgttggccaggctggtctcgaactcctgacctcaagtgatccacccgcttagtctccccaagtgctgggattacagaggtgagccaccgcgcctggcccaaaaatcaaattttcaacagttacttaaatccactacttcccaagatgaaagctttattaccaactgaaacttagagaactatgagtggtcgtgggctgcctctgaacttgctgtgggtatatttactgagccaccatgggggtcatgtgaagagtctagggttttgttttacatccttaacacttcagttttgaaaatccctataagacagtaatagttctatagggtaaactccaaagagggcttctgtagggggcataggagtggcacccacagttgtgggaacgtcagcaaacctgcatcctccctcaggggagaggtcagagcaactcagaatattatgactactgaaacaactttttgacttcacgatgctgcaaagcaatccacatccagtagaaaccatacttcaagtacccatacaaccattctggtttttctgagacggagtctcactctgtcacccaggctggagtgcagtggcgtgatctctgctcactgcaacttctgcctcccgggttcaagcaattctcctgcctcagcctcccaagtagctgggattacaggtgcccccccaccacacccggctaatttttgtatttttagtagagagggtgtttcaccatcttgaccaggctggtcttgaactcctgacctcgtgatccacccgcctcggcctcccaaagtgctgggattacaggtgtgagccaccgcacctggcccattctgttttttagtttcagtacagtattcaataaattacatgagatactcaacactttattataaaataagtttttggttagatgattttgtccaactgtgggctaatgtaagtattctgagcacatttaaggcaggctaggctaagctatgatgttcagaaggttaggtgtagtaaatgaatttgtgataatattttcaacttacgatgggcttattgagacataaccccatcgtaagttggagcatctatattgccgacatcttaacagagccgctctctgtatatgctgactgatacattaggcttgggataaatcatatctgacctttccttataatagcactgggtggacttcaaaggtggaagagatatttcttgttcaattaagtcatcattgcagaaagatgaaacagatgatactttataagccaggcactgtcctaccttgtggtaattcctattaaaacacatttaaaagattaggaaactgaaacttagagcaatttactaatttcaatgtcttatggccagtgcagtgttcacggatttaaaatcacttcaatgcaagtatcaataattctgctaaataatcaggagttgactataattaatctgcaaaaaccaaacaattttccccacttgaattaatgatttctgggtgtgaaagggaatggtcaccacatagtcttagtttccttccatgcaaaccttagaattgagcatagcacttacgaaaccaatatgatcagataataagatatcttactattatcactgtcttagcaaaatctgtcattacactgaaaaaaaaataggatagcttcttttgcaaatgtttcaagctccaaaagttcttagaataatctttcttgttattttctctgccacatggttacacaaatacaaaacaaattggaaatatggattttctgtctttcatatacaaatacatatccctgagcaattgaatgaattattaatttgttttgtccaaaaatggataagtatttggctttaatgatcttgttaggcaactagtttcccttcccttatagttctcaactccagagaccctctcttttcatttttcaagcaaataattcagaatcagtgttgatccactgcatgatttttcccccttcatttcaacctctgatcttactgagcagaattttaatagctaagggaaatgatgtaataataagtaacaagtatatctagctcttaaagagtagctttaatttaactctacaaactcataaaatattggatatttagaatgaatgtagatagtaacagttctcatatgggcataaaattgcaagaattttactgattgtgatgtattacttttagcacaaatagaatgtaccaagtacaataaacttcactaattcaggacatttcaacttggcaacaaaaagctcaatttatatgtacttaaagaaatgcaattttagtaacctcagtctaatgcttaattaaagtaacatgttaacacagtggggcacaattaaaaaggagttgggagcatcagctataatattcaaatacctagtttttttccaatccaattaatctattttgtgtgtctgtctcagaaaggatagtaccagacctgccaaaggtgttggcgggagtgagataaagtagatgcaaggggtttaataaaaattcaaagaatgacataaatataaagtattattctcagagattacaattcacaattagcctgcattttataaaatacctctaaaacatcttcaacatttaaaaattggatgttaaaattggtgatacattaataatactcttcattccttgaatttctgattctgttgctgactttagatagaatttatttttcatcagttacatactcaaaggctaaaacaggaaggcattcttttttgagacaaagtctcactatgtcacccaggctggagtgcagtggcgtgatctcagctctctgcaacctccacagaaaggcattctttaaacttcttatccaaaataaacccaaatacaatttccgaagtagcatagagttcaagttgctgagtcttacctagtgaaccatcagccaacactgtagaacatcatggtgctgccatatagtgtatttcttgctgttaggaaagcaaaattccctatcctattctgcattctggtattgacctgaccttaatatgtttgattctttttttttttttcctaatagggacagggtctctgtcacccaggctagaatggcccgatcacagttcattgcaacctcaaactcctgggcttaagcaatccccccgcctcagactcctgagaagctgcatgccaccacacccagctatttttttttttaatttttaaattttttgtcaaaatgggatctcactatatcagactggtctccaactcctggcctgaagcaatcctcctgcctcagcttcccaaagtgctaggattacgggtgtgagccacttactgtgtctggccatgtatttgattcttttaaaatcatgaatacttgttctttcaaacaacaaatatattatagtcatatcttggtttccaatttctgtttaaattaacaagatgagaattgaggcccagggaatcagaggttctccagatgtttcccttcattcacatctaatcctacccctccacaggaggtatgaaaccaactcattgcaaagatgtcacccagggccacatcacccagggatactggggttgggcgagagcataacgggacagtagagacctcacctaactttgccttcgtgcttgagcactaaggtcaagcaaacgttttatgaagtttcctgcccagtcaactgctgagtaatatacattataccaaataaactggttattttgtagagattgttgaatgctttcgttcaacattttcattttgaaaagattttttaaattatttattattattattattattattatttttgagacagagtctcgctctgtcctctaggctggagtgcaatggtgccatctcggctcactgcaacctccacctcccaggtttaagtgattctcatgccctagccttccaagtagctggaattacaggcgcgagccaccagcacccggctaatttttgtatttttagtaaagacggggtttcaccatgttgcccaagctggtctcgaactcctgacctcaggtaatcctcccgcctcagcctcccaaagtgctgggattagaggcataagccaccatgcctggtctgagaagatttttttaagagtgttctgctgctctttagtttcatgtaaacttattttccccatggcaccctcctcactgtcatccatgtcccttttctgcgtgagctggtatcgcttgctaccctctaagacctaggggatagaaaacaatgggctctagcctgccttctgcagggagcaaagcctagaaacaggaagctgctacaagcaatcccaactgcactgtgtccatggagtatcatgaatagtttacacgaagaggatttctttaaaatgctgaattatgaaggagtattgattgtgtgagtagaaatatctagaagactacatcttttgtcttctagtctaatgctctgacatggagaagtgtttccagtcaacggtttattctgaagatagcaccttgtccactaaatgcacattacattctcaaatttacctttttaaagattctctttgaaataatctctccaaaagtcagtaagaaacatgtcgagcactaccaaagctgagaaagtggagctgaatcgggctcttagcctcactcacacaaaataatattttaattggctaagctaatatttgatccaagttcataaaagtttgaaatcaaataattaaatgcaaatacagtcttcatcccaaagacgataagaatgcctttaagctaatatttttaacaagaactgttccacagcgctctcttgtaaattttatcatacctgaggcagttttcctcattcgattagctggaaagctgaatttatcccgaggcaaaccagacatctagtatgggctaaattcaacaactggagcttaaatttggcttaatatatccccacttggatctgcctgtttaattctctttcatatgataacgttggtttattcatagtcttgacttgccacctgaacaaactgaacctcatatcttattctaagagaataaaactttgcaaaaaccaccaaagtttctgaatggaaatcaaatacaaagtgatgctcaaaaactgtttcaggacgtgagtacaaaaaaaaaaaaatagtgaagaggttttctctgagggagggctgctctttacgaatgtggatgtttcctatgctttgggagcagatggtctttagcaggataaggactaagacctccaagaccagccaaggcagctgcaattgtgtctcaagcttgaaattctgcatgctacctattttatcaaacaccgtatgtatttggccttattgttaaatctattttaaatacaactttatttgaggtttaggggcaaactaggaaattgcttcatcctatatccctttaaattctgtttcctggctcagaatatcccatcgatttccagccagaggccttatttttctttgattttccgtatattttaatgtagttttcactatcatctgatatgcagaagttgatacaatgtacgatctgtttcataaacccctttagtatagcattctgtcctcatttttatccctaagaattctagaatgcaaattgcaaatgtgtatacagagggaaaatggaagtgttctatgcccgtgatgtggtccctaacacagctcacagccccaaaatacaggcttcctgaaaatactcagattaccacttcacaacatcaaacatatcaaatgtttttccttctactcattgagctcaattacttcaattttgaatcaaattacactttttctagagacacattataggaaaagagctttgttatatttgaaattggttaggaatttaacaaggtgaggaactttaaaattgcttaagagtctaatagctgggggtattgatacatagaaagtgctcaatatatttttattgaattaatttgcatatgctttgtattcatgggcactgaatacaaattagccaattcaataataaatgcattggttgtcttttatgtgtgtggtgctatacctgtgtggtgtaggaaataagaaacataagtcagaatctctgccttctgagagaatgcaatctagcaggagaggcaaggcataaaccagtaaccggagaatccagaaaagcttgcctgggaagatgcaattgcaaatatgtggaagatgttccacagacaagcaagcaagaagactggcgtgtgaaacaaaacggattctcttattcgacaaatgtgaactgagctcctcctttgtccagacattatgctaggcctgggaaaggttataattaacaagagagacatatccctgtcctcataattgacagtgaaattaccatgtaatacccaatgccctgcatgatgggcaaatagagtgtgctgtagactcacagcagagaggacttcaaggaggcttcctggacgtaatgatatctgcgctgaggcccaggagattggtcaaaattatccaaataaaggttaggggaagaaagttccaggtactggccaggcacattcaagaaactgaaagaagttggtgggtggggtgaaataaaacgggatagataaacaggccagataaatgtgtttaatctttaacccagggtagtggggtgccattgaatgattttaagcagagggaactagaggacataattggattcacatttaaagttatcactcatgctgttgtgaggaaaatgcatttggaggcggggacaatattggaggaatcagttataaggaacagaggcgagttacggttgcagcaatggagaataaaggacagattcaagacgcaattagaaagcagaggcagcaactcggtgatggctggattggaaaagaagaggagagggaggagtcatgaatgaatctgggtctcaggcttgaaatcccaggtagatattgggtaacgggatggattcttagtccaatcattggtataagaaaagcaggagaaggagcaggtttagaaagccagacagattgagctacattttagacactgagtttgagatgtcccctggctatcaggtagagacatctagtaaatagtaaacagtcatatgtacagaaccaaataaagttatatgctgcagtcttccacatgggtcactgagtgagctggtgaaagcattgaacacactgaaataaaatgttcaacacatggaaaagtccaaaggatttgagaaaaacaagcaggcttggcactacaagccaaagcacccagccaaaaagtcctctttgaatccatttcccaagaaagtacaatctataatggagtttgtgcttttcacttgctgttataaaacaattctacacaaaataaaaataaagttggccatgaatttgatatggaagaatagcagcatgtcaaaggcaaaaaaaaaaaaaaagaagaagaaagaaaagaaaaaaagaaaaatgttggtttagggcaagaatttaaacaaaaaagcttattctcatatttcctgaggatctcctctgtgctgagcactggccaggcactaggaatacagctgcacataagaccaagtctctgcctacacggctttcattctagcattctagtgggggtgacgggcaattttgtttattgtttttttttttttgagacaagatctcactctgtttcccaggctggagtgcagtggcactatcttgcttcactgcagccccaacttcctgggatcaagtgattctcccacctcagcctcccaagtagctgagactataggcgcagaccatcacactcactaatttttgtatttttgtagagacagggtttctccatgttggccaggctggtcttgaactcctggggtcaagagatcctccagccttggcctgccaaagtgctgggattacaagcgtgagccactgcacccagcttggcagtttttaaaattagacaaatgtatgcataatgtaaggtcagtcatgaacaagcaataataagaacacatcatttagggatataagaaaacaggtgatattgtttggatccttgtccctgcccaaatctcatgtcgaactgtaatccccaatgctggaggtggggcctggtaggatgtctttggatcatggggtcatgatccaaaacaccaggtccctcagggcctggtgttgtcttggtgatagtgagttcttgccagatctggtaatttagaaatgtgtatcacctccctacacatactctctctctctggctcctgccttcaccatgtgatgtgcctgccccaccctcacccgccaccatgattttaatcttcttgagacctccccagaagctgagcagatgccaacaccatgcttcctgtaaagcctgcaggttcatgagccaattaaacctcttttctttataaattacccagtcttaggtatttctttatagcagtgcaagaacggcctagtggaaatacagaattctggattatgatcacctctggggcatcaggaattcgttcttgggaggaacacacagatagcctgaagggctctgaccatgttctggtcttcctgatgagtggtggattcataggtattcactatactatgtttaaaaactgacatatacattacatttaaaacattaattatagtaaaatatgcacaatgtaaaatttaccatcttaaccacttttccatagattttaatagacttttttttttttttttgagacagagtcttgctctgttgtccaggcttgagtgcagtggcatgatctcagctcactgcaacctccacctcgtgggttcaagtgattctcctgtctcagcctcctgagtagctgggattacaggtgccagccaccacacccggctaatttttgtatttttagaagagatggagtttctacatgttggccaggctggtcttaaactcctgacctcaagtgatccacccgccttggcctctcaaagtgctaggattacaggcatgagtcaccgcacctggccaactttattttttagagcagtttttttttttttttttttttttttttagacggagtcttactcttgtcacccaggctggagtgcaatggcacaatctcagctcactgcaacctccaactcccggattcaagtgattctcctgcctcagcctcccgagtagctgggattacaggcatgcaccaccacacccagctaatttttatatttttagtagagacagggtttcaccatgttgaccaggctggtctcaaactcctgacctcaggtgatctgcccgcctcggcctcccaaagtgctgggattacaggcgtgaaccaccgtgcccagccctggagtagttttaagttcaccacaaaattgagcaaaaggtacagagactccccacataacccctgccccgctactgtcagcattcccctaccagcacaagcctcccctactgtcagcattccacactggagtgaaacctttacaatgaatgccgctacattgacacatcctcatcacccaaagtccgctgttcacattaggtaggtagggctcgctgttgatgttgtacattctatggatttggacacacgtaatgacatgtatccaccattacagtatcatacagagtagtgtcactgccctagaagtcctctgtgctctgcccagtcatccctccttctaccaactactggcaaccacccatctttttattgtctccatagttttgtcttttccagaatgtcacacagttggaatcatacaatatagagccttttcaaagtggcttctttcatttaataatacacatttacgtttcctccatgtcttttcatgggccaacagctcgtttcattttagtgttgtgcaatatttcatggtctggatacaccacagtctaaccattcacatactaaaggacattttggttactttcaagtttgggcaattatgaataaagctgctataaacatccctatgcatgtttttgtgcagacatacattttcttcataaccatttaaacgtatacagttcagtagtgttaagttcatttgcattgttatacaaccaatatccaaaattcttatctgacaaactgaaactctatacccatcaaacaacaacctctgttcctcattcctgccaaccaccattctattttctgtgcctaacaaattcatttgacacaggtgcctctaggtgcctcttaaaagtggactcataagcgtttcctttttgtgactggcttatttcacttagcataatgtcttcagtgtgacagagaccagagtagcccaccattccctttgaacattggtattgtaccacaaaatcaagtggttttcaaacatttttgatccgtgggagctttttttctaaaccatgtatacaaaaaaagtcaaaagtggagaaattcttatttcttagccttggcacctgtacaatacaattggaaggggttggggtggggcttgtccagagaagtccccacaaaggtgccccataacactagactgtactcagtctccatcgtgagactattatttataatagtgatttgtggcatttaagatgtgaaatttccttcaaaatctcaaacattaagttgtgttacatgccaatttaaatgtcaaatgtatattatttcattcaaattatctgaaaaccattcattcgcatatcatgagaccctttagaaacggaactacttgactaaccagcacttcccattctccaactccagcaagtgacagaaacttgcaggcattgacacaataggggaaaaaaaactccaggactttaaaataatgagccctgcagggttcagattcctgctccgcccgagggaagtctcatggtagagcatacaaggactttagagtgagacaggcctggtcataaattcaagatcttcttactagcattaaaatcctagatgagcttctcaacccctttaagcctctgtttttccactgggaaaatgatattaataataacttccccataagattcttaagaggattaaatgagaaaacatatgttaaagacacttgtcacattaattggtgtttggtaaatgttatttcctccctcattcttactgactttgagatcctgggaaagccatttaatccctctgattcttaatttcatcatacctataacaccttctaggatagaatcctttacaatttagcttatcctgaatcccactcctaggccagttttctacatactctcactaactcctgggatttcacccatcacccatcagctgtacactgataagtcccaaatctatacctccagcccaagcctttctcttgaggtctagacctttatgtctggccatttcctggacatcttcacccaatattccatgtgccccttaaattcaacatggccatacctagactccttaaatattgcttctcaaatctgctgctcctcttggtgacagccaccaccttcttcccttaacagacacctggaagccatccaggaccctcactctttctctctgtctctcctattttttattaacccaaggccagcaaaccctgttgcatcaaccatcttgatgcctttcaagtccctccccacctccttggccgccgtatttctcatctgtgttcctgcagcaggatcctggctggtctccctccatgagcctgctctcccctcaccctcctgcacacactagtcccttctacacacttctggcagaatgctttctttaaatcagaaagctgaccatttccctctttcctaaaaccattcagtgtttctgccttgcttttggaacaaaatccagaccatctgacatgcagcactcttcacagtcttaaaccttagggcccatcttcatcttgcccacctattccttctccacaaaggctgagctgtttaacagtgtaccaaagacctctctgttctttccttctctagggtttgtatatagaccactgtctgctaggatgtgcgttctcttccacgcgttgctcagctcattctaactcatctttcaaaactcctcaggtgtcaccttccccagggacccctcttttctcttgaaccctgtgttagctgcccatcctgtaagggcactgcttatctgtatcacattaattgagctactgtacacagagactgtgccttttatttccatatctccaacacccagaccagagctgttaagactgaatgaataaatgaatgaatgaatgaatgaatgtgtatacattgtgtatacacgaaggtatgaaataataaataaagcatgttaagaatgttttgtaaactacaaagcaccaatcagttgtaagggcctgttatttctgtgtacatatatagtatatacactttatatctactttttttttttttttttaagagacagggtctcactctgttgcccaggctggagtgcagtggcacaattacagcctactgtacttgaactcctgggctcaaatgatgctcctacttcagcctctcaagtagctgagactacaggcacacaccaccacatccagccaactttttatttttatttttagggggagacaagggtcttgctgtggtgcctaggctggtctcaaactcctgggctgaagcaatcctccatttttgtagacagctcctgccaagggcagcattttcttattattaatttgcctatgacagcacaaaattatacattctagttggtaaaaataactcttgggttagtgtgtgtgcatgtgtgtgtgtgtacacacctatattattctaagggacttatgggaatgaatttaaaatcttgagtttcagatattgctggaaactggagacagaatctcagtttaggtgtcagcaccaaaattatcctgccctcccctccccaatccctaaacagccctgatttctttttaaaagtgaactttgttcgtatgaaaagaacgaacatgttctgcaacttccagaagttcttacaaaattagttatgcagattatccatatttagccctttaaaaaataattttgaacattagctccttacagaaaatctattttctttctccttttctagaggaaagggccttctgagggcaaatcgtgtgacagtttatagattgtcatctctctaaagacctcaaggaaaagaagtattttctatgtgcaaaacggtacctcttttttccacctttatgtcctttaaaagattagataaaccagctcgcacctgtaattaatcccagataactcccagttactgggaccgggagtagctgaggccagaggatcgctcaagcccaggagttcaaggctacagtgagctacgatgtcaccactgcttttctgcctgggtgacagaacgagactctgtccctatttattaaaaaaaaatcagacaataatattagtaatttttaaaaaataaaaaatatttaaaatctttaaaaagacaaaaaagactaaggaattttttcccacttttgaaaaattaacaaagataattaccttatcagcaaaagtcaacacactccatgtgagcctcacagcccccagccccctggctcagcagaggacccatttctgaaaaagtgtgttgaatgacaaggtttataggctgcaccattatggcagctaccagggaggcagagaagagtatcttcctcttcagagagagcctgaatgttgtgtgtgactgaaaagtcagtactataatatattcaagaagacctaagggtttactttccaataaggatggaaaaaatctgagcaccccactgtgagcttatcgtaatgctgcttcatataaaaagttggtaattagtccctgagtgaataaagtagaatagatgataacagattgatactaagagaagcacaaaatgctcttgccagtcatcaaaatttaaaggctatagagaaagggttggggatgcctctgtctgtttacatactatttccaactcagaatttgtaatgatagggtttattaactggtgtttttaaattgtatgaaaatgaagcttatataaatttcaaaggaacgcacagagtgccaaatgcaggagcctttgcaatccagcctaaaatgccacagaagaactggtggaaatttttatctcatatccatctcttttcctccagctgggggtcttttgctaaaatccagatgtgggacaatgctatttaatatgagaaccaaacagcaaatttcaaaaacatgtatttctgggaactccagaacatgtaatcatttgtctagattttgttttttttaatataatttaatatcaattcacttgtatatttctgttgttagagactcctgctatagatgagttcagactcccaagttgccagctactatccattacttaatatggaataggatttgatttttattggagggacattccagagaaaatggaaatcaggacgatttcagtgtttacatttgggccatagctttgcattaaacatgcttcccctttccatccccaagttctgagaatttaaatttctatttataagggattcatgttttaattttcatgaaaaagtatgcattttcatcaaaactaattccatgagtaccgaggaaacacacttaagtttctaaactcttcctaaaaagtaaatacaagtgaaccacataaatgagtgaaaattccaggtcttctgggaggtgttatcatttgtattttggcacttaatctcttccattgcttttaggtccttgtgaactatctgtgaactacctcaattacagtggaaaatccagggtctacctgtctgtcaggtccagtccgcagcatcccagggactgattccaatccaaatgagaacataagcacgtttcccttaacacaaaactgaccagtgaaaatcctcatttgcaaaacatataaattagaacttgattattcagatcacaaaaggattcatcacaggactttttgaatagaaaagactattacatgtaaagtacagtattttatttcagggagagatccattacatatatgccaaatttttgaaaatcagtttctagttagaaaaaggaaggaaattggcttgtgaaataatttaacaggtcaaattcacaattgtatcaatcttggacaaatgcaccaataatgtgaagcaaggagttaccggtgtattccctggggatggctgaactaaagcatatcccttatccccaggagcttacggtctgcatagggaaacagacagttaaatagacagaagccagcatcaaggcaaggcagcagagcaatgatcctggaatggcatggtcagtaaatgagaggaattcactcagaacttcttcaggatcattgccatgtgtatagatgtagaaacaaaatagacattcggcaagtaagaatctttgggacaattagcagcatatgttttattatttcatgataacattcatcaaaatagcttaatgggataattaatccaggcatgtggattcaattctgatcagctttagcaaaaaatagtatatttagccaaaatatgagacacctatatattttcctgccagaaggaaaattgcacatatttcccaagttttgggggaaaagggtgtcagtttggaccagtattcatagaaattaaccatcgaggctggacgcagtagctcacgcctgtaatcccagcactttgggaggccaaggtgggtggatcactggaagtcaggaatttgagaccaccctagtcaacatggtgaaaccccgtctctactaaaaatataaaaattagctgggtgtggtgacacaagtctgtaaccccagctactcaggaggctgaggcaggaggattgcttgaactcaggaggtggaggttgcagtgagccgagatcgcaccactgcactacagcctggcaacagagcaagactctgtctcaaaataaaaaaaagaaagaagttaaccattgaatgctgagctgaagactctaaattatcattctataatagtaagtggataaaccaaaacttatgatctagcctttgttttatgtttgttggtagttttctttctttttgtttttccttaacagagcagcatagtttatcacagaatgttaaaactggttctcaaagaaatacaattatcaaaaaaggaaagtttcaaacaactttctaaaaagggtattcttcatttttcttacattttacattcattctatgcaaatttctacatcctctctattaatctctgactgttactagctttgcttgctggtgagagtatttttcactgtagcgtaaaataatactgcatttcaaatttttaatagtcatgttttaatcactataatgcaaaacaaatgtagatttttctatcatgtaccaaggtaggacatattgaaggtatttctgattgtttatattttgcaattttgaaccaagtatgactctggatacatagtcatacttataaatatttttaagtaacttaaaatcatttttaaaatatattaaataagacaggtggaatatgctttactaactgtaaagtgccgcatgggtaaaatgtccagagcacaccaatgtggttgccaatttaaatgccaccggaagactcagagctccttattgtgtagtatttatgtttgtacaactcatcaatgaataatcaactatgtttgagtctgccatctcactttgaaagagatgtggtaccaactcactacataactatttcagtactaattcctcactgtttttaatttgggtcagagacttggggatggaaaggggaagcatgtttaatgcaaagctatggcccaaatgtaaacactgaaatcgtcctgaacacacttcaacagtgaatgtatgacagcccagtgtaaagccatttagaaataacaagatggacatgtacacatatgtaggttaagttcaacagtatataatgcccaaaacagtatatagtgggtatgaattacttgaaccgagtttagtatctttatccttttagtcatagtactgtgtggttttctccatattctctttcttatttatttttgtccaattagaaaataaagcagggcagggtggctgcatctgtttactttctgagcatgggtgtatgtaaacacacacacgtatctgtctattttttccagaggcttctatgtacacatcatataaaagtcatactgttaacataaatcaaccccagaagagaaattccagcataccattttcccttgcctattgtctgtgtgtgtgtttgtatgtcagtctgtctttttttattctggctttctctcttattcagtatttataaggacctttagggcagatgtctaaaaacaactgcatagtcatcaggagttaggtggaatgaaatgcctttgctcatcttctctacatgagtgaccagaagaaaaaaaagaaacacagagtatcagactttagaaactacatgcaggttaaagggcactgaccatcctggcttgtgttctgcctaaaggacaaggctctcatttgataaagatcattagtcaccaagatatatattttagagagttcccagtagcgaatattctgttggcagtcactggagtgtaccagatggttcattagcataggctagacaagtcaaagactttcagaatcatttagaaaatgtcaaacagaaacaagaatcctgtcactttttattagaattaactacatcataccctggacacagatttcaccttgggtcagaaaaattaatacagaattatatgaattgtgtaatatactgggttaagataggtctttctccagggactcatttgctggcaatatattaagatccctctactttaggaatcctcaatcctttccttttgtaagatatgaaaagagttgaccttgctcaaaatccactggtgtctaattgatttgaggtatatgcagaatttcaacaagacattcttctaaagctcttttgtgatccttttcccaggaagtttggtgagtggggtttactgaatattcagcagcatgtaaagtatgtttatgtcaaaaggaaaatacatccattaattgaacacattgctttagtaaacaggaattgaaatgctattgaaatgttgctttttttttttttttaatgcagatgtcaaaaaccttgaaaacttccagctggtagaaggtgtccaggaacaagtcaatgccgccctgctggactacacaatgtgtaactacccgcagcagacagagaaatttggacagctacttcttcgactacccgaaatccgggccatcagtatgcaggctgaagaatacctctactacaagcacctgaacggggatgtgccctataataaccttctcattgaaatgttgcatgccaaaagagcataagttacaacccctaggagctctgctttcaaaacaaaaagagattgggggagtggggagggggaagaagaacaggaagaaaaaaagtactctgaactgctccaagtaacgctaattaaaaacttgctttaaagatattgaatttaaaaaggcataataatcaaatacttaatagcaaataaatgatgtatcagggtatttgtattgcaaactgtgaatcaaaggcttcacagccccagaggattccatataaaagacattgtaatggagtggattgaactcacagatggataccaacacggtcagaagaaaaacggacagaacggttcttgtatatttaaactgatctccactatgaagaaatttaggaactaatcttattaattaggcttatacagcgggggatttgagcttacaggattcctccatggtaaagctgaactgaaacaattctcaagaatgcatcagctgtacctacaatagcccctccctcttcctttgaaggcccgagcacctctgccctgtggtcaccgaatctgtactaaggacctgtgttcagccacacccagtggtagctccaccaaatcatgaacagcctaattttgagtgtctgtgtcttagacctgcaaacagctaataggaaattctattaatatgttagcttgccattttaaatatgttctgagggttgttttgtctcgtgttcatgatgttaagaaaatgcaggcagtatccctcatcttatgtaagtgtgaattaatattaagggaaatgactacaaactttcaaagcaaatgctccatagctaaagcaacttagaccttatttctgctactgttgctgaaatgtggctttggcattgttggatttcataaaaaatttctggcaggaagtcttgttagtatacatcagtctttttcatcatccaagtttgtagttcatttaaaaatacaacattaaacacattttgctaggatgtcaaatagtcacagttctaagtagttggaaacaaaattgacgcatgttaatctatgcaaagagaaaggaaaggatgaggtgatgtattgactcaaggttcattcttgctgcaattgaacatcctcaagagttgggatggaaatggtgatttttacatgtgtcctggaaagatattaaagtaattcaaatcttccccaaaggggaaaggaagagagtgatactgacctttttaagtcatagaccaaagtctgctgtagaacaaatatgggaggacaaagaatcgcaaattcttcaaatgactattatcagtattattaacatgcgatgccacaggtatgaaagtcttgccttatttcacaattttaaaaggtagctgtgcagatgtggatcaacatttgtttaaaataaagtattaatactttaaagtcaaataagatatagtgtttacattctttaggtcctgaggggcagggggatctgtgatataacaaaatagcaaaagcggtaatttccttaatgttatttttctgattggtaattatttttaacagtacttaattattctatgtcgtgagacactaaaatcaaaaacgggaatctcatttagactttaatttttttgagattatcggcggcacaatcactttgtagaaactgtaaaaaataaaagtatctcctagtcccttaattttttcataaatatttctggcttttgagtagtgtatttatattgtatatcatactttcaactgtagacaattatgatgctaatttattgtttcttggtttcacctttgtataagatatagccaagactgaagaaaccaaatatatgtgtttactgtagcatgtcttcaaattagtggaacttagttcagggacatagaagagtcttaatgaattaaaatcattcacttgattaaatgtctgtaaatcttcatcattcctactgtagtttatttaatatctattgtaaattatgtgacttgtagcttcctctggttttcaagtaaactcaacaaggtggagtcttacctggttttcctttccaagcattgtaaattgtataccaaagatattagttattacttctgtgtgtacaaagaggattattttattatgtttattaatcacctctaatactcatccacatgaagggtacacattaggtaagctgggcgttgactcatgcacaatctcagtcacccgtgttatcttcatggctcaaaggacaatgcaaaatcgccgatcagagctcatacccaaagcattacagagaacagcagcatcattgccctccccagctgaaaaacaagttggctagaagatacatggagaggaatggtgttgtcaacagttaatgaaacggttctatcatgcatgtgtaatgtggatggagacaattataagatttgactataactatttggagggtctttaacattgccaaaaaaacaaatatgttgatttttattttattttattttttattttaagaggcgggatcttgatctcacatgttgcccaggctggccttgaactcctgggctcaagcattcctcctgcctcagcctcccccgtagctgggactaggggtgcatgccagcatacctggctacgttgactcttaaaatctatgttctcttattttaaagatacagtgctccccactgaaaattaaacctaaaaaatgtcacatattggtatgttgttaacctggtagattaaatcatgagaatgattagaaagacgggcaacacagcgggttacatccacactgctgatcacaccaacgacaggagctgataagcaagaaagcgtcacagccagcgtctgttcacccaaggttgacaagtgaagtttctctaatgttgattgttagccgatttgtaacctggcatttacttagcaactgccttatcaattacaggatttgccggtaaaagcagactcaaatataaaggtttttggcttaacttggtttattatagttgctctatgtttgtaaacagacaatctctaatgtctgattatttgtatcacagatctgcagctgccttggacttgaatccatgcaatgtttagagtgtgaagtcagttacttgttgatgttttcttactgtatcaatgaaatacatattgtcatgtcagttcttgccaggaacttctcaacaaaatggattttttttttcagtatttcaataaatattgatatgcccagcctgataatttttaaaagtttttatgttgtcctcattctatcggatactaaagcttctaaataagagacttgactaggagtgaaatcaaaagaatcccacaggaatagatacttttccctttagataacttctagagtggttggctgtccttccacggatacctgaagcattaaattcaatctgagcatcatctctacatgtgaaacaaagtattttatatcatttactgttataatcaataagcagaaaaatcttaatagcatctcacttttttgtagagcttatgttgtcctgataactttcccaagtgctttcttaattcacttggtcctcagaacagatccaggaggtattattattctcatattaaagccccttgcacaaaaggattcgatacactagtcagaggagtagcgggaatttgaacctaggcagtttgactccagaatcaacactcttaaacactacaccattctgtctctagaccaggaggacacttcagatttgcttcaaaaggcaaagataggccgggcacggtggctcacgcctgtaatcccagcactttgggaggccgaggcgggcagatcacctgaggttgggagttcaagaccagcctgaccaacatggagaaacctcgtctctactaaaaatacaaaattaaccgggcatggtggcacatgcctgtagtttcagctatttgggaggctgaggcaggagaatcccttgaactcgggaggcagaggttgcggtgagctgagatcgcgccattgcactccagcctggacaacaagagcaaaactcagtcaaaaaaaaaaaaaggcaaagatattggagaaaatcagacatcaggtcacctcaaagtatatagatatttatcaataacccaaacataaagcctttatactttatggatgttaagcctaaaaagtaagatgcccatgttctagaaattagcctccttcagtaccattgtggctttgcagatgtttaaggcaataaaataactatgaaatccattttcaaaattaataaaacctctattacaaaatagtgtaagagccacaaaacacttaacaatgtttaggaaacattacggtccagcctcccacttcacactccacccttcccatccctactctgggccaagataagcaggaagtgctcattctttcccaagcagatgccaatttttcttaggatcctacaaaaagataccatggagtccaacccaaaatactgcacttagagtccagtgagtatgaaacttaaacttattttatttttatttttatttttgcccaggctggagtgcagtggcacgatctcagttcatcaacctctgcctccaaagctcaagaaattctcccacctccacctcccgagtagctggaaccacaggcatgcaccaccacactcagctaattttttattttttgtagagatgaggtcttcttatattgcccaggttggtctcgaactcctgggctcaagtgatccttctgccttggcctcccaaagtgctgggatgacaggcatgagccactgtccctggccaaaactaagatttttaagcaactaaatagcgggctacaaaacgcatcccccttttcaacctgtaactagaaagaactttttaaattattcttgctgacattccatgaaatatgaaaatacatattcatatttaaatgaactataattatacagaacagtgtagaatttgataaatatttacatatgtatacatccaggtaatcatcacacaggtcaagcaagataaagcacatggattttaaaaaatgtttttataagcggttatatactttaaaaaaaaaaaattggtggagagagcgtttctccaaagcccaacctggcaattggcagggctcattctgatgagtgcagaggcctcccttccacgcacggagatgctaaatccatcagcatgaggcagcctctaagaaaaaccggcccatgctgatatgcatttgattgttatatctgatattcaaaataactttgaagaggttcgtacttttaactaagtttgacgttcagtttgaagccatctctgatgtatatttttatgagaaacatgtggaaagtttgttcaacataacgcaggtcaaaatgctacaatacttagtgattttgacatttccctggaataataaagaccaattttccttaacactgaacaggaagtgtatagtttagtcactcaaaataaatattcttgcaatgctttattgctgtttcatgtaggcatttgttttatgttaagttaggaattaataattcagtgactaacagactgtgattgtggttttgtttgtagaaaagctaagaaccaatctaagaaacattgtatgtttgttgctggaaaagagagaaaggggcaaagggggatgaaattagactaattgctgagtattcccttgagtgagtttgaaactaaactatcaagaagggaggaggcttgaaagcactggagtctccatgcccttcctgagttgatgggagcacagatcagacctgagtcggccccagaaggcactggggatcctggtccaagctccatagacaccagatcagatcccagactgttcttaggatcatgttagtcacagccaaggagagacaggagttgtccttccaaggagacaaggtgtggatgcctgattcgtgtctaacttttactttgcagagcacgcccactctctcgtctcacctgacccagcagcagccccctgtcctcggtgggcttgggcaccctacccctcagagtgtgaagcccagcccagggagctatgcgtgggctggggcctctcagtactttagtaacaggaattgaagtccctcccgctcccctgccaccatggacatctcccgcacggaagccgtcacaggctgttcttcctcacctctccttcttcccacatggcctcagtatccaagccctaccagttacttttcctatttttctccccagtcagtctcccccttccttccttgcagatttggagcaggcctttggcatttcttgccttgaattatgcactagcctctgggctgatctgctatcaatctgaacataccccaaacctcactccatagagcacccagagccatctccctaattcaaagctgataatgtcattcgctcacttacagtcctccaatgcctggtattttcaggaaaaagtcaactcctactatggcatccaggtctttcctggcacagcctctgcctaccttcccagcctctgcctgcctcccagcctccccttccagcctcctttccaggcccactggtgtatcaaccacaccatgagcacagcctgctccttcctgttcactgttctccaatggtctagccaaaaaaaaccaggcttagagaagccaaggcaaggaggctgcccctccccatccagtacacccccatctctggggcccccagatgtctgatgttcattatgctctggtctcattgtgtttgtttcccagggtggcccttctaaactgtgagcgaaaggtcaagagcagtgactcagtcatttataaaccactggcccagtgcctggcatagagcaggcacggcacatgatttccacaaaagaatcgaagtttcccgagttgtggaccatactgctccccagtggtctccttgacttgaccatgtacatcttcatggggcccagactgggataatccagtgtccatccaatatgctcttctatctcaccctgtatcacaaacatattttatgtttgcttcaggggtgattcacatgtgtgactgcatgtcagctcccactctaagtatgttgttcatccaaaaactagacagtgaaagtggcatcacgccattcatatgaaatgtttagcgtcattacacaacatcagaagaaagagctgcgaaggggattagaactgtgctttgtggctcagagagtagaaacccgtaaggtaggtaaatattttgaaggggaagattttgacacaatgtggaaaaagaaagcttaatggtcaaagctgtccaaaaatggaactaactatattagaggctggtgacctcctaggaactgctccacctgaggctggacctgacaacagtgttggggatgtgactcctacatggagtggctgggtaatgtttaatgaccctccagaactgacagtctaagattccagcagggccaacaaaacagacaggtctaaaccttcaggaaggtcctctttgctcacttctccccgcagggaagatttgcttgtgctattagagtctgctagaatggcgagatactgagaggcacaatccaaccaactccagagacctaagtatataagggagaaattcatgaagcttgttttagtatttatttatgatgcatgagaaaaatcacagcctgccaaacatgttagaccaattcatgtttacaaacaggaaagagttagcattctgaaaatgtgtctaccttttggaaaaattgtattcctgtctttgcctctgcttctccagtatctgatatgtagtgggaagaagctcatggtcaaggtgctggttcccacatgcatatacctcctctgtgtgagggtcaaaaacattctctggttagatgatgtcacctaggaacattgctggtgcttgtcctcccagcccttcctcacagctcaccccaccatctgatgaaagacagccaattgaaaaagttgcactgggctgggcgcggtggctcatgcctgtaatcctagcactttgggaggctgaggagggtggattacctagggtcaagagtttgagaccagcctgaccaatatggtgaaacctcgtctatactaaaaatacaaaaattaaccaggcatggtggcatgcacctgtagtcccagctactggagaggctgagacaggagaattgctcgaacccagcaggcagagactgcagtgagccgagatcgcgccactgcactccagcctgggcaacagtgcaagactccatctcaaaaaaaaaaaaaaaaagaaaagaaaagaaaaagttgcactggagaaacccagaacatccataaaaatgtcttaatatttttattaattttatttgtattaattagttgaataaaaacaatgtatcccatatccaatatttctcacttgagaaatattaattgttccaggcaatgatctagttgaggaaatgacccaaagaacacatactagagagatttcatgaaaataatagcatctatgtttaagcactacgtgctgagttttgagtgcgatatgctatggcagacagttatctccccaaaatgtatcctctctttttttcctggacacacagctgcccagctgaagactatattttccggcttcctttgtagtgaggcacgaccaagtgagtaagatggggctgtggcaatgggatgtgagctgaagtgacaagcataccttttcagtcttctccatcggtaaaagcgagtcactttccttagtcgttggcgcctagccctttccctggctggacccgaggtgcagacagcaatccaagatgaccagtgattgaagagcaacaagaaagctgtaaccttgggtccctgaatggcctggtagtgtccacagaccagcctcaagtgacagagaaataaactgctctcttatttaagccactatatcttggggtctctttatttccaaagcttagcatttaccttaatatgcaaacatgatttcatttaatcctcataacgaccccttcttgtgactatgaaaactgaaacttacagacgtacataacttgttcaaagtcctgcagttagaaagtgacagagtgagggttcaaaaacagttctgattctaaacctcaggagttcggaacctgaaccacttagctacagtgtcttcctgaaagcacacaccaaggtgtcctgtagagtcaacattcactccaacaactgagcattttctttaggacctaaaagaagcaggctgggcatggtggttcatgcctgtaatcccagaactttgggaggctgaggtgggcagattacctgaggtcaggagttcgagaccagcctggccaacatggcaaaaccccatctctactaaaaacacaaaaattagccaggtgtggtggcacatgcctataatcccagacacttgggagactaaggcaggagaatcacttgaacccaggaggcggaggttgcagtgagccaagatcacaccactgcactccaccctgggcaacagagtgagactctgtctcaaaaaaataataataacaaattaaaaagaaaagaagcaatagtgacagatacatttctaataattgcaacaccaaataactagaaattttcttgaccttaacaagagcctagacaagcacagttataaccacagacatccaaaacaagggtcagctgctcagtgccgtgggagcattgacaacacagacattctatgagtcttacataaatgagaattttgaggtggtgacctttattttctataccacctcaacgggaaacattggcataaccaccacttattagccctgactatgttgtaactataagagctatactaatttttataccttggtttgattagtagtttccctgtttattttatcacaaaatcacttgagccatgttctctatacattaattattacagactacacaaatagaaagcaattatgttagaagagaaaacatgttgtgtcgatcatttctgctcacattactttgccatcagtgcagttagcaaggtactggctgtttaaaaaaattttgtcccaaagattttccccagaagtaaattaagactgccaaaaggtctctgccatagaggtggaacaagcttctataaataagtgtggaaacacgtgttacattccccctgagtgttgctgtaacaggctttatttcgcctctgctcttgccttggggccttgtgttatttgagtgtcaaatgttcctgcaactattgtgtggcctggattccagccaagctccttgggcaatgcccgatcagtgctcactcatcctctctacttcccttaaagaagtcttaaagtggcacaaccacctggggagagagagaaagcctgtcatctctcgctctcttttttttttgttttgagacaaggtctttctctgttgctcagactggagtgcaatagcatgatcatggctcactgcagacttgacctcccaggctcaagtaattctcccacctttgccccctgaatagatgggaccacaggtgtgcaccaccatgcacagctaacattttgttttgttttgttttctgtagagacagggtctccctgtgttgcccaggctggtctcaacctcctgtgctcaagagatcctcccacctcagtctcccaaagtgcaaggattacaggcatgtaatggattaatgcagaatctaggaaacaaaacatagaagagatggattgttaaactccatctctcccttttcgtttcatcatctgattttggggaagaacctgcctttcctcaacctaccagtaaaagaaaaggcaataaaacacaccattatcatgggtttatttcacatctttaaaaataatcatcttggctaaactaagcaaaaaataaaagtggcatgacagtggtttctgctttttgtgcttcttttctgtttttgctttgtttcattttaatgtaaaggaaactcaaatgaggagcttgtttgtcttcaacactaacattcaggctctttatccagccatatttgtgcctgaagtgttattagccaaagataattttacagaaggtacaagatttaaatgtggatgctgcttacaaaggcataaaaggctgaataacagatgactgctgggacatgagaagtgagaatcaaaaagccaaggaagggccacccacagatagagaaaagaagacacggcaggggacgggggtgggagcgggtggagccaagatagccgaataggaacagctccagtctacagctcccagcatgagcaatgcagaagacgggggatttctgcatttccaactgaggtaccaggttcatctcactggggagtgcctgacagtgggtgcaggacagtgggtgcagcacaccgtgcgtgagccgaagcagggtgaggcattgcctcacctgagaagctcaaggggtcagggaattccctttcctagtcaaagaaaggggtgacagatggcacctggaaaatcgggtcactcccaccctaatactgcgctcttccaacaggcttaacaaacggcacaccaggagattatatcccacacatggctcggagggtcctacacccacggagccttgctcattgctagcacagcagtctgagatcaaactgcaaggtggcagcaagactgggggaggggtgtctgccattgctcaggcttgagtaggtaaacaaagcagctgggaagctctaactgggtggagcccaccacagctcaaggaggcctgcctgcctctgtaggctccacctctgggggaagggcacagacaaacaaaagacagcaataacctctacagacttaaatgtccctgtctgacagctttgaagagagtagtgcttctcccagcatgcagcttgagatctgagaacgggcagactgcctcctcaagtgggtccctgactcccgagtagcctaaatgggaggcaccccccagtaggggcagactgacacctcacacggccaggtaatcctctgagacaaaacttccagaggaacgatcaggcagcggcatttgcagctcaccgatatacgctgttctgcagccaccgctgctgatacccaggcaaacagggtcgggagtggacctccagtaaactccaacagacctgcagctgagggtcctgactgttagaaggaaaactaacaaacagaaaggacatccacaccaaaaacccatctgtacgtcaccatcatcaaagaccaaaggtagataaaaccacaaagatggtgaaaaaacagagcagaaaaaccggaaactctaaaaatcagagcgcctctcctcctccaaaggaatgcagctcctcaccagcaatggaacaaagctggacagagaatgactttaatgagttgagagaagaaggcttcagaagatcaaactactccaagctaaaggaggaagttcaaaccaatggcaaagaagttaaaaactttgaaaaaaaattagatgaatgggtaactagaataatcaatgcagagaagtccttaaaggacctgatggagctgaaaaccatggcacaaaaactacatgacaaatgcacaagcctcagtaaccgatgcaatcaactggaagaaagggtatcagcgatggaagacgaaatgaatgaaatgaaggaagaagggaagtttagagaaaaaagaataaaaagaaacgaacaaagcctccaagaaatatgggactatgtgaagagaccaaatctatgtctcattggtgtacctgaaagtgacggggaggatggaaccaagttggaaaacactctgcaggatattatccaggagaacttccccaatctagcaaggcaggccaacattcaaattcaggaaataccaagaacgccacaaaggtactcctcgagaagagcaactccaagacacataattgtcagattcaccaaagttgaaatgaaggaaaaaatgttaagggcagccagagagaaaggtcgggttacccacaaagggaagcccatcagactaacagctgatctctcagcaggaactcaacaagccagaagagagtgggggccaatattcaacattcttaaagaaaagaattttcaacccagaatttcatatccagccaaactaagcttcataagtgaaggagaaataaaatactttacagacaagcaaatgctgagagattgtgttaccaccaggcctgccctaaaagcgctcttgaaggaagcactaaacatggaaaggaacagccagtaccagccactgcaaaaacacaccaaattgtaaagaccatcaaggctaggaagaaactgcatcaactaatgagcaaaatgaccagctaacatcataatgacaggatcaaattcacacataacaatactaaccttaaatgtaaatgggctaaatgctccaattaaaaggcacagactggcaaactggataaagagtcaagacccatcagtgtgctatattcaggaaacccatctcacgtgcaaagacacaaataggctcaaaataaagggatgcaggaagatataccaagcaaatggaaaacaaaaaaaggcaggggttgcaatcctagtttctgataaaacagactttaaaccaacaaagatcaaaagagacaaagaaggccattacataatagtaaagggatcaattcaacaaggagaactaactatcctaaatatatatgcacccaatacaggagcacccagattcataaagcaagtccttagtgacctacaaagagacttagactcccacacaataataatgggagactttaacaccccactgtcaacattagacagatcaatgagacagaaagttaacaaggctatccaggaattgaaatcagctctgcaccaagcagacctaatagacatctacagaactctccaccccaaatcaacagaatatacattcttttcagcaccacaccacacctattccaaaattgaccacatagttggaagtaaagcactcctcagcaaatgtaaaagaacagaaattataacaaactgtctctcagaccacagtgcaatcaaactagaactcaggattaagaaactcactcaaaactgctcaactacatggaaactgaacaacctgctcctgaatgactactgggtacataacgaaatgaaggctgaaatacagatgttctttgaaaccaatgagaacaaagacacaacataccagaatctctgggacacattcaaagcagggtgtagagggaaatttatagcactaaatgcccacaagagaaagcaggaaagatctaaaattgacaccctaacatcacaattaaaagaactagagaagcaagaacaaacacattcaaaagctagcagaaggcaagaataactaagatcagagcagaactgaaggagatagagacacaaaaaacccttcaaaaaatcaacgaatccaggagctggttttttgaaaagatcaacaaaatcgacagaccgctagcaagactaataaagaagaaaagagagaagaatcaaagagactcaataaaaaatgataaaggggatatcaccaccgatcccaaaggaaatacaaactaccatcagagaatactataaacacctctatgcaaataaactagaaaatctagaagaaatggataaattcctcaacacatacactctcccaagactaaaccaggaagaaattgaatctctgaatagaccaataacaggctctgaaattgaggcaataattaatagcttacccaccaaaaaaagtccaggaccagatggattcacagccgaattctaccagaggtacaaggaggaactggtaccattccttctgaaactattccaatcaatagaaaaagagggaatcctccctaactcattttatgaggccagcatcatcctgataccaaagcctggcagagacacaacaaaaaaaagagaattttagaccaatatccttgatgaacattgatgcaaaaatcttcaataaaatactggcaaaccgaatccagcaacacatcaaaaagtttatccaccgtgatcaagtgggcttcatccctgggatgcaaggctggttcaacatatgaaaatcaataaacgtaatccagcatataaacagaaccaaagacaaaaaccacctgattatctcaatagatgcagaaaaggcctttgacaaaattcaacaacgcttcatgctaaaaactctcaataaattaggtattgatgggacgtatctcaaaataataagagctatctatgacaaacccacagccaatatcatactgaatgggcaaaaactggaagcactctctttgaaaactggcacaagacagggatgccctctctcaccactcctattcaacatagtgttggaagttctggccagggcaatcaggcaggagaaggaaataaagggcattcaattaggaaaagaggaagtcaaattgtccctgtttgcagatgacatgattgtatacctagaaaaccccatagtctcagcccaaaatctccttaaactgataagcaacttcagcaaagtctcaggatacaaaatcaatgtacaaaaatcagaagcattcttatacaccaataacagaaaaacagagagccaaatcatgagtgaactcccattcacaattgcttcaaagagaataaaatacctaggaatccaacttacaagggatgtaaaggacctcttcaaggagaactacaaaccactgctcaatgaaataaaagaggatacaaacaaatggaagaacattccatgctcatgggtaggaaaaatcaatattgtgaaaatggccatactgcccaaggtaatttatagattcaatgccatccccatcaagctaccaatgactttcttcacagaattggaaaatactactttaaagttcatatggaaccaaaaaagagcccacattgccaagtcaatcctaagccaaaagaacaaagctggaggcatcatgctacctgacttcaaactatactacaaggctacagtaaccaaaacagcatggtactggtaccaaaacagagatatagaccaatggaacagaacagagccctcagaaataatgccacatatctaatattatctgatctttgacaaacctgacaaaaacaagcaatggggaaaggattccctatttaataaatggtgctgggaaaactggctagccatatgtagaaagttgaaactggatcccttccttacaccttatacaaaaataaattcaagatggattaaagacttaaatgttagacctaaaaccataaaaaccctagaagaaaacctaggcaataccattcaggacataggcatgggcaaggacttcatgtctaaaacaccaaaagcaatggcaacaaaagccaaaattgacaaatgggatctaattaaactaaagagcttctgcacagcaaaagaaaccaccatcagagtgaacaggcaacctacagaatgggagaaaatttttgcaacctactcatctgacaaagggctaatatccagcatctacaatgaactcaaacaaatttataagaaaaaaaacaaacaacctcatcaaaaagtgggcgaaggatatgaacagacgcttttcaaaagaagacatttatgcagccaaaaaacacatgaaaaaatgctcatcatcactggccatcagagaaatgcatatcaaaaccacaatgagataccacctcacacaagttagaatggcgatcattaaaaagtcaggaaacaacaggtgctggagaggatgtggagaaataggaatgcttttacactgttggtgggactataaactagttcaaccattgtggaagtcagtgtggcgattcctcagggatctagaactagaaataccatttgacccagccatcccattactgggtatgtacccaaaggattataaatcatgctgctataaagacacatgcacacgtatgtttattgaggcactattcacaatagcaaagacttggaaccaacccaaatgtccaacaatgatagactggattaagaaaatgtggcacatatacaccatggaatactatgcagccataaaaaatgatgagttcatgtcctttgtagggacatggatgaagctggaaaccatcattctcagcaaactatcgcaaggacaaaaaaccaaacaccgcatattctcactcataggtgggaattgaacaatgagaacacatggacacaggaaggggaacatcacataccagggactgttgtggggtgggggtggggggagggatagcattaggagatatacctaatgctaaacgacaagttaatgggtgcagcacaccaacatggcacatgcatacatatgtaacaaacctgcacgttgtgcacatgtaccctaaaacttaaagtataataaaaataaaaaataaaataaataaataaataaataaataaataaataaataagagaccagaagacaaggacatagaaggggcaagagaatgagctgaaagcatgcagggcttaaaaaaaaaaaaaatgaaagaaagaaacgtaatgatgaggctgcaacactgaaacaccctagccaggtgcggtggctcatgcctgtaatcccagcactttcggaggccacagcaagtggatcacctgaggtcaggagtttgagaccagcctggccaacatgatgaaaccctgtttctactaaaaacacaaaaattagccaggcatcgaggtgggtgcctgtaatcccaggtactcaggaggctgaggcaggagaatcacttgaacctgggaggtagaggttgcagtgagccaggatctgggccactgcactccagcctggatgacaaagtgaaactctaactcaaaaaaaaaaaaaaaaaaaaagagaaaaagaaaaaaacacctgtgagctaggattgaccggggacaataagaaatgtaatttttttcctaagattaaaactgtccttgtattaattacctcatcctgtggaaaactctgtgggtagataaggtatcagtgtgttgggagctgatattaaatgattacatatctttatatttaactcgactgaagcatcctcagaatgtttgtgtttattttcataaagtgcagttggagctttgcacttcagatccagatactattaactaccagagtcaaaggaaggggttttccatctacacttcgatttacaatccacagagatgtcaatgtcctgtgtttcaagcacagcagaaaactttcccaaatataatgtgacatgcaacaaagtctcagagcagaagcaaagatatgagagaggacctaaaacacaatggtaggggcgcactgttgtagtctcaagaaagggacttcaggcaggacgcggtgactcacacctgtaatcccagcactttgggaggccgagttgggcagatcacctgaagtcaggagttcaagaccagcttgaccaacatggagaaatcctgtctctactaaaaatacaaaattagccgggggtggtggcgcatgtctgtaatcccagctactccggaggctgaggcaggagaatcacttgaacccaggaggcagatattgtggtgagctgagaccatgccactgcactccagcctgggcaacaaaagcaaaactccatctcaaaaaaaaagaaaaagaaaaagaaagggacttcaggggaacgtgggactacaaacatttttatatgtttgaacacaattcattgtgattacgtaggaatagggaaagccaaaaactactaattttgttatcggttagtaaaatacccgttattaataacctgtttgcttctgagctctccaaacagaataaagccatgtgcccttccttctgtccgtccatcaggtgtttgggaatggaaaacagctccaatcatccatcccatcagtgcctacacgggggtgggatggtgggttgtggcatcagcagctcaggtggtcaaggcctccttcagcccttggttgggagtgtggaagatgggattgacagtggctttataaacatggaggaggggcatctgccacttatatatctgggaacaccccagagaaaccatccggctcccagggatggagggtgagaggaaggagagggcaacagggaaggctctcctcttcccctgccctccactgtgttaccagccatcctgaaatcagtttattatgccccccaaatcaagtaccctgcccattcccaggttgccaaatcctactctgtgtcttcgcttagacaatttcagatatctactgttcttggtcagaggaaagtaaacaggtatttacccatctatggtctggaaattaagacctggcccagatgcccaaaaacagtaatccttccttccctctctcacccctgagttctccctccttattttctaatgacttactttgctttcagagagagagagagacagagccaagcttacaaaatatgtcaccaatctcctagcataaataggatgcacatctcagtagtgtaatgtgtcagcacatgggaagaattaaaagggaattagaagtctactgaacgtcctctgtttcttccatcatgaagttttagggagccaggcactccaccagggatcctaaacctgctcccagctttaacttcttttaacttgatacctactcataatgatgctcaaaaaacatttctcagattgaatcaaatatttaagtgcttttatcctgttttaatgtgtatttgaaagcaaataatttgaaaagcagtattaatgatcttgtcaccgtgaaaaaggaagattcctttttcgtgtcacgatgaaaagatctgattcgtattaaaatcttcctctttacctttcttataactactttaaaagagaatgtaatcatttaaaattatatttttgctgataatttctgggccagtaaattcttgattatctaggataaagcagatatgacttgaaaaataattcttaaagccactaaggtccaacacatggaaacctccttttcattgtctatccgttcaccatgaaagtctatattgcttgaaagatagagtgagcaagagcctttgcacctagatccagacactattaccttcatcagccctggagattattacatcacagacagcatagttctttcttagttggacattttgtttggtcacttgttaatctgaaaatccaagtgagaaataccttatttcctcaaatctaagatgccaacaattgtaagacacaccattatcttatgcaccactgaaaaggaaacgtgtttctgatatcattgaaaggtatacgatatatcctgacttgaaggaagttaaacagtgagaaatgtgtcttaggagtggtgagatgaagcattacttccctggctacaggttcttcacagccacgttccggaagcccgaatgctcaggccatggcaggatcacggcaccaaccattccaaccatgactaacagaatctaaaattaccaatggatttcttagggtgtgtctatttatttccttattcgacagatatttctttgtacctagcatacatgttagacactgtcgtaccctaagggttcacagtctagagatgtatgactttggtttaggccagggatcagctaaccatggcccatgtgccaactccagcagacctgtttttgtaagctattgtaacaaaaccacacccgtatgtttaagtagtgcctgtgtctgcttttacagtacaatggcagcgttgtcaccacaaaaactacatgttacctgcaaagcctgaaatattttcgatctgaccttttacagaaaaagtttgctgatctttggtttaggttatagtttgggactatagttgggtcactttaaaaaccttcaatttaaaacaaatatcctatccattcaaagtggcacagactgtttaaaaacataaactgggctgggtgcggtggctcatgcctgtaatcccagcactttgggaggccaaggctcctgaggtacctcctcacctgaggtcaggagttcgagaccagcctggccaacaaggtgaaaccccatctctactaaaagtacaaaacttagccaggcatggtggcgggcacctgtaatcccagctactgggaaggctgaggcaggagaatcacttgaacacgggaggcggaggttgtattgagccaagatcgtaccactgcacttcagcctagaagacaagagcaagactccatctcaaaaataaaataaaaaggtaaactaggcaggaaagagaataaacaaggaggataggacacacagagactgagcactagggattatttaagaccttttctttctttccctttgcctctaacatatagtcttctgagtattatatgacatcgataaggacagaaagatctgttaacctgacaatattgcaatttattagcaactccggtattcaggtttacaaagaaagaattgaacacttgtaggtaacatctgatgtagtgacaatggacttgagccattctccactaatcttcatcagtgacatcctctcaacaccgaccctctgtgctgtcattcatggctttattcaaccaatatttattaagcaattactatatgcaaggctgttctgggcactggggataaaacagtgaataagaaaaatcccctactttacggagtttgaattttagtggaaagatacaaaaatagataaaataactaagtactgtatcagatgatggtgataactgccatgataaaatataaagcaggatcaagcgataaaaagtgacagtggagggttaggtgaaaggggtggcaggagaccagggaaggactctctgccatttgagggaaacctgaagaaggaggaaataggccattaggatatctggaacgctttctggcagtggaatgaatccatgcaaaggccttgaggcagaagcattgctggccaggcttgagaaacgtccaggaagcctgtgtgcaagcacaaaagagaaagacagtaaggcgggggccaggcgcagtggctcatgcctataatctcggcactttgggaggccaaggcgggcagatcacctgaggtcaggagttcaagaccagcctgcccaacatggtgaaacccgtctctattaaaaatacaaaaattagctgggtgtggtggagggtgcctgtaactccagctactcgggggtctgaggcaggagaatcacttgaacccaggaggcagaagttgcagtgacccgagatcacactactgcactccagcctgggcgacaaagcaagactctaacttggaaaaaggaaggaaggaaggaaggaaggaaaacaaggggaaagaagagaataaagttggagggggttggaggccaggccatggaagactttgtagtcttcagcaagggcctcagtgtcctttagtgtaagaggggaagccattggatggttttgggcagaggagggcatgatctggcaactgagtggggaagagactgtcgggaagtcgggtggaaggaggaaaacaagaggaggctagtgtaataattcaggcaagagataaaggtggcttggtgtagagtgatcatgagaaaaatagaaaaaagcagtcacattctgggtacattccaaaggtaatgcctagaggatctgctaatgaatcagatgtagagtctcacagtaaaagaggtgaggaagttaactcattctttgttacgggcaattgacatttgctcatttctatataagatgtggataaattcatgtttagaaaaattgtatatgaacttggtaacataatctaagcaaaaatgcatgcttgtcatacagattcaacttcaaggccaattgttcaacctgctcttccaaacacatggccttccctaagccccttcctctatgaggaaattctggagatcctagaaattctgggaattttgttattaggcatacttcactcatcctcgcgggctttatgtcacttttatgagcaaaaatttcctgtatctgcagtagtatcaaatgtaaatgacaatttgtatttttcattacaaattactcctaaaattagcatactagagttttaataaacttttaaaattgccttagactactttaatattcagaaaaggcattaaaaatcgaatgactaggtcggtcgctgtggtgcacgcctgtaatcccagcaccttgggaggctgaagcaggcagatcatttgaggccaggacttcgagaccagtcttgccaacatggccaaaaccccgtctctactaaaaacacaaaaattagctggtcatagtggtgagcgcctgtaatcctagccacttgggaggctgagacaggagaattgcttgaacccgggaggcagaggttgcagtgagcagagattgtgccactgtactctagcctgggcaatggaatgagaatctgtatttttaaaaaaaaaaaaaaagactaaattattgtttttattttttttgagatggagtctcgctgcgacgcccaggctggaatgcaatggtgcgatctcagctcactgcaacatccgcctcccaggttcaagccattctcctgcctcagcctcctgagtagctggaattataagtgctcgccaccacgcctggctaatttttgtatttttagtagagatgggatttcaccatgttggccaggctggtctcgaactcctgacctcaagtgatccacctgcctcagcctcccaaagcgctgggattacaggcgtgagccaccatgcctggctaaaataaaattgcattccttttagttacctctagtggtgcttttcaaacctgaaggtgggcacagatcacctggagaccttattaagatgcagattctgatgagcaggtctggaatggggccaacattctgcatttttcacaggttcccaggtgatgctgatgctgctggttctcaaactacgctttaacaagcagagacatataagtgaaggctaagaagagacactttttttttaacgaaacagttaagttttgttaaacttaactgtttaacgaaacagttaagaaaccatttattcaaggaatatttattgagtacctgttaagagtcacaacatgtgatagatgctgggctttctccctctgagagagaaatttcattaaaaaacaattatagcagccatgggtgccaggatagataggctcttgggggaccaaagaaagggtggggcaggatgaggtgcataactagaaagaccatcctgaaaaaaacggcatgtgagttgtgccttgaaacacaggaggaagaggccacagaagggaaagatgtttcttatgtagagagctgcaggagcacaggcacagctctgagagctcataaatccctctgtaattgcaggttgttcagccagactggaaggcaagtgccttggggggagggtggaaaatgaagcagacgatgggcagcaaggaggactgagaggctggaggcacctgaaggtggtgaaacaaccctgaacgattttttttccagaagagaatcaggtttgtatcttggaaaggccactctggccacaatctaggataagggagtaaagaagaggggcagatgctctaagaaccattgaaacaccggagccttgtatctcactcacaagatgaaacatacacattttaaaacaagtaagcagcttatatgaccttacttgcataaatagtatacccagtacctggtatggaaataacatatcaatgatttccaaatagtcatctactagtgcttgaggaaaaaaggtttattctataaagacaaaaatgtttaacccaatacaattaatttgctttgtaaagctttaagagtaaaattcaagacaatctctgccctaaaaatcacaaattccaaatggatacatcaaatcaagcatgatgcaaatgataacttcctgcctgctcttcatactgctgtgtcgagacattgtgtgtaagcaggtgctagggtggatggatgcatggtttgctcttagcactaagagcctgcagcatcagctaaagattgcaagcagctcaggtaactgtggggccgatgaaaccatgttaccacttacgttactgtttgaattcctgtgaactttcagtgtaatgaatttagaggagggtaaataattccaagactgaaatctgcctcccaaattggaagcgatagacaaattctgcctcctgaaccaagagagaataaaaggaattggcagacaaatggtcaatatcctgaggcagtgcaatttgtccgcagcagacaggagcagccttgggacagggaggcccagaggctcaatcagaaaccactgtgtggccctcgcgtcaaaaagcctggccaccctgggctttaatccaacagggtgagaatcaaactgtggagagaaaatctaaataaacattagactgattaaaaaaatcagacatctaaatcaatgataagcaatttttaatatggaaagacccaagcactactccatgcattctgttttcccttgtgttgaggtcacattaaaattccaaattgcattttgattctacgaaaataaggagaataataataaaagtagcaagaactgttgtaatagcaaccattgctcccatttgcctagtattttaaactcttctaatggattaattttatcagttaatttgatctattcctgagaataatctagaataatccaggcaggagtgattctccacccattttacagagaagaaaactggcactcaggaggctgaagtagaagaattacttgagctcaggagttcgagaccagcttggaccctgtctctaaaaacaaacaaacaaacaaataaataaaaaaattaaagttggggtttaaagacaagaaatttgcaccaaatctatcatgctaatagactttttttattccccactctgtgtgacatttagttcttgagaaattatagagcaaaccttcattccttctaagcaagtttgtgcttttcaagtataaacatttataccaccaaaagtattggcaatttttaacttctgtattcccacaggtggcaattcctgcttagattgattggcttccacactcctgaaagccatttcctttctgaatcacagcataggtggcaatagttaataaacaatttagaatgccatataaaaacacagccgtctgtgctagaaaatcagcattgcagaattatgagtccagcctaatagacatgatgagggcagtggtagatggggggtggcatggcacggggcactattgatacagacaggagacatggaaatactgggtagaagagggcgattcctcggcaaaagccccaccctcaagcctggaaacccgtggccctaagtgggaacaggcattcctgttttgcacccaggagttgccttttctcctgccacatccccctatcctatactcatataaactccaaaccccaggctccatgggcagacaagcagacaggcagatgaacagaagagcagaagagtggcaagatggtgcagctgagaggagagaagagaaggagcatctgaacgttgagaggagttctgctggggacagtcagagaggaaatcagccactggatggccaaacttcaagggaagatcatcttcccactccatctcctttccagctccccatccatccaactgagagccacctccaccactgagtaaaacccctgcattcaatatccttcaagtccatgtgtgacctgattcttcctggatgctggacaagaacctgggtgccaagagggcactgagctggttaacacttaagccatctgtggacagcagagctaaaagagcactatagcatgcccactagggagtcacagcgatccacctctagacactattatggggccagagtccaaaaagcactgtccccggttcctgtacctgcccatctgcatgctccctctcctctaaggggtttgagcatgcacagaaactgaacagtgagccacacccctgttgcacgtccttcaagggggggtcagggaactctccatttcactatgtccagagaagaatcccctgaagacaggcaagacctcagagaaggcaggctggacttcagcccacctgcaggtatgaagatgaagtggggagcctggacacacttttttctccatagccattgtgatggcttggaatggaggttccattgcaaccccttttccttccctagccttcagttttcactgagttcacagatccttccactaggctttctggaactgttaatccttacctggcacactccctgaatcctcaaacttagcagaatgttctcgcctcccactggtcttcattggaaccttgaggtcaagagttccacctccccacagccaccacagttcctgtgttggttagtttcatgtgtcaacttggctaggctgtagtgtccaggtacttagtaacattgatctaagtgtttctgtgaaggtattttgtagatgtggtaaacatctacaatcaattgacttcatgtaaagaaattaccctcaatcatgtgggtgggactcatcaaatcagttggaaggccttaacagcaaaaacggaggcttcccagaaaaataagaaattctgcctcaagactgtcatatcaactcctgcctgagcttgttggcttaccctacacattttggatttgccagctccgagtgcatgagcaattccttaaaataaatcttttggggtgtgtgtgcatgcacgtgtgtgtgtgtgtgtgtgtgtgtgtgtgtgtgtgtatgagtgtctgttcctcgtggtcactttcagacctttacttattcatccttttgccaagccacaaaaagacatcaaagacaaacacctattcctccagggctagtccttcacccctgccatgcacctgcttgcagaggagctgctatcctctaccagcttctcagtcactcctcagctctcaggaaagaagactctggctcctggatcacaaccttctgcagcaccaccaatgatctacaggtgtattgggttggtgcaaacataattgtgacttttgccattactttcaatgggaaaaactgcaattatatttgcaagcgcatgttttgttcaccagtcctggtccaacgccaaatgcctacttgactcctttcttgaatgttacctcttgaacacctcaaatgcagtttgttcagattcaatgggcatagtcttccctctactcccagttgtcttcaagggttcccaagttcaacatatggcacatccacctattaagttatgaaagcccaaacatggaagcctttaagcttcctctccctcatccccttatttctgactcatcaccaagtctcatggattttatttcataaatacctctcaaatatatctaaatggcttcatccccccaccaacaacctagtctaggctaccattcactctgacttagactactgcattggcctctcaaaatggcgcctttgctacatgggtgcccagataatcttttcaaaatgcaagtctgatcatcttctctaatgaacatccttaacagattttgctgataggataaagtgaaaaatcctcgcctgtggggtgtggtcttgcctcctcttccagctttattcacaacctgccctccctccactcactcgacttcaacacactggcatctctcagtccctcaaggtcatcctgtgctcctctctacgtggacttctcagaaccccctctttacctgtgtaaatcctattcatcctataggcctgctagttcacatcctctaggaagtggaggccaagatggatttagaagtgcaggagaattagcagggaaaacttccttgaaggatgaaggggagggagctggcataaaccaagagagcctttgagcatgatgaaggtctgatgcttgggaaaggaaagaagggaggaaagagggctggatacaaagagcagcaaactgctctgagaaagtctcagccaggttgatggctaccagcatccgtgtggcctcggcctgaatgttgtgctggatcccaaaggtgcagcagctggaggctgccggccaactcacttccctcaccaggtcctcttgtgtgacacctccatgcctgccacaagacctcagctcaaactttgtgtgtatttgaaaaaaaagtttttctgtgtttaaagttgattccttagattactatagattatcacatcaagatgtagaagcattttaaagattcttaatacatgttatcaaaattctcaatcattgacaaaagactaaattactttgctctgtcgcccagtctggagtgcagtgatgcgatctcggctcactgcaacctccgtctcccaggttcaagagattctcttgcctcagcatcccaagtagctgggactacagccacccaccaccacacccagctaatttttgtatttttagtagagacggggtttcaccatattggccaggctagtcttgaactcttaacctcaggtgatctgcccgcctcagcctcccaaagtgctgggattataggcgtgaaccactgcacccagccactgggctatatttaaaatgacagttaaaaggaagggtgggctcacatttgttgggatggctattatcaaaaagacaacaggtaacaagtgttggcaagggtgtggagaaaagggacccttgcatgctgttggtgggaatgtagactagtgtcattggtggaaatagtggaaaatggtatggattcctaaagaaagtacaaatagagctaccatatgacccagcaatcctacttcagggcatagtcccaaaggaaatgaaatcaccaccatttcaaggtacctgcactcttgtgttcattgcagctttattcacagaagccaaaatatggaaactagcaaaatgtccatcaatggatgaacgaataagaaactgtggggtatgtgtgtaatatgtgtgtatatatatgtaatatatatgtattacatatctataatggaatattattcagcttttaaaaaggagatcctgccatttgccaagtgtatgaacttacaaaacattatgctaagtgaaataaaccagacacagaaggaaaaataccgcataatctcacttatatgtggaatctttttttaaatgttaagtatgcaaaaacagataataaaacagtggttaactggggtgactggagggagagggaggaaatgggggaaatgtaggtcaaaggatacaaaatagtacatgtgtaggatacggaggtctagaaatctaatgtacaacatgaggactatggatgataacattgtattgtattaaatgtttactaaatgaatatattttatctgctcttgtcacaaaatataggtaactgtgagatgatggatatgctaatttgcttcactacagtagccattttactatcttcctgcatcttataacattatattgtataacttaaatgtatacaataaaaatttatttttatttttaaaatataataacatttttaaatgaatggttagagagggggttttggagttgagaaaaaaattcatattatatcccattttctaaatattctttaaaaaatctcagttttatagaaagatgggaattataaatatgtgtgcttgctgttaagcagaactcttaaccctttcgttcagtttgccttgtaactaacaaacttcaaactagagattgaggtttacttaagatatgattctcctgccttttctaacaactcttattttaagtctccgaaaaggaaataaaatcaaagatgaaatcaaaggtgaaggggtaaatataatatagttcctgcccctgaggagcttagagcttagccagagaagaagacatgtaaatagctaaccatataccacaacacaaggtgtattattataaggtgaataaagagctaatggaacatagataaaagaggaattcattcagccaacacagaaagggagaggaagaggaaacagaaagagtcacagaaacgacacgcaagctggactttgaagaatgaaaaattcaccaggcggaaggcatcaccgacccagaaatcagtgtgcacaaagtcatggaggaatgacaaatgtgaaaagccacaagggagtggctggaggcaaggttggaaaggtaactaaagacacagaaagttttgctctggtacactaacaaactgtgcattctcctctacaagcaatatgagtctttagaggttttgagtagggaagggacatgttgagagctgtgttttagaaagatcatgctggcagcagtatggaggatggaatgaagtgggctgagactagaggcagagagaccagttaagctattgctattgcaacagtcaaggtcaagaagagttaagaggattgaattaaaccagagagcagtgatcattggaaaacacaaaaatagattcaagaaaccttttgtatatgaggttgggtcttaagaatcaacagaaagcataactccggttttagattcagtggccaaatccgtaaatggactggctgcacacagccagtgtttctggaaacaaggccttgagaatctttttccagagatatggtggaagcattttaaagcttgtcatttgctagttcagaccctaaggacttaaagagttaatgacatcttcctggttgacaccagtataatctcaaatctcacaatggttcattaaacattgggtttatagtatgaaatctttttaatgacttgggataagattcatgccatttttataagcagaaatttggctgaggggtgttataatagggagagtaagacatagacacgatcattccagaatgtggaccgtctggcgcttaaagcagggccagcaagttaacaaccacactctctttttgctcataatatttctttctcatttaggtaagtaactgaggtttagttgcttcactactttcaagaagaacgaaatgatctatttattccaaaaacgggatctaaaaatgaaattatagtccagaaccaagtatgaatatagatttcagttaaacttgaccagttattgggttcactggggtcaagtgaattggatgggtggcatggacactctgtaagaggcagtctcttacaaagtgcaacaaaaatcaaagatctggactaaaggttttggtatattgtccaccattggctttgagagactttttatggataattgagagacatgtgccattttaccacacactcatatttgtgatggcctgacagacacctcttctctggatgtgtcactgacctctcaaagacaacaccttatcctattacaccaggggccaactcttcctccaacctccccatagcgattgctggcctgtcatttgttgccctcgcccatcttggatttttcccttccccatcatacatacgagtcagttacccagttactctatgatttttcccttccccatcatacatatgagtcagttacccagttactctatgaattcttcctcatctgtgactcatttgccttcctactgtctctacctagtttttattcctgattcctctcccctagataatagttctctagcaagctcttaacccttcaatctcctcacattcctatccactaggcattctaccacaaattaaccttaaattattttctaattctctaatttttatacaaagagcagagctttagaaagttcaaaaatagttttatgtttcatctcttctaccaaataaattctagacccctaactcagatagtttaaaaccctacaaatctgactccatgttttgtagggcattaaaccaaccaagtcaatggtctagaatttatggcccttcaccctaaatgccagcccaagttgcaccactcctcctgagtcagaccttacaatccttctgtggccatgatcctgtgcaaactaatcctctgccaaaaatacctttgccctccccacccctcaaaatccgtggtctatttccatcatgttacattgagtaaaaaaaacccaggaaacaaaaatgaatatgtgagtacaatggtagaatcctgcttcttccttcttgctttctccatttatctacccatcaatctatctgaaataaagaaaactggattttaaaagatatacgccaagttgttaaaaggagatttctcttgatggcacaattctgagtgtcttttttcattttattatctaattctctaatttttatacaaagaacacatttacttttatagtaagaaaaattcttccttgttttggacaaactgtgataaaaagaaaaaattgttaaaaagtaaaaaaaaagaaaaatgtgtattaagtttttaaacaattataatttaaattgaaaaaaagtgtgtccatccttcaaagctctactcacatggagagctgctttgctaaacctgtttttttgagatggagtttcactcttgttgctcaggctgtagtgcaatggcacggtcttggctcactgcaacctccacctcccaggttcaagcgattctcctgcctcagcctcccaagtagctgggattacaagcatgcgccaccacacccagctaatttttgtatttttagtagagacagggtttcaccatgttggccaggctgatctcaaactcctgacctcaggagtttgaggtccgcccgcctcagcctcccaaagtgctaggattacaggcatgagtcatcacgcctggcctaaacctttcttgatgattaaagatgtgcttaaattccctttccttcaacctccttagtagcttcacacacacacaagtagtaactgtaatgttgttaagaccacaggctttgaaatcagacacacaccatgtaaaatcactttcactgttgttatgggctgaattatgttgccccaaaactcgtatgttgaaaccctaacctccaaaaccgcagaatatgactatatttggagctaggggctttacagaggtagttaaggttaaataaggtcattaggcaggccctagttcactctgactggtgttcttataagaagaaatttgaacacacgagagacatgagggatgtgcatgcacagagggatgaccatgtgaagaagcagcaagaaggcggccatctccaatccaaagagagaggcctcagaaggaaaccaaccctgtcagcaccttgactaagcattctcttaggccaaaacattctaaattcccacaactcccaggtcggctctttgctgctctaccccagtcaaaagcagcaccctaggacaatagtgtgcacccccttgctccatcctccctgagcctctgtgttagaaatcagttctccccaaatacatagttaacataacccattttttgctattattttcacagaaagttaacttccgaaagccggaacatttttatgagtatctaataagccacttccaaattgcatttagctgaaattgaaagtacaatccaatttatttaaacagaatttcttacgaatgtacttgaagagaaggccagtaaaatagggctggaagaatttcccttggatccattatgcttccctttgcctacccagaagtcaggaacttttgagtattaaggacagaatgttcagcattctaataattaactgaacataatctggaaatgaaaaagcgggggaaattttttttaaactctctcggaaaacagaaatagtgcacttagatccttcagcacagattcacagctgaactgcagttacctgcatatactcggctaaaaaagaaaaaaattaaagaccatgtactaaagcattttctattaattacagcatttagaagatacgtatcccctattttaaaatttaaacctatttttcatttttattaatctatttgggggtttttggtttcctaacatggatgatgtggcaacatgtagcttaactcttacattgccagttatttttgtttctctcgattcttttcttcaaaatcttatgtcttttccatcatttgggaagttctatcaataactttatagttgagcctggtgcggtggcttacacctataatcccaacacattgggaggccaaggtgggaggattgctttgagccctggagtttgagaccagtctgagtaacacagtgagaccctgtctctaaaaaatatacaaaaattagccaggcatggtggcacatggctgtagtcccagctattcagggggctgaggtgggaggatcacttgagcccaagaaggtcgaggttgcagtgagctgtgatggcaccactgcactccaccctgggagagagagaccctgtctcaaaataacaacaaacaaacaacagcaagaaaaaacagttagatattctttaaatattttcttaaaaactaaattttgagaagacatagatgtacctaagttataagcataataaagagtcttagtgttttcatagggaagaaaagccaacatgatagtgtagagacagtgaaggctgggacccctgcacttagggctccctggattaaagcctgtgacagagcaattctcatctttaaagttccctaatgactaatgtggattttagtaattatttaagggccccgtaaggagtgtaagaaagataaaaccctaattccaagactgaaattaaatgggtatcatttcatgaggaatttgaaaaagctctttgaaagtatgcgaatgtaatatggaggtattgaatttcttccctgtgactatttcattatattaaacaatccataaaaactgtaagtaatggcagagatgagactactgatttttctcgcttgatttgtcctgagttcgcgttaactgagcataagaaactcccgttccctgaattgggcactgccatgcagaaagttttactgcagcagttgaagaggagttttaacacgttgcacagacgtccagtctctgggactgctgaactgtaataaactacaccattaagtgaaacattggatggagaagctggctcattgggtcggcggttacagttataagtagctccttgggatgctaatagattaagacgagtggtttaaacttccaagacagacctcccgctttagtaaacagcagagtaacagacttacataatacctcaggcagtgtgcattctggtataggcccagcctctaattgtgtgaccttggacagctaattttgcttccctagacaccccagtcccttcatctgaaaataagaacgtatcatgggatcatctcaagtgtatctagagctctactgttctaggattcaacgactggtaaatctacaaatataatattacatgatcaggattaaatgaactctaatgggcaaaatgcatgatgtagtcatccaaatgctaatattgtaatgtggatagaaagaacagattttaagttcaccaaaaatgaaatcaaaatggaccagacatattaataggagctcaacttcatttgtaattttaaaatgcaaataaatacaatgaaataccattttcacctatcagattagcaacaatgtaaagtttaaagatattcagtggtgactgagtgtggggaaactggtacttttaatgctgtttatatgaatggaaattggtggtcttctcaaaggtcaacttgttaatatgtatccaaagttaaaatacagtcacgctcacataacaacgaggatatgtctgagagatacatccttgtgcgatttcatcattgtatgaacatcatagtgtacttacacaagtctaaatgatacagcttattatatattatatacatataggctgtattgtataacttattcctcttaggctacagacctgtgcagcatgttactgtattaatattgcaggcaattataagtatttgtatatctaaaaatagaaaatatacagtaaaaaatacagtgtaaaagattaaaaatggaggccgggagcagtggctcatgcctgtaatcccagcactttgggaggccaaggcaggtggatcacctgaggtcaggagttcaagaccagcctggccaacatgatgaaaccccatttctactaaaaatacaaaaattagccaggcatgttggcgcttgcctgtaatcccagctactcggaaggctgaagcaggagaatcacttgaatccaggaggctgaggttacagtgagccaagatcgcgccattgcactccagcctgggtgacacagtgagactccatctaaattaaaaaaaaaaaattaaaaatggtacgtctgtatagcatagggcacttatcaggagtggagcttgcaggactagaagttactcagggtgagtcaatgagtgagtgatgagtgaatgtgaaggcctaggacattactgtacactgctgtacgttttataaacactgtatacttacgttacactaaattgattttttaaatgttctttcttcgataataaattaaccttagcttactatcacttttacttcataaattttactttttttcaaacatttgactctttgtaataacacttagcttaaaacacaaattatacagctatacaaaaatattttctttctctatatctttattctatatacttttttctgtttctagaaattttaagtattttttacttcttaaactttttgttgttttgttttgttttagctacagggtctgctctgtcatccaggctggaatgcaagtggcacaatcaaggctcactgtaacctcaaactccaaggctcaagcaatcctctcacctcagcctcccaagtagctaagactacagtcatgagccaccatgcctgcttgattttttaaaaaaaaattttgtaaagacagagtctcaccttgttgcccaggctggtttgagctgctgtcctcaagcgatcctcctgcctcagcctccaaaagtgctgggattacaggcgtgagccaccatgcctggccaaattttttgtttaaaaacgaatacaccaacacacacattagcctatgccaacacagggtgaggatcatcaatatcaccgtcttccacctttatgtcttatcctactagatgaatttcagcaggcagtaacacaacacggagctgttgtctcctacgataacaatgtcttcttctggatgcctcctgaaggaccgatctgagactgttcttaaggaggtatcactcttttcagaaagatgctcatggtggtttgtttcttttttcatgttagatttgtgtgagtctatcatgggctacattatgaaggctgtgacttcacccagcaataggaatatttttagctccattacaatcttgtgggatcacccttgtatatgaggattgtcattgaccaaaacattgttacgcagcgcatgatggcaacatatccttgaacacaaaatttcacttctgggaatttagcttatggatatacttgcaaaagcacactaagctatgtgtacattcctgtacattttcaaagagaaagtttatatcattttggtcatgttaaagacttgggaccggtggttatattcctgtacacatagcatagtgtgcttttgcaagtatatccataaactgacaggacagaattgtttgaaaaacaaccatgaatataacataaatgctcattaacagaaaagtggttaaataaattatagtatatcattttatgaaaaatttttttttttttgagacagagtcttgctctgtcacccaggctggagtgcagtggcgcgatctcagctcattgcaacctctgcctcccaaattcaagggatttttgtgtctcatccttctgagtagctgggattataggcatgcaccgccatgtctggctaatttttcttttctgacggcgtctcgctctgtcgcccaggctggagtgcagtggcgcgatctcagctcactgcaagctccgcctcccgggttcacgccattctcctgcctcagcaacctgactagctgggactacaggcgcccgccaccacccccggctaatttttcgtatttttagtagagacgggttttctccctgttagccaggatggtctagatcttctgacctcgtgatctgcccacctcggcctcccaaagtgctgggattacagctgtgagccactgcacccggcctaatttttgtatttttaatagagacagggtttcaccatgttggccagggtggtctcaaattcctggcctcaagtgatccacccgcatcagcctcccagagtgttgggattacaggcgtgagccaccgtgcctggcccattttatgggatattatgcagctgtttttttgttttgttttgttttttaactttgtgtgctgatagggaacgatgccaagaatattattaagtgaaaactcatgtgggagagcaatatgcataatatgatacaacttgtgaaaaaaaaagaaaagaaaagaaaagaaagaaaggaagaaaaaggccagtctgcgccccggaccgactctccttccgtcggaacgaccctccttccgccggagccgcgtggcctcatggaaggcatggaggacgccggagaggaggccggagaggacgccggagaggacgccagagagggtgccgcagcgccggcagccagggtgcacttccgcgtggcgaggttcatcatggaggcaggtgtcaagctagggatgcagtccattcccattgccactgcttgcaccatttaccctaagttcttctgcgagaccatcctggacgcctttgacccttacctgattgccatgtcttccatttacttggccggcaaagtggaagagcagcccctgtgggctcatgacatcatcagtgtgtccaacaggtacttcaacccaagcagtgagcccctgggattggactcccgcctctgggagctccgggacagcattgtgcagcgtgagcttctcatgctgagagttctgcgcttccaggtctccttccagcatccacacaagtacctgctctactacctggtttccctcaagaactggctgaactgccacagctggcagcggacccccgttgccgtcactgcctgggccctgctgcgggacagctaccacggggggctgtgcctccgcttccaggcccagcacatagctgtggtggtgctctacctggccctgcaggtctatggagtcgaggtgcccgccgaggtcgaggctgagaagctgtggtggcaggcgtttagtgacgaccttaccaagccaatcattgatactattgtgtctgatctcattcagatttataccatagacacagagatcccctaaggccctggcccaggcctgcccaaagagaagcccaggatggtcagctgcctggggacattgccaccacatcgctatgatggctggtccccagaggaccagctgggaggactggttgtgctgctggagaagggctggtgaaggcgatgacatgctgccgctttgacagtccctagcagtcacggtccagatgatgatggtagctgtgcctccagcgggcaggccgggagcacactgggtgcagctgacccaaaggagccacatctgcttttgtcctttgagaggactctgactacaatagaggcatgatgccaataaaaggaaaatcatgttatcgatgacactgaatccctagggattttttttaagccagatttatagcgagaatgaatgtgcaatgtggctgaaatctattttgtgtaaaaaaaggtgatgcaagtcaaaaaaaaaaaaaagaaagaaagaaaaaaagaaaaaggccaggcgcggtggctcatgcctgtaatcccagcacttggggagccggaggcgggtggattacctgaggtcaggagttcggaccagcctagccagcatggtgaaaccctgtctctactaaaaatacaaaaattagcggggaatggtggcacatgtctgtaatcccagctactaagggggctgaggatggatggatggatggatggatggatggatggatggatggatgattgttttcaaagagaaattttctagaactatttaccattttggtcatttaaagacttgggactggtggttagaggatgggggacacatcttttgtttctcatttgattatactttctatttgaattttttttaccatgatcatttacatgaataaccacatgcactctgatgccttgcgggggggatgttagccctgaggccagtctggaccctggctgccagtgtggcatacaggagatgatgggactctgtgaacacaagcaccactgtggtttgagtatgtccctcagagtgcatgtgctggaaatgtggtccccagtgtggcagttggaaaggtagggactttaagaggtgattaggtcattaagaggaattaatgctactctccagggaatgcgttatttctcatgagagtaagtgagctctcactctctttcaggactggattagttatctcaagagcacgttgttataaagtgaaatagtccctatgttctgcctctgacttcttcctttctgccatgtggtatgctaatgctgtgctcttggactttacagcctccagaactatgagcccagtaaactctcctttataaattacctagtctcaggcattctgttatagcaacagaaaacacactaagacctcccttctggtgcacaccttttattttttcccttcccagtattcctttccccttcttttagtaacaggacccattttcctttctgcaactgcttttcttccacctctcagtccatgtttcaggttgggaactggactttgacccccagttccaaaggtgggccttgaccttgggctggccagggcaccacagaactatcacaatggcttcaaggaggggcactggctcaagcatgaccaataagaacatcctccagtacttcagctagtgctcctggaccaaggctctccccttccctctaagtgcgggagtactagaacaaatgtctggaactgctttgaccattgttgccacgactgggtggatattttcctgaaaataaagcaaaacagaggaaagcagagcttatgtgatgagagacagattcctgtggacacagagcacctggatccagccatgcagaacccttcttaattgcttttctgttatcttaaactttatatgagctaataaattctcatttttccttgagctggtttgaattattctattaatttcatccaagagtctctataaatgtaagcaccttagtaatttcttcaacagccagcagagcccatagtgcctttttaagcctttgcccaacggtgtggactcccaagcagcagcacttaccgtaaatatttttcatcattttgcttgtggtttccttatgctcccacccagtcctagtacagggtcgagcagagagcagaaactccttgaaatgtttgttgcatggggcaatcattctaattttcaatatcctaacattgcctctgtgtaagacacaaatatgtcttaaatatatgtaagacatgaatactttttgtgcctattttttttcttacattttgggtctttgcagatattaaaactttggaatagatgatgcagagcatagattcctaagcctcaactcttcttgcaaagcttggtccttcaagttttgcaagaagagttgaggcttaggaatctatgctctgcatcatctattctgctgtctgccgcagaccacacaaagccttactcaaacctgctactctaatgcttgatgtctgtatatttataaattactataataaggcgagaattataaggacagaaaaaacctttaagtgagcagcccaatttattttttcttttatttcctctcgttctggatttctttcaagtttgtacccaaattcttaaacattagcaattttaaaatatgttcgaaatggaaaaatgtgaagatggcctgttctctgaaagttccgtagttcgtagttgtaatagctgttcaacatcttcttgtagccataagcgaactgcagttccaggcgtagaaatcctgatcctgtttcagtggtcaacactcactaaatagtctcttactacccaagaaactgctgtatgtcacagggaaattcaataaccaaggtacacatcagtccattgcatctgaaacagcatattcactacttatcactcaaatgtgaattttttttcttttttggagatggagtctcactctgtcactcaggctggagtgcagtggtacaatctcagctcactgcagcctccttctcccgggttcaagtgatcctcccacctcaccctctcgagtagctgggattacaggtagccaccaccacacctggctaatttttgtatttttagtagagatggggtttcaccatattggccaggctagtcatgaactcctggcctcaagtgatccacccaccttggcctcccagagtgctggaattacaggtgtgagccacaacacccagcttcaaatgtgaatttctaacccatatgcaaacacaaccatcccagaaatgtgactggcaggaggaaccctcatccctcagtggaagatgttcccatttatctcctcacagatgtcaccaccacatgccctacttagtggccaggagttcagtgagacgctgctcaccacattaattcatcaagagcagggtcagcgctggctctgggcaccctgcacccgctcaccctctcactgtgaaagttcactgccagccacctcctcaaactgtccataaatcttgggagatttgggggctctgcctggggctcaccctaaggagacaccacacttccttgccacacctaccacagactcagagtcatccaacaagacctgaaacagaaagtgacagttacaacgagacaccttacgagggggtgtggtgtgcgcagtgcacagtgaagaggcatctgttagctctggacacacctctcatccctttgctgcaggacaggttggctgtgacccacagcaaatatagtatgtaacagcagccctaactgtgtctggctgtcatgacttgcaggagtcctggggaccaaaaaggctgtagccttcgcctttcagtgttcgatcttttggtatcaataaaatcaaaggcagacacaaaagggaattggaaaacccaagaggaaaataccactgatacatttcactcagctgttcctacggctccatgccttggtccattcaggctgctgtaacaaagtaccacagactgagtggcttacgaataacaacaatttatttctcacagttctggaggctgaaaatctgagatcagggtgccctcatggtagggttccgggagggccatcttccaggttgcagaaagccgtcttttcattgtatcctcatatggtagtaagaggctagagagctctctgggatttcttttataagggcactaatcccattcatgaaagctgcaccctcatgacttaaactacctcccaaaggcccgacatcctaatactatcactttgggggtaatatttcaaaaaagaaatgggagggggacacaaacattcagtccataacactccatgatacttatacaaggcaaagcctggccttggtggcagcccagtggattccagttgtgtgttcccagtgatggctggagaaaacactgaacccaagaataatgaaatgttggccatggtggcctacaaggaaaagctactggcaattgagccttgatcctgttttcaggatcaagatttgagaattttttgttaatgctatttagctcaaaggtatgcttttctcagttctgctctgcatatagtttcttgaatccactcctctttccctcacttgcgttgctgcacctgccctctgtgctgtcagttcttccttacttaggtccaccctgcacaccaccacctctacctgaatagcccctcatctgaatacatggaatcaggcagacctgtatttattcatgttactctcctcaacccataaaatatgttagcattatgatcagcaggtcaccacctgctgagatcacttaaaagagtgtgtgcatgtgcgtctgtgtgtgtgtatgcatataaagagtctgtgtatatatatatatattataaaaacagtacagtatatattgatcatattatgtaactgattcttcagcatctgcagaaaaaatctcaaagtcccttgtcaactcactacctgattctccctcatcactcatgaaacccccattccactgtactgcagctcatactactccatttgcccagaaagcctcctcttttttatttacctcagtactgaactgaaagcaccttgaaggaaggaatcattttatacccatctaacttgatgtttgagaataataggtgattaattcttggattgactgattgatgacttctcttcagccttgtgatacacagctcagagtccattgcttccataggagctcatcgcccacctgcctgcagggatcccttcctcttttgaacgggcacctattggctgtgcaatccattcagcaacacaccatgagatatcattcttttgctattgtattgtgccttttaaattaaaaaaaaaattggaaaatttttgtgggtatgttctattttttatgagtttatgcttaatctcttcagggaccatataattttttttccctaccaccatctctaaagtcttaaataggtctcacaaaaagtacaaacaatattcatccactataatttagaatattagtattattaattctagaatattagaattaattctaattatgtatcttgtttaattataggtaattgatattcattattaattaaaaccaaataggtttatttttacatgctagaattttgtaatttcacatttttttacactggaaagtcaagctttctcttttcatcttttagcaattgtgaatgacacatgaaacatgaccttttggtactgaacttagtactttatagtactaaatttataatactaattatagtactataaatagtgctaattatagtactaatttatttctaaattgagtactttatacacaatttagaaattgaagtgtaattcctaagattaggaaagatacatcgtctaattggtctttgatatctgtccatgtgcatatgaggatgtattattttgtgtctcaccttttatggtggccggccttcaagatggcccccagggattcttgcctcctggtactcatgctccaagtagtccatagtctcttcccacattgagtagggctggcctgcatcatcaataacgtatcgtacaaatgatggagtgtgatctccaaggccagatcgtaaaagaaaagacattgcagcttctcccttgctctctcttgggccactcactatggggagctaggtgccatgtcatgaggacacacaaagaggggtccacaggacaggaagttgaggcctcttgccaacagccagcactgaattgccaaccatgtgagcgagctacttggaagcagaccctccgcatcggtggatgtcagcggcctcaactgtacttgacatcacttttttttttttttttgagatggagtctcactctgttgcccaggctggagtgcagtggtgtgatctcagctcactataacctccgcctccagggttcaaatgattctcctgcctcagcctcccaagtggctgggattacaggcatctgccaccacacccagctcatttttgtatttttagtagagacggggttttgccatgttggccaggctggtctcaaactcttgacctcaggtgatctgcccacctcagcctcccaaagtgctgggattacaggtatgagccaccacgcctggtcaacatcactttgaaagaactggagccagaaccatttgtgttcctaacccacagaattgtatattatgcatgttcactgttattttaaactactaagttttggagtaatttgctatattttactatatgactaatatatctgaagatagaaatttttacttaatgtaaataataaaaagagagtttctatgacaaactagaatgctgtaagtacagatcaaaagagtcttgtgaaaagacaatcagggaaaaacaagtttcttgtagtgagatggattgagtgaacttatatctgaaatatgaagaaaatactttaaaactcaagcaaaaaaagaaaataatattgaagactttattatttgaggtcttactgatttgtttggtttgagaaaagagtccaggatacacataatgaccgtgacaggtaaccacaaaaagctgaaggggttgcctgtgtcactgccctagtccaagccagtgttctcacccaaaccatgatacagtaagagcctcccactagtctccccacaacctctactgccacatgtccacactgaagccagaaatgtctttttaaaattttttttttattttttagagatgggttcttgctacattggccaggctggtctcaaactcctggcctcaggtaatccttccatctcggcctcccaaagtgctgagattacagacatgagccaccacgcctggcccagatatatcttttcgatgtctgctgaatgtcaccattccttcaaaaaatattcccttgcccctcagatgaagcccttgagtagggtctcaggactgcatgctgtggccctgccttctcccccagcttccgtgatctctctgtgccctctagctctacaggctttctggaagtcctccaagtttgtcgtgctccctcccacctctgggcctttgcacatgctattccctctgtctggtacactccccaggtctcacctccaaaccacatcctccccttgaactctcctcagactctcatctttatctctcaaatctccgtgccatgggcagcctctcagggaaccctttgctgatgcccttgtccaggcaaggatctcggtcataagctagtagggaccttatacctttccctcccagctttggctgagtgagcaattatttgatttttgtgtctcccacagctgactgtgggcagagccaaccctactgggtttgtgccctgcacaaaggtgcccagcccaggtcactgtccagtaaagtcctgcctgggctctgcctgccaagctctgcctaggtctgtgtcacacagtttttggtttttctcttggggagatgaggggtggggatgatagtttatactggatactccatgagaacaggggtggcttctgatttaggtcaccattgaatccccaacagttagcatagggaagacactcagcaaatattgccttaattagttcatttagtaattaagggccagttcagtcaggacttatcttaatttgaggactgtctaaatttttcttgcctctaagtaccatgttgccctaaattactcgtactccattgccatccctcgagtattccctaaccacaaattcctctgggaagggaaacactaaatcaataacatcttaatgtgagttaatttatccaagattaaaaagtcaattgctttacaagacccccagaaaataaggtaaagaacatgtgagttgtaaaggggaagaaagttctagaaacctcccaatattttccaggctttgagctttttctctgacaagaaatagttataataagtcataagctataattccttttcactgtaaaatgaaatggttacttaaaattaattaagtttctaccatatagattgatcaagatgttagcaaccatattcctttttcccattctaacctttccataacatactttcaaccaggaatggatctaaattggggggggcctgaaactagtataattcagggatcttctttaagaaaaatgtataaaagtacaaatacaaaatacccatgatggttgtgggtacaaaatacccacagctatcccaaatcacccaacatgggaagaagtatgagagtggagtggtatggttaaaatttctcaccaaatgtcacacaaatatatgaccacgtgaaaataaatgtaatcacatacaaccgtgtgacacacacacacccttcccccggaggctcagaatgggtcatgcatggaaggagccctgcaaagtctgcctcggcattcagtaaatcctagttcagctctctctcagtctcttctaattcctgtggagagggcccatttcttattttatacacatgtgtcaaatgtctttttcagactccttttgtattattttctatctcatttttgtttagctctgtaaaaccttatgtttgaatcttcactatggtcaattacacaataaacgagtcttttgttttttaaataaataagtctttggttttagtcatctttgttgagcccctcctatgtaccaggctgtggtaagccctggggatacagccaggaacatgaggggcagggtccaaactttccactggtagttgtaggagaaagacaataaacagatagataaactatcaaatattagggagtgagaagacgagaacagcagggaatgtggtcaagagtgaacaggtgatctgggacagcctctctgaaaaagtggcatttcagtggcacctgagtgacaagaaagaaacaaccacacaaagctggtcaatttcatagattagtgcaaaagtccgttgatttgtgcaaaagcaacgagcctgttcaaggagcagaaagaagaccagtgaagccccacaagaaagtccaggctttggaggccagggtaatgagtttggattttattctaagtgcagtgggaagtttctgaaaagaactagggaaaaatgatgacatgacattttacatttttaagtaatcactctggctactgtgtagaggatggatttgtagtgggagcaagagtggaagcaaggaagctagggaggaggcctttcaattgaacaataggggagcttggggcaaagctatgcttttggtcaccagcagagtcccccctacgcggggccactcctccctcaaccactgtttaggcatttggtaggaccctgagaaaatacaaaaaacaactgccaaatacctgtctagcattgcctatgtttttccagatctatttttccaagtatcttctctgcatattgtatacctaaaaggatggaggatgagggagggtatgggagaagacaggaagccagctcactcccaagtttttctttaaagatagaaaaaataattcctaaattgggggcacaaaattagaatgaccccacccaacccagctctagagttaggcagacatagactcaagtcctggctccactagttatcagctatgagacctcactttacttctctgcacctcagcttcctgatctctaaaattgagtttgtttatagtatttcagtggggatttaatgaaatcatgcaagtaaaccacattgtttgttgctaggtaaaacataggcatgttcttcttcccccgcgtgaaaacttggccccaggcacaggttgctaatgcagtcacagcagacgtctttgttgcccttcactgtgattcaaccccaccattcttgagcaagtctttgaagcccatccaatcttaacagaactgcttttgtgggtgagacatctctaagaagttcaattgtgttttggaccaaaatcatttgccattcttctgttcctaacacacgggtctctgtgtgttgatctaacaaattggtagtgttttgagtaatacatcatgaggccaatggcaccttaacgatgtattacattaatatatcatcaaagccatggcattgttatgatatattactttaatacatcattggagtgccacagctttaatgatgtattactcaagaccatagcaacagctagaaagatcaagataagttttgtatttttaaaacttattctcagtaaatataatttttttttaagtttccacaataaaatatgtgttcaaacgaaatacgaggatgcaaggcctctgataagtaagcaacgagatgcttccttggtcatcctcctcccactgtctactacgtacctggctcctaagttcattttaaaccactttatccaaatctcctaaaagtaatattgctactgaatttatgattctataagtatcccagggatctccaatttaatgttacagctgcacatttatagagcagttgtttttccaatggtagcttaagcattttctacccacctttccaaaggattctacactgtccaggccaaaatgtccttcaagaaactcttgggcaagtttgattttttgtataagatgtctgaatcccctgtatctctaacttctcctccttgttggcatatcagtgtgtgtgtgagagagagagtgtgtgtgtgtgttgtatataacattgtatgtcctctctgagagatttccaatatgtaagacggatttagagatagacctaaatctcagatcttccatgtaacagccttaagcattcactatttttagcataatgaaagttgaccaagaaattggattactggagttgcaccaattgcaacagtatcagtatcaataaaaacaggaaaatgttttagtccgtatcctcatgacaaatcttgactgtctaacaagagttccactcacttgaaaatggtttgaagagcaatcacatgcttcctgtgtgcgtgtgcatgcacacacacacacaaaatgggagaacaagacattggggccagagatctgacctcaaagcaagccttcttaagaaggccctaatattctaatactcacactcccttgaattcaattgttaaaatttaattttccagcctgggcaccacggcaaaacctcttctctacgaaaaatacaaaaattagccaggcatggtggcgcatgcctgtagtcccagctacttgggaggctgaggcaggaggatcacctgagcctgaggaggtcaaggctgcagtgagccaagattgtgccactgcactccagcctgggtgacagagtgagaccttgtctcaaaaaaaaaaaaaagtttaattcttcagaaaattcagaattcgtgttatttagggaggggtaatgcagttctaggcagaggtgacagcctgcttctgaaatttctaagacatagctttatactgtcagtgtttttcacgttgtgaaatttagaagcacccaatcaaccactctgcaacaccccgatttctctatcctggtgtctttcactcttttcacagctttggctcaaatctgtcataccagattcctctgaacacctctcaggcaggaaagccttttctcatttcgagtgcctgacttgggaattgaattctctcaccctcttttctctcttcatctaggctgaaggactgcaagggagccagctgcatgagaatagattaggcgagaaatgatgattcagcacccacggcttcctgccatgtgctaaatgatcagtttagtctcaatcagcagataaagaaaaggcccggggaagggacaagaagattcgccctggcaaagggaagaatgacaaagatcttcgcatcagaaatgtgaggtttgcaataagatggtactgaagaaaaaaatgtgtcaaatggtttttgtcgtttgttcttgaaggtaaccagaggcaggaagccttgttgcttataaatcacaattaaccacagagctacaaggggcctctgagattagactcaatccccgattttacaaatgaggcacaggaagtgctgggtagcacctgcgattcctggagcacctttagagaagttcacaaattacattcagtggcgatcaaacaggagcatacgtttttctctgcccagaagggccaccccatcctcatcatctgtacttaacccaaaatgctcagtctaagtcccactttctccaggaagccttcctgactcacccaagcctgtgatgacttccccctgcctctgatcccctatagctgactgtcccttcattttcattatctgctactttgtattatcattttccctttctaagatgtatttgcccaataatttcaagttcagaaactttggaaagggtacatgcacctgccccgggcaggcagaagagtggtgggagcaggtgaagacacagcctttgggttgcaggagcaggcatgctgcaacatgctgtgtgcttctcttgcacagcaccttcacaaagcagctgtttaatacaggctgtccataaagtcaggaaacaaatcatataatacaattcttagtaaagattgaagatgttcctaatgccatcctgtatatttgcctgggtccagactttgtggaccacctgactatgttggttatttgtacaaatgaaggaagttctgacataagttcctgaaatcagagtgcaaaagaaaacgtttgtgtcccagaacttctggctcctcttttcaccattctactataatcatttctttttaaagttctaagttgaaatggtaccgtatcacttttatgtatagtcaggtatatgcagatatagttagatatatagagatatatacaaaactgcagttttatctttcataaataatagtttaaaatacacactaaaataaagactacaaaatacttggtaattttcatctggactcttcatagaaaattagaaatcaatggatttttctggaactcttattgggaaacagatatttctatatgcagtctcctaaggagacttgtctttttgtacacacataaacgagtaattacttctagtacacaaaagttcacactcatcaacagaagactctgccttaattccaacttttcctgcaaaccattcagataatcattcagagtcaactgaattttcatgatataagaaaaggcacattcattgcaaagcattcatctttaaatttgtaaaacatgtccttgtgagatgatattttcaaaaaggatctgccagctactctgttaatgtattgcatatattaacagaagactaaataccatagttttccaatctagcaagactgcacaatgaatcagtttcactaaacctaattccattcaccacaccgaatgtgtgccttcagcccttggagtattccaacgcactcaaatgcttgacaagaacaacacgaaaattgagtttcccgtcagggtcaggatgttgcatttttgcttcacatacaatgaacagattcctttcctttttcactttccaatgattgtgtgtgtcaggcagatacaaacaacagaactctgtacttccgaaatctcagcatcaatgcatacattaaatggaacaaagtgatgcccacgtgacacttttctgaggcaaaacacttctccccaggaaaaaaaaaaaaaacgtggtcaggcattatatgtttccccagttaccctcgtctcttcttgaccttccttcctgctggtgctatatcctttgttaccaagataacttgtttataaaagtgctgtatcagttactgaaaacaagtgacacatgatttacctggggtgtattacaaaagtaaatgccaggatcgagcaagaaactacagactctcctttctgaacattgacttctatcatgaagaaaatttgagcctataaaactgtcactaggatacaagaattacccccagagtaaaagtttgctatgaaaactacaaacattttaaatttctttcctccttttatgctctgtaatctctcgtgatgatacactgtttctggaatttaaaaatggattcatgggctgggcacagtggctcatgcctataatcctgggactttgggaggccaagatcacttaaggtcaggagttcgagaccagcccggccaacatggtgaaaccttgtctccactaaaaatacaaaaattaacaaggcttggtggcacacacctgtagtcccagctactcaagaggctgaggcacgagaatcgcttgaacccaggaggtggaggttgcagtgagccgagatggcaccactgcactccagcctgggtgactgagtgaggctctgtctcaaaaacaaacaaacaaacaaacaaacaaacaaacaaaaaggatccatgtattacattattaagtgcaattaacacatcttgtaaaaacccacccctttactccattcacacggcactatgcaatccccataataagctctgttctcattcaaatcctgaccctggcttaggtgattcctcaccaaaatgctgtcttttcatcctttgtctggccaattattacttgtacctcaagtctcaaattaggctttgcttaccccaggaagcctctctcaatagtccagcgcttgacgagggtagatgattttcctacagcccactgcgcttttccttatcataccatctatcacccttcatcgtaaatgtctgcttccttctcaagccccctccccaggctgaggtttcttggggacaggtactccatctttcttactactatacactcagcacttaacagtgctgggcacatagcagacacactcactacatttttctggaataagtgaacatgatgtactcaatttttagtacatacaatgagaggagtggggaattattcctacacaaatagctgaacctcgattaaattctgctccccgtcatccagcatgttccagttccctgtcctctctccattccttaaagagacatggctggcctggcgcggaggctcacgcctgtcatcccagcactttgggaggccgaggtgggtggatcacctaaggtcaggagttcgagaccagcctggacaatatgatgaaaccctgcctttactaaaaataaaaaaattagccgggcatggtggcacgcacctgtagtcccagctactcgggaggctgaggcagaagaatctcttgaacatggaaggcagaggttgcagtgagccaagattgcaccactgcactccagcctgggagacagagaaagactccatctcaaaaaaaaaaaaagaaaaagagaaagaaagaaaaaggaaaagagagacatggctctttcttgcctaaaatttcatcctccaggtcttcatatggctggatgtttcttgccattcatatctcagcttaaaggtcagtgaggcctcccctggcctttcagtctaaatgcgctaccgaagcattgggtattgtttcacctgtcacacttctctgcatggctcatattactacctgatcttttatttctacatttattgtgtcactccaccatcattagaatgttagctcaatgagtgtagaggcttctctgtcttattcacagccatgtccccagagcctaaaacttcattggcacatagtagacgctgaatgaatgaatgaatgaatgaaggattgaagtatcgaaaaatttaaacaattaaaaatcatgacccagcactgtgggaggccgaggcaggtggatcgcttgagctcaggagtttgagaccatcgtgggcaacatggaggaacctcatctctattaaaaataaaaaaaaaaatcccccaggcgtggtggcatgcacccgtagtcccagctactcagaggctgaggtaggagatttgcttgagcccaagttcaagactgcagtgagctatgactatgccactgcactccagtctgggtgacagagtaacaccctgtctcaaaaaaaaaaaaattcatgaggccaggtgtggtggcttatgcctataatcccagcagtctgggaggccaaggcgggaggatcacttgaggccaggagtttgagaccaaccagggcaatgaagcaagaccccatttctacaaaaattaaaataataaataaataaataaagtcatgaaaaattccagacatgcttaaaaatcagctagaaaaaccactaggtttacatgacacctactgataataacattattcactttgcattcttttacacccaagtcaccctggagtatactaaggctgttacactctgaaaggaaggaataaactctaggtgacattcagcagctgtccaggtgatggctgaggagctgacctggtagaaggggagcactccttggagaaaggatcttctacctgtacctgagcacataaagaagtgaggatctacccaaagaagcaaaaaggaatctcaattcctgacaaggatcgatgtctagaatggacaagtttcttagcaagaagaactatggagaagttgagttcttacaggagccaaaaggacttgagttttaccagagtatctcaaatcaaccaacaggttcagaaatttgtactcctaggtatttcctggattttgtgagacataaatgcaatatctagatacatatgccttccactagggagacattagaaacctttctcctcttggaacctgtccacaggttccaagacctggagcagcacccaggagatacaatggcatgaaactcctgctctgaggacaatctttgatcaagattacaaaacacatcacttttggagcttaagaggaaaccttttatccctccaaaagcatccaaaacccttgaaagttacaaggcacaggaaaagtcactgtcacaacccctgaactagtaatggtacaattataattacccatcccaagctgaaatgagtgatactgcatggactgaccggggtttgaatccagactcctccacttactgtgtgaacttggccaagttccttaacctctcagagctactattttttccatcggttataaaataatggaataatactctttcagggttattggcagggctaagtgagccaaggtgtatcaggcccttagcaaaagagaaaaggcttaatcattggtgactattgtaattattgctgtcatttgtaaataaaagtggttgttatagataaaaatattggagactagagaattgtggctcagaacttttagttatgtgaatccatttacaaaagagctaccaaagaatagttcaaagtccaaagctcagattgctacatgctaattctttgccatacccctttttgagaaatctctttgaaattttgggtatataagctaatatggcatgttatgaacaatatgttattgcttctctaaaaggaattatattgtatatccgcaggatgagactcaccactcttaggctataattagttcatgtccattaaatagcagttgcacaacttcctagtaatttactggtagcctaaattataaggctgctatttgaaaatgtttttgcctgagtcatttttccctctcagtctcacttaagtctgggtctcttaaactagaataggaattagctgctttttgcagatcagagaacagattctgaaatcatccatattacgatatcctaaatttcaccaagggaaagagaaagtttatgtgacaatcaagaaagattatggcaaacaaattcacatggaattggctttaacaaacctttttcatacctcctcagaaacaacagttgtaagaaatatcattagtttgtgtgtgtaagaaatattattagttggtgcatgacatttcatgttaaattgattataaagacatcgattaggtacagtgtacactgttgagcaataaaatttaaatcaatgacagacgctatccaacaatctttaaagagagcagcatcactttttaataagaagaaaaaaaggaatgctaggattgatatcactctcaatgccattgcaagaaaatacacttttgaaaatcttaaaaagatacattaggaaagtgaaaagcatagcaatcattcaaaaaagaaatagtatcatataaaaatgaaatgtatttgcatttattcagagaatctaaagcaaatcaatactacatcaattacaggtactagaaattgaacagtagctggttaacaaaagagcatttacactattctttaacatggcattggacaacatcaccacaagcacaacctgaaaattgagtgaaaagcaaacacactgattgtcctatctgatctgcacccataaactgtatctgatgaattttaatgacattaaaaaaaccgatgggtaacaatatattaacccatcagtgataaggggctgactggagtcaaagcccctgcacttaagggtcagacacctgtttagaaaaataccactgagatggtcaagaggggccttgttctcaatattctccatcaactctgccacacttgtacaagtttcatttacattttcttatccaattacatcttgctcaattcctcactacaatttatagcaaactttacaaagcttttgacctgtatcatcttattaagcttttatgaaaaatcaatggagttccatcatctcacgaggctcttcctcacacagttgtcagtgtgagtggagaagtctatttatccccaaatctggagaagaggtacttatttacaagctaggctccagtacgtaggaaattattttatttttctaaaatacaacattttaaagaattgcaaccttgtaaaaatgagcctgaaaggaaaacaaaaacagccagtttttaatcttctgtctttctttaatgtgctcacgggctcttcccagaataacgcatcattctctggaccaagagaactcaggaagccgacatgccgagacagctgagtcacttgagaaaaagagagagacctgccgatcgcctccaagaagagaaagaaactgtcctggagcccaagggacatgccatgctgaggagctcagacacacacgcgcctccctgcctcacccaccacttcctatggagggcttttttaaaggttcgcatttttaaggaagaaatggcaggctgtctcttattactttgccaatcaacaacgtaaacccttctcttcctctgcttcctctccgaaaggtaccggattgggttccagaaatttttaaagagaaaattcaagccaatttaataattgagtcaagaactagttgtagaggcccagcttctcatcctgcccagattcactgaatggcaaatactccacacagcactgttttccacctgctcccctgagcccaggatctgtgcatgaggccacctccgcccggacccctacacatggctgccctatgggttcctcacactcagtttgtccaaacctgacctcgccgtcatctccccagcctctctctacagatagttcagtgttcttactgccattcccctggtaacttgggccagaaatctgaaagccagcctagaatcctcttaccttccaaatgttgcatgaatctgtaccctctctccccaccctactcctgatcaccaattccatctttacaatcaacacaatagcccccaaaatctctcctacactatcacaaattgcttcccaactgctctttctgcctgccttcttggccatataaatgcataatagactctgataatctggctagaaaatgtaattctgaccatacactcgtctccactgcaatccttctgaaactccatcagtatcagtcacattcagcacaaggcccagcttttgtgggaagccaaacttctcagtcatgggcctacagctgccatttcctgaaagctctgtatataccaggccatgggtttttggttttccacataaaatgcttccccacaaacatagggaatcatagactccttgcaaaaatgactccctctcgaatcctaggatttggagacttcagtttggtttctgttcagattgaaaatacaacaaatgacaaggaactctgaaatccacacagtatcttgcctttgccaatagcctctgcctccccttcaactttaagaactgtagtgacctatcagagggagaagcagaatgcctagaaactccaccaacatgtaagcatcaacctaaagactctacaggtggccaaggcaaaggctccaaggagatcagagagttaggaagacacagcagatcctaaataatgagctaatttcctcctacaaaaatgcagaagagcagtgcttaggcacacatgttggtggcagtcagacctgggttcaagttcccctctgccatctactaagtatgagaccttgagctacataatctgtgagccttagtcttgtcacttgtaaatgatgatgttcctaagagtgtaaaattctcaaaggttactggaaagactaaataaggacttgacatcaaacctagcacagagagctcaataaatgcaggtattactaatattgtaaacatataagctcaataaatgcagttattactcatatattagcacatgacctaacaagatttcctacaagttatcatgattcgctgtactcaataatacccttttttctcgatgacctatttcttatgttacttttcttttctttcttttcctttttctttttctttttttttttttctgagacaggatcttgctttgtcacccatgctagagtgcagtggctcactgaagcctcaaactcctgggctcaaggaatcctcccacctcagcttcccaagtagatgagaccacaggcatgcaccaccacaaccagctaattttttaaattttctgtagaaaagcagtcttcctatgttgcccaggctggtctccaactcctgggctcaagcaatcctcctgcttcaacctcccaaagtgctagaattatggacgtgagccacctcacccagcccctgtgttgattttctcaacccactctgtagcatgcaaaataaccctgcttgatataaccagagagtcaaacaaaagttaaggtgcattttccaaatgacccaagaatcttttttcaaacacccctgaagcttgactcttttctggattcagtcctagcccttcttttcttctcatgcttcacggtgtctttgggaagctcatccacttccacagtatggtgtgccttgtgagttagctatctttttccttttcctgacagaatgtcagttctcattcaaccgtccatctctccctcatgtgcctagaacagtgggcccacccagagcttgggaggtgggcctggtcttaggctaatttgtcttctttgccagtgacaggttcaggaaccgcagtgatctgttgacccagtaaattgattcagaaatgggcatgggacccatggtcagtgtcctggaaaaggcttctgtgcattgttcttttaagagagacatttcaaaatatggtctcttttctggggggcattgttgaatgcacccattgatgaggcgtggagctaatggaaccatcagcccccagtcagaggagaaggcaacacagagaaggcatgcagaggccagaggacatcagaaaagcaaggctggagccccaagtgaaataagactgaccaccaccttacctctggtgccctttaatttttctgagctgataaatctcttctgttttttgggttgtatttctgcaattacttgcggtccaaagtactctgatgcatatggcttcaattgccacccatagctgatgagttcaaatttatatctccagcaagaaccgttttcctaagcttgcatgcctgca

SEQ ID NO: 23278 - DNA, 3941 bp, Homo Sapiens
  misc_feature (3939)..(3939): n is a, c, g, or t
ttgggaaacccctacctgtctgtacctgtaggtcttttctctggggtctggaagaagaatccttcaatatcttgccttctggtaatctgagagcagggcgagaaaaggaagatcagagttccacccttaaatctgtaggttttcactcccccactctcctttgcagtcccgtggagtctccatctgagccctttcctagtccaggcatcccgatgttggtggatggcccatctgagcggccagccctgtgcttcttgctgttggctgtggcaatgtctttcttcggctcagctctatccatagatgaaacacgggcgcatctgttgttgaaagaaaagatgatgcggctcggggggcggctggtgctgaacaccaaggaggagctggccaatgagaggctcatgacgctcaaaatcgctgagatgaaggaggccatgaggaccctgatattcccacccagcatgcactttttccaggccaagcatctcattgagagaagtcaagtgtttaatattctaaggatgatgccaaaaggggctgccttgcacctccatgacattggcatcgtgactatggactggctggtgaggaatgtcacctacaggcctcactgccacatctgtttcaccccaagggggatcatgcagttcagatttgctcacccaactccccgtccatcagaaaaatgttccaagtggattctgctggaggattatcggaagcgggtgcagaacgtcactgagtttgatgacagcttgctgaggaatttcactctggtgacccagcacccggaggtgatttacacaaaccaaaatgttgtctggtcgaaatttgaaaccatcttcttcaccatctctggtctcatccattacgcaccagtgttcagagactatgtcttccggagcatgcaggagttctacgaggacaacgtgctctacatggagatcagagccaggctgctgccggtgtatgagctcagtggagagcaccatgacgaagagtggtcagtgaagacttaccaggaagtagctcagaagtttgtggaaactcaccctgagtttattggaatcaaaatcatttattcggatcacagatccaaagatgtggctgtcatcgcagaatccatccgaatggccatggggctccgaatcaagttccccacggtggtggcagggtttgacctggtggggcatgaggacactggccactccttgcgtgactacaaggaagctctgatgatccccgccaaggatggcgttaagctgccttacttcttccacgccggagaaacagactggcagggtacttccatagacaggaacattctggatgctctgatgctgaacactaccagaatcggccatggatttgctttgagcaaacaccccgcagtcaggacttactcctggaaaaaggacatccccatagaagtctgtcccatctctaaccaggtgctgaaactggtgtctgacttgaggaaccaccctgtagccactctgatggccactgggcaccccatggtgatcagctctgatgacccagctatgtttggtgccaaaggcttgtcctatgatttctatgaggtcttcatgggcattggggggatgaaggctgacctgaggaccctcaaacagctggccatgaactctatcaagtacagtaccctgttggagagtgagaaaaatactttcatggaaatctggaagaagagatgggataagttcatagcagatgtggctacaaagtgaggagaagctagccagccctctacaagctgtcttcttgcacacgctgtcacttcctctcactcgttcttgaatcagctccatgtgcccatgaaatcaatggcctctgtatggagcgaccctgtgagaagcacttggctggctgagcaaattcatcctctggaaatattctctctcagccacagtgacattgaccctcttggttttctcctctctctggccatttcttccagtttccctatttcagagtcttctcctctctctgatctctgtgctgtttcctcaggactcagtcctgggctctcttctattctggtctctttatttttttatttttgtattttttcgagatggagttttgctcttgttgcccaggctggagtacaatggtgcgatctcagctcagtgcaacctccgccacccgggttcaggcaattctcttgcatcagcctcccgagtagttggaattataggcatgtgccaccacacccagctgatttttgcatttttagtagagacaggttttcaccatgttggcgagctggtatccaactcttgacctcaggtgatccactcgccccttggctcccaaagtgctggaattacaggcgttagccaccatgcctggcctattctggtctctttaactctctcctctttatttctcttctctctctgtacacttttcctgggtggtctcatccattcctttgctttttcataccatttatttgttaatgattcccacatttatttatgcacttggagagctcacaggaatctcagaaactgatgaggtacaattctgaaccctcagtctcttccctttaaacctttctttttctctactttaatttttctaaagagtgtcttgctatgttgcccaggctggtctccaactcaagtgatcctcctgccgcagtctcccgaagtgctgggattactgacatgagccaccacactcagccctttaaacctttccctggcctttcccatagctggtgaaggacacctccatccattccacgcagttgctcaaagcagaaattttcagtgcaagtcttgatgctgcgccgtcccccactccctacatcagaacgcatccctcatctggactccagcggtggcttcttgatgctgcgcggtcccccactccctacatcagaatgcatcccgcatccagactccagcggtggtgctctacctgcacgctgttgccaagtccaagctaccatactcctgcctgagctatgacaacagcctcctcactgatctcccctttcttccctttgcctcctccagctcatttttcacagtgtagaatgacattttgtttgtttgttttgttttgtttgagatggagtctcgttctgttgcccagggtggagtgcagcggtgcgatctcggctcactgcaacttccactcccgggttcaagcggattctcgtgcctcagcctcctgagtagctgggattacaggcatgcaccaccatgcccggataatttttgtatttttagtagagatggggtttcactatgttggccaggctggtctcgaacacctgacttcgtggtccacccgccttcggcctcccaaagcactgggattacaggcgtgagccacccggcctggcctagaatgacttttaaaagatcaaattaaatcaggtcactcctttgcttacaacgcagtgcgtttagaggtacaccccatgtctccacagggcatacagcatccgatttaatctggatccattccggcgcttcctctcccagtcacccagagggccccaaccccggcggccctttcttcctcaaatgtcctcggctctataccgtgcctgggtcttttctctttctctctgcctggaacattccttctttccccttttgtcttgcccactcctgtttacccttcaagtttcaagttcatgtcactgtctcagagaggttttcctgtgctcgccctgtttctctcaggaagccttgctcttttccatcatgcctctaatcacagcttataatcggatatttatttctgtgtctacagtcttgccctgccagactgtaagccccatgtgggcaggcgctcatgattgtttctgattgtttcacgcatgctgctaacccagagcctgggcccaaagctagttagtactcaataaacaatgcattgaaaaaaaaaaaaaaaaanta

SEQ ID NO: 23279 - DNA, 3760 bp, Homo Sapiens
gctgcaatatggcggaggcggaaggggaaagcctggagtcctggctcaataaagccaccaatccttccaaccgccaggaggactgggaatacataattggcttctgtgatcagatcaacaaggagctggaagggccacagatcgccgtccgactgctggcccacaagatccagtccccacaggaatgggaggcgctccaggccctgacgtacctgggggacagggtgtctgagaaagtgaagaccaaggttattgagctgctgtacagctggaccatggccctgccagaagaagcaaagatcaaagacgcctaccacatgctgaagagacagggcatagtgcagtctgacccaccaattcctgtggataggacgctgatcccctctccaccacctcgtcccaaaaaccctgtttttgatgatgaggagaagtccaagcttttagccaagctgctgaaaagcaaaaacccagatgacctgcaggaggccaacaagctcatcaagtccatggtgaaggaagacgaggcacggatccagaaggtgaccaagcgtctgcacacgttagaggaagttaacaacaacgtgagactgctcagtgagatgctgcttcattacagccaggaggactcttcggacggggacagagagctgatgaaggagctgtttgatcagtgtgagaacaagaggcggactttatttaaactcgccagtgagactgaggacaatgataacagtttgggggacatcctgcaagccagtgacaacctctcccgggtcatcaactcttacaaaacaattattgaagggcaggtcatcaatggcgaggtggctaccttaaccctgcctgactcggaaggaaacagtcagtgcagtaaccaaggcacgctcatcgaccttgcggagctggacacgaccaacagtttgtcctccgtgttggccccagcacctactccaccctcctcaggcatcccaatcctccctccaccaccccaggcctcaggacctccacggagccgctcctctagccaggccgaggccaccctggggcccagcagcacaagcaacgccctctcctggctggacgaggagctactctgcttgggcctcgccgacccagcccctaatgttcctcccaaagagtcagctgggaacagccagtggcacctgctccagagggaacagtccgacctggacttcttcagccccaggccggggaccgctgcctgtggcgcctccgacgctcctctgctccagccctcagccccctcctcaagcagctcccaagctccactgccgcctcccttcccagctcctgtggtcccagccagtgttcctgcccccagtgcgggctcctccttgttttctactggagtggccccagccttggccccaaaagttgagcccgcagtccctgggcaccatggcttggcgttgggcaacagcgcgctgcaccacctggatgccctcgatcagcttctagaagaggccaaagtgacctcgggcttggtgaaacccactacctcccctctcatccccaccaccaccccagccaggcccctcctgcccttctccacggggcccggcagcccgctcttccagccactgagtttccagtcccagggcagccccccgaaggggcctgagctctccctggccagcatccacgtgcccctggaatcgatcaagcctagcagtgcccttcctgtgacagcctacgataaaaacggcttccgcatcctcttccactttgccaaggagtgtcccccaggacgacctgacgtgctggtggtggtggtgtccatgctgaacacggctcccttacctgtcaagagcatcgtgctgcaggctgcagtgcccaagtcaatgaaagtgaagctgcagccaccttctgggacagaactctctccatttagccccatccagccacctgcagccatcacccaggtcatgttgctggccaatccactgaaggagaaggtgcggcttcggtataagctgaccttcgccctgggggagcagctgagcacagaggtgggcgaggtggaccagttccctcctgtggaacagtgggggaacctatgaccccagaggacgctgtgatctccaccttgaagccaggcaggctgccctgagacgaggagggctctggtcccgtcactctccatgccctgacaacagtgcttgtagctttgatgtggaacaggggccctgggcatttctgctgagaaccaaactgctgctgtgataacctctcctttggcccctaaaaggacctgtttttatctacctgtgtgacttgaagtggccatatgctgtcaggggtgcggagtggcccctgacttcactgctgtcccgggaacatggacccccaggcttggcgtaggtgtttgcttccttctactggcattcactgaagccactggggtggggggtggggggtgggagtctctaaagagagactgtcatgggtcattccccacaagagccacatcctcacacctgacagatgcacggcccaaggggctgcagccctgttgcaattccatgcttcccccgccaaccagctcctgctgccatccccagggaggtggcccaggaaggtgcctggcccagaataaggaactggcatactgcaaagtccccagccctgcctctggtggacagcatcgtcctggaatggccacggagtgatgagttgtgtgcttgtccctggcagtggcaggctgtgtcctatggacatcttggcaggacatggaatttggcctcatgacaggcccaactagggataggaaggaaaatgaagagagccagtatttccccttctccagaagcaggtactcagctttctgggaaaagcgtgcctccagccgtggggacaggccatcctactgactacctcttgcttggcatgaaataaactgctatcctccccttggaatctaccgccactctacatcctactgctttggcctccctctcctctcaccagatggcatgtggtgtggcacctgtggctggacacaggaggcctcaggatcacaaatgttacactagacatatgtcctaatgtgctgcccagaaacctcaactgttccccagctactgaggggcactgtcagcgagatgttgggtctggaggtgatgagatcgggccacacttgagctgagtcaccagaccctattgcttcaacagtgcttggcccccgccagcttgtcccagccactctagctgctggatgtgatcctgggacatgtactccaagcctccgtcacaaaaaaaaaatcaccagctgccatagacacgggggaagcttgcggagcccaggtgaacaagctcagcaatcggacatctctggggaaaggaaggtggcacagaccatgttccctggttcctccctgccccttgccaggcttccttattccttactatgggaagaggtcatatcccttccctgcccctcgctgtctttagcaagcaggtttcactgcttcattagaagaggacaagtcaaaagtgaatcatttttcactacttaaggaataaatccaagagctttccagagactggctgctgcagccctgggaatgtctgtggaattactatgtggaaatggaactttgtgttatgctctagacattacagttatttgagtgttactcgttactgttgaggtcagtgcttcgtggcaaatggctgtactggatatcccagctctgctgcccttgttttgctgcatgttaaataaaaccattttcactgt

SEQ ID NO: 23280 - DNA, 2013 bp, Homo Sapiens
ctgggcggcgcttcggctcctcccgagccgcctgctagccccgcgccgcactccatccccacaggctggggacgggcccggtgcggctgtgtgggttcgggagcggagttgcagaatccaaggacccattttgttctttctccgcactgctttatgggaggcattatggcccccaaagacataatgacaaatactcatgctaaatccatcctcaattcaatgaactccctcaggaagagcaataccctctgtgatgtgacattgagagtagagcagaaagacttccctgcccatcggattgtgctggctgcctgtagtgattacttctgtgccatgttcactagtgagctctcagagaaggggaaaccttatgttgacatccaaggtttgactgcctctaccatggaaattttattggactttgtgtacacagaaacagtacatgtgacagtggagaatgtacaagaactgcttcctgcagcctgtctgcttcagttgaaaggtgtgaaacaagcctgctgtgagttcttagaaagtcagttggacccttctaattgcctgggtattagggattttgctgaaacccacaattgtgttgacctgatgcaagcagctgaggtttttagccagaagcattttcctgaagtggtacagcatgaagagttcattcttctgagtcaaggagaggtggaaaagctaatcaagtgcgacgaaattcaggtggattctgaagagccagtctttgaggctgtcatcaactgggtgaagcatgccaagaaagagcgggaagaatccttgcctaacctgctacagtatgtgcggatgcccctactaacccccaggtatatcacagatgtaatagatgctgagcctttcatccgctgtagtttacaatgcagggatctggttgatgaagcaaagaagtttcatctgaggcctgaacttcggagtcagatgcagggacccaggacaagggctcgcctaggagccaatgaagtgcttttggtggttgggggctttggaagccagcagtctcccattgatgtggtagagaaatatgaccccaagactcaggagtggagctttttgccaagcatcactcgtaagagacgttatgtggcctcagtgtcccttcatgaccggatctacgtcattggtggctatgatggccgttcccgccttagttcagtggaatgtctagactacacagcagatgaggatggggtctggtattctgtggcccctatgaatgtccgacgaggtcttgctggagccaccaccctgggagatatgatctatgtctctggaggctttgatggaagcaggcgtcacaccagtatggagcgctatgatccaaacattgaccagtggagcatgctgggagatatgcagacagcccgggaaggtgccggactcgtagtggccagtggagtgatctactgtctaggaggatatgacggcttgaatatcttaaattcagttgagaaatacgaccctcatacaggacattggactaatgttacaccaatggccaccaagcgttctggtgcaggagtagccctgctgaatgaccatatttatgtggtggggggatttgatggtacagcccacctttcttccgttgaagcatacaacattcgcactgattcctggacaactgtcaccagtatgaccactccacgatgctatgtaggggccacagtgcttcgggggagactctatgcaattgcaggatatgatggtaattccctgctaagtagcattgaatgttatgaccctatcatcgacagctgggaagtcgtgacatccatgggaacccagcgctgtgatgctggtgtttgtgttctccgcgagaagtgaccattgttggagcaccatccagagctagtgaccagtccagtggacagttagtgggagaatcaaaaatcctttccagaatgtctgtttctcactacgtgcaccgggtgattacaggcaccagtgcagtgatgattgtacttatttgacacatac

SEQ ID NO: 23281 - DNA, 2651 bp, Homo Sapiens
ctggcagagtgcagattgcaggggcacatgcgcagagaagacgggccagggccagagtagagagcagctgctgctccggggacccacctggggtggccatgagagctggtggctggaggccgggaggacccgtgaccagaggtaatggcactgaggggcccagggctggagagaccacccctcacctgtccagagctgaggcaggagcagtgctgtggaggatgccaggtcgggggagctggccctgagaggagagggggcctgggagccagcaccctgagccctggccctgatccactccagccctgtgtagcccaacagcccttcccctccttgcccagtcccctccccctgcaaggcactctccactcttctcccccaggggccacaggcagacctcccctctgtctctctgaaccctcctctgtctctcccagacccagatgtttccttctgccctggggtagtcccaggccctgccccaggcaaagtcaaactgggggctccaggggctcccctgcaccaaggcctgcagagtcaggttcttcctcccgcaccacagagggcggggcttcctgcccaccccacccatgtcactgcccaccagcgccatctcccacacagggcctggagaacagctggcgccagcaccgcgaggccgcggcgtatctgcatgggcgcctgcaggcactggggctgcagctcttcgtgaaggacccggcgctccggcttcccacagtcaccactgtggctgtacccgctggctatgactggagagacatcgtcagctacgtcatagaccacttcgacattgagatcatgggtggccttgggccctccacggggaaggtgctgcggatcggcctgctgggctgcaatgccacccgcgagaatgtggaccgcgtgacggaagccctgagggcggccctgcagcactgccccaagaagaagctgtgacctgcccactggcacacagctggcactggcacacacctgtcccatgcccaccctgagggatcaggagcaaacagaccctgcaaggtcctccaggcctggggacaggaaagccactgacccagcccgggaggcagaaccaggcagcctccctggccccaggcagcccttttccctccagtggcacctcctggaaacagtccacttgggcgcaaaacccagtgccttccaaatgagctgcagtccccaggccatgagcctcccgggaatgtttaataaagggcctggccacctctcctcactgtgtggggtggtctgtgaaagagtgagaggagagcatctctgctccctgagctgcctgattgtggactttagggggacactcctcatcctggagcccacagggtagatcctcccctggaggaggtgctgtcaccacactctagccccagatgtcacacccccaaacgtcctcacgcaccacatccaggtgaacccacatggcgcacagggctggttggagacccctgtcatggacaagggtacctgcgtgctggagagcgcacagccaggacctgagcccatgacacgtggaagcctccaatggaaggtcccctatgctcccatccagccagtgcccacccctcaactgcctgacttctgtgaccatagatcagcctggcatatttgaatttatttatttatttggaaacggagtttcactcttgttgcccacgctggagtgcagtggcatgatctcagctcactacaacctccacctcccgggttcaagcgattctcctgcctcaggctccggattagctgggactacaggtgtgcaccaccatgcccggctaatttttgtatttttagtacagatggggtttcactatattggccaggctggtctcgaactcctgacctcaagtgatccacctgcctcggcctcccaaagtgctgggattacaagcgtgagccactgtgcccagccatagttgaatttcatggtcagtggaacacacagcaggtcctccactgtgccagcttctttcacttactgtttttgacactcacatgtaccgtcgtgggcgccggtgtgtctttgttgctgagtgccgtcccgtcatatggacgtgcgtcggggcccccggtgtgtcttgttgctgagtgccgtcccgtcatatggacaccccatgaattggtgggtcaatcaccataggtgaacatctggggttatttctattttggggctgttttgaatacggaggtagtgaaattcttactcaagcctttgtgtggccatatattttcatttttcttggataaataactaggagtggaattgcagggtcatacaataggcttaaccttatacgagactgccacgaaattctccgaagtggctcttccatgtttcattcccgcagctacagcgtccagggtgctccacgtcctcacccacactccatgttgtctttttttgctagggggtgtaaaatcctgtctgatttggttttagtttgcatttccctgatgcctattgatgttgagcaacttctcataagctatcggccgtttgtagatcttctgaaaagtgtcagttcaaatattttgttcatatttggatttttatcttcttattgtcaatgtgtgatcattttaaaatatattctagatactatcagaaaaaaaaaaaa

SEQ ID NO: 23282 - DNA, 3277 bp, Homo Sapiens
  misc_feature (156)..(156): n is a, c, g, or t
ggtgatgagcccttgggttctcgctccgactgctaaattcgcttggccgggtccaccttctcgtggcctcactcgccacacggatcagaatccggagcaggcagttctctctattctgaggctcctgcggctgccgcgctgacttccctgtgtggnggagggaactctgggcaggctggttttcttggaatgtgtttacgatgttgaatgggacttgaacaggaagctggacgctgcagctggaactagcgtgccaagttatttatgattccatctgatatacataggagagaaactgatgaagaattctgatggcaactgtatgatagaagctatataaagtcaagtgtccattttctttcaactatatttgagcatacccaggatttaagtcgtggaactgaacatttatttggctgatcctcatcatgaaccgtgcttttagcaggaagaaagacaaaacatggatgcatacacctgaagctttatcaaaacatttcattccctataatgcaaagtttcttggcagtacagaagtggaacagccaaaaggaacagaagttgtgagagatgctgtaaggaaactaaagtttgcaagacatatcaagaaatctgaaggccagaaaattcctaaagtggagttgcaaatatcaatttatggagtaaaaattctagaacccaaaacaaaggaagttcaacacaattgccagcttcatagaatatctttttgtgcagatgataaaactgacaagaggatattcactttcatatgcaaagattctgagtcaaataaacatttgtgctatgtatttgacagcgaaaagtgtgctgaagagatcactttaacaattggccaagcatttgacctggcatacaggaaatttctagaatcaggaggaaaagatgttgaaacaagaaaacagatcgcagggttacaaaaaagaatccaagacttagaaacagaaaatatggaacttaaaaataaagtacaagatttggaaaaccaactgagaataactcaagtatcagcacctccagcaggcagtatgacacctaagtcgccctccactgacatctttgatatgattccattttctccaatatcacaccagtcttcgatgcctactcgcaatggcacacagccacctccagtacctagtagatctactgagattaaacgggacctgtttggagcagaaccttttgacccatttaactgtggagcagcagatttccctccagatattcaatcaaaattagatgagatgcaggaggggttcaaaatgggactaactcttgaaggcacagtattttgtctcgacccgttagacagtaggtgctgacatcaagaacaagaaatcctgattcatgttaaatgtgtttgtatacacatgtcatttattattattactttaagataggtattattcatgtgtcaatgtttttgaatattttaatattttgaaaattttctcagttaaatttcctcaccttcactattgatctgtaatttttattttaaaaacagcttactgtaaagtagatcatacttttatgttcctttctgtttctactgtagatgaatttgtaattgaaagacatattatacaaatacctgccttgtgtctgagttctatttagttagcatcttgaaatttgtattcattttccagatggctagtttattaatgatttcccaaaagccataccttaaagataactttttaaattctgaagagacatgccaatgtcaaactaaacatgttctgtttttaaaccaacaaacatgttactattcattggacagatatcattttatgtataaatactgttcacatcactgggaaaatgtaaactttaacataatgccacaaggtcactaatttctagcaggtaaaattataaggatataaattccaataataaaccaaatgtatttagagtatttattagtaaatgcaaggtgatgttagttatgatcagttatactctaaatatttaatttgttttataaaggtagtgaaaaaatgaaaatttgctatttattaaaaaacattaaatttcattccaaatgagataagtgatattactataacatctaagcatcatctgatttgatattccctaaaaaacatttggaatatatgctatctatagattcagtatctactacccatatttactttaccaaatatatttctcctcactgcataaggactactcttctcatattttcttctttgatgaagatatttttcaccaaagtttattttgtgatgccctcttggttttgatactttaaaatctgtggcacccgttctacatgaattatcaatatttggtaaattcaatctgtatttgttttgttaaagtcaaaaatctcattttccaaaaaaaaaaaaaaaacccagttactgctcagtttagtcttgaacatgagcaataaaattctcttgcatttcattattgatgtgctgatgaacctggacttttaaaaatatttgtttcctatacctttaccctttacctaacagactaatttgtactcagtaaaacaaaaatttatggtcaaaatttctaacttggttcatcacattataagataaataaattaaattaatgaaaatgtgacttagagtaggggtagccctcaaaaatagatttatcatttactcattggaattttcttcaagtgttaaaggtacattttcactaggaaaagaaatcaaatatgcttatgcaatatatatttgtgtgtttttccttaatgttatatggtatatatgagccttcttgtttagtttcttttatctgctaagttgtaccttaattagagggcaatatatgtttcataaagaagagtctttataattttgtttgtcagatagtattttggaatttgtataataaggatgtttagaagccatataagtggctttttttaacagatagaatttgtatttttattgtactttaaaaagatttatgtaataggtatatatttagtggccatttattatcaatggtaacacaatggagtactaagatggtatttgcacatttaagatatgttactttaccaatttttaatggtaatcaactctgctactggcatgatgaaatagtacataactggtcattaattatgaacatttacttctccagtgcgtttttatgaagatctggttgaaaattgtatttctatgtaaactcaacgatatgtttggttttcctgaaaataaatgattttaaataaaaaaaaaaaaaaaaaaaaaaa

SEQ ID NO: 23283 - DNA, 1289 bp, Homo Sapiens
cgggggttggtttttaaagtctggggcctggagctgtaatacaaagctgcgcgtcccttaatttcctcggcggtttatgtgaagaaccagctcagtggactctacagattaaccaggggttttcaatgaatacagaaccatatgttcaaatcctacaggacgatcttttcctgtttgaacagaataaagagtttcaggtacccttgggcgagactgtacagtacttcccaaaccactgtcgacagcggtgaggtaaaaaccttcttggccctggctcacaaatggtgggatgaacaaggagtatatgcacctcttcattccatgaatgacctgagggtgccatttattagggacaatcttctgaaaacaattcctaatcaccagccaggaaaacctttgttggggatgaagattcttgacgttggctgtggtggtgggctgttaactgaacctctagggcggcttggggcttcagttattggaatcgaccctgtggatgagaacattaaaacagcacaatgccataaatcatttgatccagtcctggataagagaatagagtacagagtgtgttccctggaagagattgtggaagagactgcagaaacatttgatgctgttgtagcttctgaagttgtagaacatgtgattgatctagaaacatttttacagtgctgctgtcaagtgttaaaacccggtggttctttattcattactacaatcaacaaaacacaactttcctatgccttgggaattgttttttcagagcaaattgcaggtattgtaccaaaaggtactcatacatgggagaagtttgtttcacctgaaacactagagagcattctggaatcaaatggtctgtcagttcaaacagtggtaggaatgctctataaccccttctcaggttactggcattggagtgaaaataccagccttaactatgcagctcatgctgtgaaatccagggtccaggaacacccagcctctgctgagtttgttttaaagggagaaacagaagagctccaagctaatgcctgcaccaatccagcgtgcattgaaaagctgaagaaatgaattgtttctgagaactatagtaatatggcttggatatctgatgttttcaaatacaagaaatgtacaatttatcctttgagagagaatcatgaagaaaagaaggggcccctcagaatgatatttggcctcacgggaggacatagcccctggaggtgctgttgctatagttgcaagcaggaggataatgccggaattccaaaaaaaaaaaaaaaaaa

SEQ ID NO: 23284 - DNA, 2360 bp, Homo Sapiens
acgcgggggagctacaacagctgagacagaaaagaggtaaggaagtgttgggggctgggacaaccagctccccgacaactcctaggtgtttaaagaaggaggcaggaagacttgtgaagatgggaactatacaagaggcaggaaaaaagacagatgttgggtggagcaactgctacagaggtaaatatgattaactttacattccatctttcgtctgctcccaaacttaacagcaggtaatctgcttctagcaagtggtgaaggtaagagaagcatctgtataggaggcaagagatctgagtccttttgaaggcctatcctctgctctgtatctcaattactgttcttcatttcaattattcttacctactattcagttcccttgatcttttcttcttgggggctgtcttagggtcagggagattgcagaagcaccagaactaggagcagccctgagacatggggagttggagctgaaggaggaatggcaggatgaagaattccctagattgcttcctgaggaggctggcacttctgaagatcctgaagaccctaaaggagattcacaggcagctgcaggtacccccagcactttagccctgtgtggccagcgccccatgcgcaagcgtctttctgccccagagttgcggctgagtctgactaaggggcctggaaatgatggagcttcacccacccagtctgcaccttcctctcctgatggcagttctgacctggagatagacgaattggagacaccttcagactcggagcagctggacagtggacatgaatttgaatgggaagatgaactaccccgggcagagggtctgggcaccagtgagacagctgaaaggctgggccgaggttgtatgtgggatgtgactggagaagatggacatcactggagggtgttccgaatgggaccacgggagcagcgcgtagacatgactgtcattgagccctataagaaagtcctgtctcatggaggttaccacggtgatggcctcaatgctgtcatcctttttgcttcctgttatctacccagaagcagcatccccaactacacctatgtcatggaacacttgtttaggtatatggtgggaactctggagctgctagtagctgaaaattacctgcttgttcatttgagtggaggcacaagcagggcccaagttccacctctaagctggatacgtcagtgttaccgtaccctggatcggcggctacggaaaaacctgcgagccctggtggttgtccatgctacatggtatgtgaaagcatttctggcactgcttcggcccttcatcagttccaaattcacacgaaaaatccgttttctggacagcctgggggagctggcccaactcatatccctggatcaagtccacatccctgaagctgtcagacagctggaccgggatctccatggctcaggagggacatagcacaggactggataaagggccttagaaccagttagtgatctgcctacacctgaatccctgaaacatctgaactgttttgtaaatcatcttatccccaacctcagtaccaccggatcttcacttctcagtgggattttgtcctttgcatgaccctactttcagcagggctttgaggctgggaaactgatctgctgggtgactttcattccagttgctgggacggaaggctgaatgtagggtcattttgtatgggatatgcagagctctgggtttttttgttttttgttttttgagacggagtctcgctctgtcgccaggctggagtgcagtggtgcgatctcggctcactgcaacctccgcctcccggttcaagccattcttctgcctcagcctcagcgagtagctgagactaccggcgcacgccaccacgcccagctaattgttttgtatttttagtagagacggggtttcaccatgttggccaggatggtctcgatctcttgacctcgtgatctgcccgcctcggcctcccaaagtgccgagattacaggtgtgagccaccgcgctcggccagagctctgggttttaatcctactttagctgtagaaccttgggcaaataacttcatctttttgggtcctaattttcctcctgtctaactggagggactgtgatccttccaccttggatggaagaggcttacctgacagccagcctgcctgctgggagccaggagagtcagctcattaaatcttgaagaaccgctgtatgccctttttccttctaagtcatgtctgctgcctgtgagcctgggaaggagtgctttcaaaacctgtatttttgccctctttagtaaatttagaactgtagaggctaataaactgcgatgagacatttaaaaaaaaaaaaaaaaaa

SEQ ID NO: 23285 - DNA, 1706 bp, Homo Sapiens
gcggccgcaggtccgggcgccatggctgcggagcggacccggccgctgcaaggctctggcggtccgagcgtgcctagtagctgtgaacccggcgcgaggtcccgggccccggggcgctcgctcaggtaaatttttccataaccttatggagagaaaggactttgagacatggcttgataacatttctgttacatttctttctctgacggacttgcagaaaaatgaaactctggatcacctgattagtctgagtggggcagtccagctcaggcatctctccaataacctagagactctcctcaagcgggacttcctcaaactccttcccctggagctcagtttttatttgttaaaatggctcgatcctcagactttactcacatgctgcctcgtctctaaacagtggaataaggtgataagtgcctgtacagaggtgtggcagactgcatgtaaaaatttgggctggcagatagatgattctgttcaggacgctttgcactggaagaaggtttatttgaaggctattttgagaatgaagcaactggaggaccatgaagcctttgaaacctcgtcattaattggacacagtgccagagtgtatgcactttactacaaagatggacttctctgtacagtatttagcgtggactacaatgatgaactggatatcttggtgagcggctctgcagacttcactgtgaaagtatgggctttatctgctgggacatgcctgaacacactcaccgggcacacggaatgggtcaccaaggtagttttgcagaagtgcaaagtcaagtctctcttgcacagtcctggagactacatcctcttaagtgcagacaaatatgagattaagatttggccaattgggagagaaatcaactgtaagtgcttaaagacattgtctgtctctgaggatagaagtatctgcctgcagccaagacttcattttgatggcaaatacattgtctgtagttcagcacttggtctctaccagtgggactttgccagttatgatattctcagggtcatcaagactcctgagatagcaaacttggccttgcttggctttggagatatctttgccctgctgtttgacaaccgctacctgtacatcatggacttgcggacagagagcctgattagtcgctggcctctgccagagtacaggaaatcaaagagaggctcaagcttcctggcaggcgaacatcctggctgaatggactggatgggcacaatgacacgggcttggtctttgccaccagcatgcctgaccacagtattcacctggtgttgtggaaggagcacggctgacaccatgagccaccaccgctgactgactttgggtgccggggctgcgggttttgggtgcaacctctgcggcagccgactgcatgaaccaaacttctcacctaatggtatcatcacgcagtgcacaatcatttatctatgttttgccaggggccagggctcggggtgggggagggcttgttttattgacatacaacgcagcatgctaatggggtacaccattgacttcatttgtacttagttatgttggtcagtgttagaggatgcattttgggttcatctttcttgagtggagtattggttttaagtaaagaaagttaaatgatccattaatctgctaattggttgcctatgaaatcacattgtctgttattaaagctttttaccataaaaaa

SEQ ID NO: 23286 - DNA, 2680 bp, Homo Sapiens
  misc_feature (2486)..(2486): n is a, c, g, or t
atgctcctggacgcgggtccgcagttcccggccatcggggtgggcagcttcgcgcgccaccatcaccactccgccgcggcggcggcggcggctgccgccgagatgcaggaccgtgaactgagcctggcggcggcgcagaacggcttcgttgactccgccgccgcgcacatgggagccttcaagctcaacccgggcgcgcacgagctgtccccgggccagagctcggcgttcacgtcgcagggccccggcgcctaccccggctccgctgcggctgccgctgcggccgcagcgctcgggccccacgccgcgcacgttggctcctactctgggccgcccttcaactccacccgggacttcctgttccgcagccgcggcttcggggactcggcgccgggcggcgggcagcacgggctgttcgggccgggcgcgggcggcctgcaccacgcgcactcggacgcgcagggccacctcctcttcccgggcctgccagagcagcacgggccgcacggctcgcagaatgtgctcaacgggcagatgcgcctcgggctgcccggcgaggtgttcgggcgctcggagcaataccgccaggtggccagcccgcggaccgacccctactcggcggcgcaactccacaaccagtacggccccatgaatatgaacatgggtatgaacatggcagcagccgcggcccaccaccaccaccaccaccaccaccaccccggtgcctttttccgctatatgcggcagcagtgcatcaagcaggagctaatctgcaagtggatcgaccccgagcaactgagcaatcccaagaagagctgcaacaaaactttcagcaccatgcacgagctggtgacacacgtctcggtggagcacgtcggcggcccggagcagagcaaccacgtctgcttctgggaggagtgtccgcgcgagggcaagcccttcaaggccaaatacaaactggtcaaccacatccgcgtgcacacaggcgagaaacccttcccctgccccttcccgggctgtggcaaagtcttcgcgcgctccgagaacctcaagatccacaaaaggacccacacaggggagaagccgttccagtgtgagtttgagggctgcgaccggcgcttcgccaacagcagcgacaggaagaagcacatgcacgtccacacctccgataagccctatctctgcaagatgtgcgacaagtcctacacgcaccccagctcgctgcggaagcacatgaaggtccatgagtcctccccgcagggctctgaatcctccccggccgccagctccggctatgagtcgtccacgcccccggggctggtgtcccccagcgccgagccccagagcagctccaacctgtccccagcggcggcggcagcggcggcggcggctgcggcggcggcggccgcggtgtccgcggtgcaccggggcggaggctcgggcagtggcggcgcgggaggcggctcaggcggcggcagcggcagtggcgggggcggcggcggggcgggcggcgggggcggcggcagctctggcgggggcagcgggacagccgggggtcacagcggcctctcctccaacttcaatgaatggtacgtgtgacgggtcggggcctctctccctctccctgtccccaccccagcgcagcagccctccccgcagctagcagcgagggcaccttgtgatcatgttgttaaaattatgaatctgatttttatgatgatgaaaattttaccagcagaaggattttttaaagttttttttttttttttaataataatctaggcatgaagagcaaaaatatcccttccggagtctttgaagctgaaaatataaaacaaataaaaaataaaaaaataaaaacccacaaaaatgttgaaccaaacctccctgctaatctccatgcccacgttctttcccaccctgttcccagtcttctgacaaactgtgtacatagcggactcctcctttctcctccgaggtggttttaaaggctttttggtgtatagaagtttgtccatttgtaaaactccggattgcgttcctccccgccttccgccccttcccttccctaaagtgatgggctttctcttttctctttttagtttacccggtttctttttaagtaatgtggaagaaaatggtttattttgtattgtggtattgaatattgtgttcctttttatgaggcaacctgattgtaaacttcatgtaactatagactggaaaaaatgagccgtgccaaagtctcccttctgtttcttcagcacattgacccatagcacacacatacacaccaccaccaacaacgcttgtgaatgtatttttctgttagctgggtttacatgtgatgttttagtgcttttgcaagttcaatttgttagttcctgtatgaaagattgtgggggaaaaataaacgtcgtgccgttagctttttccgtaataacacccttccttctgtaaatacccgttaccatatttatccattngtaattaaattatggtattaacttgctacagaggaaacaatatttataaagaatgtttcttactataaatatgtacaattgtgggcataaactgttttagattttttatttgaaggttttaagtggtttgatcatttcttgtgatgttttgagagtaatgcatacagaaatataataaaatgtgttgaaactgc

SEQ ID NO: 23287 - DNA, 3337 bp, Homo Sapiens
gcggaagtttggtggggagggtcggagctctggtggagagagtgttgtctaaaacaagttccggaagggaggctgcccttcgcggtccgagaaccaccggcctccccagtttgagggctgttaccccgtgcgcgcttcgacgttgctgctgttggctctcctcgcccctcgttcccttgggaaccgcctgggaactccgccatgtcatccacttcgcccaacctccagaaagcgatagatctggctagcaaagcagcgcaagaagacaaggctgggaactacgaagaagcccttcagctctatcagcatgctgtgcagtattttcttcatgtcgttaaatatgaagcacagggtgataaagccaagcaaagtatcagggcaaagtgtacagaatatcttgatagagcagaaaaactaaaggagtacctgaaaaataaagagaaaaaagcacagaagccagtgaaagaaggacagccgagtccagcagatgagaaggggaatgacagtgatggggaaggagaatctgatgatcctgaaaaaaagaaactacagaatcaacttcaaggtgccattgttatagaacgaccaaatgtgaaatggagtgacgttgctggacttgaaggagccaaagaagcactgaaagaggctgtgatactgcctattaaatttcctcatctttttacaggcaagagaacaccttggaggggaatcctattatttgggccgcctggaacaggaaagtcctacttagccaaagctgtagcaacagaagccaacaactcaacatttttttcaatatcttcctctgatcttgtttctaagtggctaggtgaaagtgaaaaactggttaagaatttattccaacttgccagagagaacaagccctccattatcttcattgatgaaattgattctctctgtggttcaagaagtgaaaatgaaagtgaagccgcacgtagaattaagacggagttcctagtgcaaatgcaaggggttggtgtagacaatgatggaattttggttctgggagctacaaatataccctgggttctggattctgccattaggcgaagatttgagaaacgaatttatattcccttgccggaaccccatgcccgagcagcaatgtttaaactgcacctagggaccactcagaacagtctcacggaagcagactttcgggaacttgggaggaaaacagatggttattcaggggcagatataagtatcattgtacgtgatgcccttatgcagcctgttaggaaagtacagtcagctactcattttaaaaaggttcgcggaccttcccgagctgatcctaaccatcttgtagatgatctgctaacaccttgctctccaggtgaccctggtgccattgaaatgacatggatggatgtccctggagataaacttttggagccagttgtttccatgtcggatatgttgcggtcactatctaacacaaaacctacagtcaatgaacatgacttgttgaaattaaagaagtttacagaagattttggtcaagaaggctaagccaaagacaaggaagatgcttaccatatgtattctttctttcatagatatttttgtctatttggatcgcattaattgtttccagtaaaactcttttaccacagggaaatacacatctcacttcagagttccattaggttttatattgtacttttcctccattacttattaaatactcctattaacaaaaggtacaaaataacaggttatgaggaaatgagcgatatatgaacggcataaaaacagaaattacccagtaaaaaggatgtcagaaattgacatacaaatatttacaatttttatgaatggtggtctttgcaaagagcatttatattttcttttttttttactaaaatgatatagggtttattttatattttcaaaaaaattgttaaacatcattcttatcaatgtaaaatttacgttattaaaaaattacaaatgatagaatctttactcagggatgggcaataaaacagcaaagagctttgtgattgggtttgaaagattttgaattatagacagtgctcttaatagtttttaataagttgatatttttttctgtgtagatttaaataatttctttaaaagcgtaagctttggctgggcatggtggcttatgcctgtaatcccagcactttgggaggctacgatgggtggatcacctgaggtcaggagttcaagaccagtctggccaacatggtgaaatgccgtctctactaaaaatacaaaaattagctgggcatgatggcgagtgtctgtaatcccagctactcaggaggctgaggcgggagaatcacttgaacctgggaggcagaggttgcagtgagctgagatcgcgctactgcattccagcctgggcgccgagatagcgccattgcactccagcctgggcgactgaataaaactctgtctcaaaaaaaaacaaaaacggtaagcttttatatttaattaactgatacctttcactgtgcaatctcaagaggaagattttctaaattagacattgtctttaccttaaagaagaaaattgtctatttcagtgtcttttttagcaagattgaccaaaacaggtggtaggtgtgtaatttttaactgtcatgaaatactgtaatgcgcacctttgctaataaggaaatggtctccctttgaattatgggaagtttcttgtctgtgatatggggtgtctgtgtacatatatgtatatttccttttttaatacaggataataatatggggtcttgtccttcaccttttaagttcagggaacagtttgtcctgaccacacatatgttatcagtgtaatgctttatgaagctttagaaatgagctcatgactcattaaaaaataataaacgatgctattttaatattttcaaataaataatctgaggatgtgtttcatactttagcatcaacgctgagttgtgccttgtagaattgcattgtctatacatgcaaaagactattaagttaggatgaactagattccctaattacagtgaaattctatcttgcaaatgctatagaataacttgcattttaaagtgtatttgcacattttacatatgctatgtggttgcctttgggttttctgtacagattgtttttgttattaaatggaaaaggcctgaattatgctcttatgtgaagtaaattgatataacctattgactgtattctgtgtattattctttattttgggaccttctgtgtaaaagaaaatattacctaaattggttagatacaaagaaatcattaaaattattaatgtatatatgaaaaaaaaaaaaaaaaaaaa

SEQ ID NO: 23288 - DNA, 4221 bp, Homo Sapiens
cgataacgatttgtgttgtgagaggcgcaagctgcgatttctgctgaacttggaggcatttctacgacttttctctcagctgaggcttttcctccgaccctgatgctcttcaattcggtgctccgccagccccagcttggcgtcctgagaaatggatggtcttcacaataccctcttcaatcccttctgactggttatcagtgcagtggtaatgatgaacacacttcttatggagaaacaggagtcccagttcctccttttggatgtaccttctcttctgctcccaatatggaacatgtactagcagttgccaatgaagaaggctttgttcgattgtataacacagaatcacaaagtttcagaaagaagtgcttcaaagaatggatggctcactggaatgccgtctttgacctggcctgggttcctggtgaacttaaacttgttacagcagcaggtgatcaaacagccaaattttgggacgtaaaagctggtgagctgattggaacatgcaaaggtcatcaatgcagcctcaagtcagttgccttttctaagtttgagaaagctgtattctgtacgggtggaagagatggcaacattatggtctgggataccaggtgcaacaaaaaagatgggttttataggcaagtgaatcaaatcagtggagctcacaatacctcagacaagcaaaccccttcaaaacccaagaagaaacagaattcaaaaggacttgctccttctgtggatttccagcaaagtgttactgtggtcctctttcaagacgagaataccttagtctcagcaggagctgtggatgggataatcaaagtatgggatttacgtaagaattatactgcttatcgacaagaacccatagcatccaagtctttcctgtacccaggtagcagcactcgaaaacttggatattcaagtctgattttggattccactggctctactttatttgctaattgcacagacgataacatctacatgtttaatatgactgggttgaagacttctccagtggctattttcaatggacaccagaactctaccttttatgtaaaatccagccttagtccagatgaccagtttttagtcagtggctcaagtgatgaagctgcctacatatggaaggtctccacaccctggcaacctcctactgtgctcctgggtcattctcaagaggtcacgtctgtgtgctggtgtccatctgacttcacaaagattgctacctgttctgatgacaatacactaaaaatctggcgcttgaatagaggcttagaggagaaaccaggaggtgataaactttccacggtgggttgggcctctcagaagaaaaaagagtcaagacctggcctagtaacagtaacgagtagccagagtactcctgccaaagcccccagggtaaagtgcaatccatccaattcttccccgtcatccgcagcttgtgccccaagctgtgctggagacctccctcttccttcaaatactcctacgttctctattaaaacctctcctgccaaggcccggtctcccatcaacagaagaggctctgtctcctccgtctctcccaagccaccttcatctttcaagatgtcgattagaaactgggtgacccgaacaccttcctcatcaccacccatcactccacctgcttcggagaccaagatcatgtctccgagaaaagcccttattcctgtgagccagaagtcatcccaagcagaggcttgctctgagtctagaaatagagtaaagaggaggctagactcaagctgtctggagagtgtgaaacaaaagtgtgtgaagagttgtaactgtgtgactgagcttgatggccaagttgaaaatcttcatttggatctgtgctgccttgctggtaaccaggaagaccttagtaaggactctctaggtcctaccaaatcaagcaaaattgaaggagctggtaccagtatctcagagcctccgtctcctatcagtccgtatgcttcagaaagctgtggaacgctacctcttcctttgagaccttgtggagaagggtctgaaatggtaggcaaagagaatagttccccagagaataaaaactggttgttggccatggcagccaaacggaaggctgagaatccatctccacgaagtccgtcatcccagacacccaattccaggagacagagcggaaagacattgccaagcccggtcaccatcacgcccagctccatgaggaaaatctgcacatacttccatagaaagtcccaggaggacttctgtggtcctgaacactcaacagaattatagattctaatctgagtgagttactgagctttggtccactaaaacaagctgagctttggtccactaaaacaagatgaaaaatacaagagtgactctataactctggtctttaagaaagctgccttttcatttttagacaaaatcttttcaacgctgaaatgtacctaatctggttctactaccataatgtatatgcagcttcccgaggatgaatgctgtgtttaaatttcataaagtaaatttgtcactctagcattttgaatgaatagtcttcactttttaaattattcatcttctctataataatgacatcccagttcatggaggcaaaaaacaagtttcttgttatcctgaaactttctatgctcagtggaaagtatctgccagccacagcatgaggcctgtgaaggctgactgagaaatcctctgctgaagacccctggttctgttctgcctccaacatgtataattttatttgaaatacataatcttttcactatgcttttgtggggttttttttaagtatgtgtaaaaatgtgatgctcagataagtacatttatatcagttcagtgttaaaatgcagtctcttgagttaaagtcatctttattttaaatgcagtgataaatgtcaactcttcggagaaactaggagaacaacaacagaaagctgtgtttgtcttttttctctcaaatatatctcccgtatgagatttcaggtccccatgttttcaccaagcaatctgctatgtcagccaacccaacatcactttctacaggaggttatgatttttgccatttactagaggaagatgttttatgaaatcaatttggggtttgaattcaggtgcagtcatcagttctttaggggctgcaatgttttaaaaaaaataagtcatcagattttaagaaaaaagtgatgatttcttattgatatttttgtaacagaatatagctcttaactgaaaatccagaaccagaaacataaatcttgagtttcttttcatgtacataaaaagcaatagccttttagtatagatagccctgagccaaaaagtaatagaattttctctagatatttaatacagagagtgtatagactgactctaagttaataatgtgcaaaatatcttaaacatccctccccttattcaacaattatgtatcagtgatcttgaaccattgttttatatttttcacctttgtaacctcatggaaagaggctttacatactttctatgtactatttacttagaagggagcccccttccagtcatgaaacttcatttgttttatccatatccctgaggactgtgtagactttatgtcagttctgtgtagactttatgtcagtttttgtcattatttgaaaatctattctgacaactttttaattcctttgatcttataagttaaagctgtaacaactgaaattgcatggatcaagtaagcatagttttatccagggagaaaaataaaaggaagccatagaattgctctggtcaaaaccaagcacaccatagccttaactgaatatttaggaaatctgcctaatctgcttatatttggtgtttgttttttgactgttgggctttgggaagatgttatttatgaccaatatctgccagtaacgctgtttatctcacttgctttgaaagccaatgggggaaaaaaatccatgaaaaaaaaaagattgataaagtagatgattttgtttgtatccctacccatctcctggcagccctactgagtgaaattgggatacatttggctgtcagaaattataccgagtctactgggtataacatgtctcacttggaaagctagtacttttaaatgggtgccaaaggtcaactgtaatgagataattatccctgcctgtgtccatgtcagactttgagctgatcctgaataataaagccttttacctt

SEQ ID NO: 23289 - DNA, 5958 bp, Homo Sapiens
  misc_feature (49)..(49): n is a, c, g, or t
cagccgccggcgagcgcgccgagacgccgaacaggtggccggagcgtgncgggcgccgcggcggggcgaggcgaggcaagccccgggcgaacgaggcgaggcgagggcggccgggccgggcatgcgagctgagcggccccccggcgtcgccgccgcctgcccgcgcccctagccgcccgcgcgcccgagtccccagcggctcctccgcgcccagcgtcctcggtcccggcctcggctgctccggctgcgctcggcgaggggcgcgggcccgcccgcggcgcggcggcatgaaagtgaccgtgtgcttcggacggacccgggtggtcgtgccgtgcggggacggccacatgaaagttttcagcctcatccagcaggcggtgacccgctaccggaaggccatcgccaaggatccaaactactggatacaggtgcatcgcttggaacatggagatggaggaatactagaccttgatgacattctttgtgatgtagcagacgataaagacagactggtagcagtgtttgatgagcaggatccacatcacggaggtgatggcaccagtgccagttccacgggtacccagagcccagagatatttggtagtgagcttggcaccaacaatgtctcagcctttcagccttaccaagcaacaagtgaaattgaggtcacaccttcagtccttcgagcaaatatgcctcttcatgttcgacgcagtagtgacccagctctaattggcctctccacttctgtcagtgatagtaatttttcctctgaagagccttcaaggaaaaatcccacacgctggtcaacaacagctggcttcctcaagcagaacactgctgggagtcctaaaacctgcgacaggaagaaagatgaaaactacagaagcctcccgcgggatactagtaactggtctaaccaatttcagagagacaatgctcgctcgtctctgagtgccagtcacccaatggtgggcaagtggctggagaaacaagaacaggatgaggatgggacagaagaggataacagtcgtgttgaacctgttggacatgctgacacgggtttggagcatatacccaacttttctctggatgatatggtaaagctcgtagaagtccccaacgatggagggcctctgggaatccatgtagtgcctttcagtgctcgaggcggcagaaccctggggttattagtaaaacgattggagaaaggtggtaaagctgaacatgaaaatctttttcgtgagaatgattgcattgtcaggattaatgatggcgaccttcgaaatagaagatttgaacaagcacaacatatgtttcgccaagccatgcgtacacccatcatttggttccatgtggttcctgcagcaaataaagagcagtatgaacaactatcccaaagtgagaagaacaattactattcaagccgttttagccctgacagccagtatattgacaacaggagtgtgaacagtgcagggcttcacacggtgcagagagcaccccgactgaaccacccgcctgagcagatagactctcactcaagactacctcatagcgcacacccctcgggaaaaccaccatccgctccagcctcggcacctcagaatgtatttagtacgactgtaagcagtggttataacaccaaaaaaataggcaagaggcttaatatccagcttaagaaaggtacagaaggtttgggattcagcatcacttccagagatgtaacaataggtggctcagctccaatctatgtgaaaaacattctcccccggggggcggccattcaggatggccgacttaaggcaggagacagacttatagaggtaaatggagtagatttagtgggcaaatcccaagaggaagttgtttcgctgttgagaagcaccaagatggaaggaactgtgagccttctggtctttcgccaggaagacgccttccacccaagggaactgaatgcagagccaagccagatgcagattccaaaagaaacgaaagcagaagatgaggatattgttcttacacctgatggcaccagggaatttctgacatttgaagtcccacttaatgattcaggatctgcaggccttggtgtcagtgtcaaaggtaaccggtcaaaagagaaccacgcagatttgggaatctttgtcaagtccattattaatggaggagcagcatctaaagatggaaggcttcgggtgaatgatcaactgatagcagtaaatggagaatccctgttgggcaagacaaaccaagatgccatggaaaccctaagaaggtctatgtctactgaaggcaataaacgaggaatgatccagcttattgttgcaaggagaataagcaagtgcaatgagctgaagtcacctgggagcccccctggacctgagctgcccattgaaacagcgttggatgatagagaacgaagaatttcccattccctctacagtgggattgaggggcttgatgaatcgcccagcagaaatgctgccctcagtaggataatgggtaaataccagctgtcccctacagtgaatatgccccaagatgacactgtcattatagaagatgacaggttgccagtgcttcctccacatctctctgaccagtcctcttccagctcccatgatgatgtggggtttgtgacggcagatgctggtacttgggccaaggctgcaatcagtgattcagccgactgctctttgagtccagatgttgatccagttcttgcttttcaacgagaaggatttggacgtcagagtatgtcagaaaaacgcacaaagcaattttcagatgccagtcaattggatttcgttaaaacacgaaaatcaaaaagcatggatttaggtatagctgacgagactaaactcaatacagtggatgaccagaaagcaggttctcccagcagagatgtgggtccttccctgggtctgaagaagtcaagctcattggagagtctgcagaccgcagttgccgaggtgactttgaatggggatattcctttccatcgtccacggccgcggataatcagaggcaggggatgcaatgagagcttcagagctgccatcgacaaatcttatgataaacccgcggtagatgatgatgatgaaggcatggagaccttggaagaagacacagaagaaagttcaagatcagggagagagtctgtatccacagccagtgatcagccttcccactctctggagagacaaatgaatggaaaccaagagaaaggtgataagactgatagaaaaaaggataaaactggaaaagaaaagaagaaagatagagataaggagaaggataaaatgaaagccaagaagggaatgctgaagggcttgggagacatgttcaggtttggcaaacatcgaaaagatgacaagattgagaaaacgggtaaaataaaaatacaggaatcctttacatcagaagaggagaggatacgaatgaagcaggagcaggagaggattcaagccaaaactcgagaatttagggaacgacaagctcgagagcgtgactatgctgaaattcaagattttcatcggacatttggctgtgatgatgagttaatgtatgggggagtttcttcttatgaaggttccatggctctcaacgctagacctcagagcccacgagaagggcatatgatggatgctttgtatgcccaagtcaagaagccgcggaattccaaaccctcacctgtagacagtaacagatcaactcctagcaatcatgatcggatacagcgtctgaggcaagaatttcagcaagcaaagcaagatgaagatgtagaagatcgtcggcggacctatagttttgagcaaccctggccgaacgcacggccggcgacgcagagcgggcgacactcggtgtccgtggaggtgcagatgcagcggcagcgccaggaggagcgcgagagctcccagcaggcccagcgccagtacagctctctgcctcggcaaagcaggaaaaatgccagctcggtctcccaggactcttgggagcagaactactcccctggggaaggcttccagagtgccaaagagaaccccaggtactccagctaccaaggctccaggaacggctacctgggaggacatggcttcaacgccagggtcatgctggaaactcaggagctccttcgccaggaacagaggcggaaggagcagcagatgaagaagcagcctccttccgaggggcccagcaactatgactcgtataagaaagtccaggaccccagttacgcccctcccaaggggcccttccggcaagatgtgcccccctccccttctcaggttgcgaggctgaacagacttcagactcctgagaaagggaggcccttctattcctgagcacgcaaataacggatgcttcatgtcgcgcaataaaagacattttcctatgaagacttgtattttgggagtttttttaaaacctcgatggtactatggagtatttctgttgttggtatcagtgcctttaagcggtgtaggcaaagaaatggaaggccttaatgtctttgccactatgtctcaagtgtctgtttcatggaaggatttcccaccctgtgacaatcatctgtttgaggtgttcatatgctctgcgcctctccacagtaccaggaatctcggccctactcatgagttgtccgcggcttggttgtaacatccctgcaccacttgcagtgacaaattcacctgaagtggaggatgacgtgcggccctgtttctccctctaagttctcttagctatgggatgacatcttagtctctggtggaggaaaagtgggcgacatacaccaaaaattggggctttctggtacttcacagcacagccatttgtcgtactttgtcatcactgtggttttctctttcctttctcagctctttgtgacgggagagtcggtcatcctattacagaagctaagccatagtccaacattgtttggtcaccatgggggtccttttgtaactgccttatgactcaacattaccaataaagtgatgatcctggtctgcgtttatacatacgcttgttcggtcctgttcctgacacgtgggttgagtcaccacagctctgtgtggggaacgtgggagacaggagtggctcctgccgggggaagctgggcctgccattggccctgtgtctatcatgaggggagagctaagaaagaaattctcctaggaagagctcatggcccagtacatcctagtaattattttaattagtttttgttctgacagcttgtcaggaagggcacagaatgggacagagataaaccagacagtcattttgatctgctctctacggtttttcaagtcagaggcaattgatgcttgtctaatgcatccacacactgcatgtctgacttggcgatgccacgctcctaagtagttctgccatgaaacataaaagacaaaggaaaagccgttacacatcacacagagaacattttcgggtcccacagcggtggtggcaggaagctcactctcgcgtcagtattagagtgtgtgtgtgggtctcggggatctcggtggctcccatcttccttcattgttctgaacatcctgtattgtaaaccatggctggggtgctaaagtgcctgtgaatcccgatgtggaaaaagctggaggtgaaagctcagcataccatgtatttactttaaaaacagaaaaaaagacatgtatggatatgtctattttttttttattggcacattgtatttttgtgttgacttgtttttagaaatgatgtgtccacacacgtacccgtgtctcttctgcatttctgtgtcatggttctgtttcttaatcacgtgcggcggtgtctaagtggtgttaccagtgtacgcgcagtgaccttggatgacagtggctctttctcacagcctcccctgagctgtgagaaacagctttctctgtacatatgcaactcctaataaaaggcatatttcttcctgtt

SEQ ID NO: 23290 - DNA, 112595 bp, Homo Sapiens
gatctactagcaattagtgagatggagcaggagaaggagctagcttgctatggaaaaagtgacaaagagatggactgagttgagacacttagaggtctctgacactaactggctgcctcactttgtacaaatcactttattcatctgtttcaggcttccacttggttttgttttgttttttgagataagagtcttgctctgtcatccaggctggagtgcaatggcgtgatctcggctcactgcaatctctgcctcctgggttcaaacgattctcctgcctcagcctcctgagtagctggaattacaggcatgcaccaccaggcccagctaattttttttttttttttagtagagatggggtttcaccatgttggccaggatggtctcgaactcctgacctaaggtgatcagcctgcctgggactcccaaagtgctgggattacaggcgtgagctaccacgcccggcccaggtttccacttttgttatgaaggtgttacagttatcagggctggggatggatatgcacattaatcgtgttttttaattttctgtatttcatgatgctttgacatcttggggccttgctaatcttggagagactgtccctcccagggctaactaattcctacagaacttgactctgagcatgcttttgatatgcaaaccaacaatcatgagaccatacccaaaccacctcctttttctaactctcacacaccagccaatattccccctccagggccaggtactgaacaactaggggccaccctgtagcccaccaaaatcattcaaactatccagtcctaaggtttctcagcttgccaatcctgtctcatccattccttcccataaaacctacaataaaggctctgggcccatgctttctcctcactcctgactcctgactgaccctggtgcctcccatgtggcccttgcatggccatggcttggcaagccccctcctcttgagaactgtgagtaacaaactatcttttcaatggcagttgccttgtgatctgctgggctcaccatacctcaatttttaaagattcttggttatattttaaaacaatctaaccccaggtgctaactctggtggctgcttaatagctgtcccaagtgagggatgagaaaaatcttcaggttgagtcaaaatatcaatgtctgccctgagcatgggttgtgaggaataaagatgtgagagaaagggtttgtcctccctgacacagatgatctctaggggcccttgcagctctaatatctaagcattttagaaagtattttaaggccaggcacagtagctcatgcctataatcccagcaccttgggaggctgaggtgggcagatcacttgaggtcgggagttcgagaccagcctgggcaacatggcaaaacccccatctctactaaaaatacaaaaattagccaggcatggtgccacatgcctgtaatcccagctactcgggtggctgaggcaggagaatctcttgaacccaggaggtggaggctgcagtgaactgagatcacaccactgcactccagcctgggcaacaaagcaagactctgtctcaaaaaaaaaaaaaaaagaaagaaaggaagaagaggaacaggagggaggaggagggatctgagctagcacgctcagccccttgccaagtgataccctgcactgtctcaggactcttcagagtcctcaccagcaaaaagtcccccaccagatgcagccccttgaccttagacttctcagcccccacaactgtaagaaagaaattcatttcctttaaaattacccagtttcaggtattctgttataagcaacagaaactggactaagacaggaaaacacaaacattcagtccattgccttccaacacctgcctgcccccgacaattcatgtgcttctcacatgcaaactacattcaattccatccaaacatccccccaaatcttaactcattccagtatgaactctaaagtctaaagccaaaagtctcatctaaagatcatctaaatcaggtatgggtgaaactcaccctgaagcaaaattcctcttcagctgcttaaaagaaaccaaagtatttgcttccaaaatacaatgatgggacacaaagagggtctataaacattcccattccaaaagggagaaacagggaaggaggacggggtgacaagtcccaagcaagtccaaaacctagcaagggaagttctgtgagatcttgagactcaggtaatcctctttggcttgaagctttgcctccagacctactggggtgtcagtccctcatgccagacccactgagggggcaatgtcaccctcacagtgagagacaggactagctggatttcctaggctgactaagaatccctaagcctaggtgggaaggtgaccgcaatccacctttaaacacggggcttgcaacttagctcacacccgaccaatcagggagtaaagagagctcactaaaatgctaattaggcaaaaacaggaggtaaagaaatagctaatcatctatcacctgagagcacagcgggagggacaatgatagggatataaacccaggcattcgagcccgcaacggctaccctctttgggtctcctccctttgtatgggagctctgttttcactctattaaatcttgcagctgcactctcttctggtccgtgtttgttacggctcgagctgagctttcacttgcagtccaccactgctgtttgccgccgtcgcagacccgccattgacttccatccctccagatccggcagggtgtccgctgtgctcctgatccagcaagccgtccactgctgctcccgatcgggctaaaggcttgccattgttcctgcatggctaagtgcctgtgtttgtcctaatcgagctgaacactagtcactgggttccacggttctcttccgtgacccacggcttttaatagagctataacactcacgcatggcccaagactccattccttggaatccgtgaggccaagaaccccaggtcagagaacccgaggcttgccaccatcttggaagcagcccaccaccatcttgggagctctggaagcaaggacccccaccccccggcccggtaacaacagtttggcagcactcactgctcatgctgtggttgtcagggcaggagttgtagcctcagggctctgctgggagcctccatccccaccgctctactgggcattggtctcaccctttgaaatggaggtggaggctgggagtggtggctcacacctgtaatcccagcactttgggaggccaggacaggccagtcacaaggtcaggagatcgagaccatcctggctaacagggtgaaaccccgtctctactaaaaatacaaaaaattagctgggcgtggtggtgggcgcctgtagtcccagctacttgggaggctgaggtgggagaatggcatgaacctgggaggcggagtttgcagtgagccaagattgtgccactgcactccagcctggatgacagagcgagactctgtctcaaaaaaaaaaaaaaaaaagaaatggaggtgcaggtagtcctatgccctaagcccatgtactctgggcctctgatgggactggtgacctggacggtctctgaatcaccttcagggttcttcttcccttatcttgaagaacagtgtgtgttcacagccgaatagttctatggtttggtcctataggatctaagaagtttaatcatcttccttcattttgtcccattttctttttttctttttcttttttttttttgagacagagtctccctctgttgcccagcacccaggctggagtgcagtggtgcaatctcagctcactgcaacctccgcctcctgggttcaagtgattctcctgcctcagcctcccaagtagctgggattacaggcgtgcaccaccgcacccggctaatttttgtattttcagtagagacagggtttcaccatgttggtgaggctggtcttgaactcctgatctcaggtgatccacccgcctcagcatcccaaagtgttgggattacaggcatgagccactgtgcccagccattttgtcccattttctctgtttcctttagtcccagtcagcagtgccatttccagtacaatcccatcgctattgctgttttgttgagatggttaatgaagtccacagttcacattcacagtaatctccttgtcaaatagtccagcagatccttagtgttctcttccaaacatgctttgtcatgttttgtaatatggacagggacaggctgagaattttccagacccactgagggagcaatgtcaccctcatagcttgggtaagtttaagttctggttcctttttgcataacaattctgttttcaattcatatctctcttctcaaatttgactataagcagtcaggaggaaccaagcctctcctttcaacactttgcttagagatctcctcagctaaatctccatttcactgttcacaagtcctaccctctacaaaacactaaaacgtaaacacaattcagccaggttctttgctactttataacaaggatcaccttttctccactgtccaataacacgttcctcatttctacctgagaccacatcagaacagcctttaaccacccatatttctaccaccaatctgttcatgattacttatgtattctttaagaaagcagaagctttctctacagctctcctcatttctttctgactgctcatcagaatcacctttaaaggtccattcaatggcaatataggatttttctttttttcctttttcttttttttagatggagtcttgctctgttgcccaggctggagtgcagtggcgcaatcttggctcactgcaacctccacctccctggttcaagcaattctcctgcctcagcctcctgagtagctgagattacaggtgtgcgccaccacgcccggctaatttttttttttttttttgtatttttagtggagatggggtttcaccgtggtggtcaagttggtctcaaactcctgacctcataatccatccacctcggcctcccaaagtgctgggattacaggtgtgagccaccgcacctggtggcaatataggatttttctagcgcatgcacccaaatttatgtcttagtctgttttctgttgctataacagaataccacagaccaggtaatttataaagaaaagaagctcagccaggtgcagtggctcacacctataatcccagcactttgggaggccaaggtgggtggatcacttgaggtcaggagtttgagaccagcctgactaacatggtgaaacaccatctctactaaaaatacaaaaattagctgggcctggtgatgaatgcgtgtaatcccagctagtcgggaggctgaggcaggagtattgcttgaacctgggaggcagaggttgcagtgagcagagatcgtgccactgcactccagcctgggtgacagagtgagattctgtctcaaaaaaataaaaaataaaaataattttaaaaagaagcttaacaagctcacagttctggaggctgggaagtctaagagcatggtgctagcatcagatgaggccttcatgctgcatcatcccatcatgggtagacagaatggcaagagggtgcatgcgagagacagctcacttttataacaaagccactcccacaataacagcattagtccattcatgaaggtgacagccccatgacctaatgtcttcttaaagaccccacctctcaatactgttacaatggcaattaaaggtcaacatgagttttggagggaacattcaaaccatggcactcttccagcctctagtcattacaattacaaggccacttccacatttttaggtattcgttacatagcacccctcacttctcagtaccaatttctgtcttagtcagttctgactggtataacaaagtgccatagactgggtggcttataaacaacagaaatttctctcttaacagttctggttggaagtctgacattacggttccagcatggtcaggttctggtagggatgctgtttagggttgctgacagctaaattttcattgtatcctcacattgtggaaagaactctctggggtcccttttatttatttatttatgtatttatatttttctgagacagagtctcactctgtcgtccaggctggactgcagtggcaccatctccattcactgcaacctccgcctcctgggttcaagcgattctcctgcctcagcctcctgagtagctgggattacaggcaaacaccactatgcccagctaatttttgtatttttagtagagacagggtttcgccatgttggccaggctggtcttgaacttctggcctcaggtgatccacctgcttcggcctcccacagtgctgggattacaggcgtgtgccactgcgcccagcctggggtccctttcataagggcaccaatcccattcatgagggctccactgtcatgacttaatcacctcccaaaggtcccaccttctaatactatcacattaggggttaggatatcaacatgtttggggagacacaaacattcagtctattgcacagccttttaccttctgcaaataaaactgcttccagtatacccaaagctgtactaaaacctctttttttttttttttttttctggttttcctaggcagagtatttgtgtccctgggtacttgagattagggagtggtgatgactcttaaggagcatgctgccttcaagcatctgtttaacaaagcacatcttgcaccgcccttaatccatttaaccctgagtggacacagcacatgtttcagagagcacagggttggggggtaaggtcacagatcaacaggatcccaaggcagaagaatttttcttagtacagaacaaaatgaaaagtctcccatgtctacttctttctacacagacacagcaaccatccgatttctcaatcttttccccacctttcccccttttctattccacaaaaccgccattgtcatcatggcccgttctcaatgagctgttgggtacacctcccagacggggtggtggccgggcagaggggctcctcacttcccagtaggggcggccgggcagaggcgcccctcacctcccggacggggcggctggccgggcggggggctgactcccccacctccctcccggacggggcggctggccgggcggggggctgacccccacacctccctcccggacggggcggctggccgggcggggggctgacccccccacctccttcccggccacctccctcccggatggggcggctggccgggcagaggggctcctcacttcccagtaggggcggccgggcagaggcgcccctcacctcccggacagggcggctggccgggcggggggctgaccccccacctccctcccggacgggacggctggccgggcggggggctgaccccccacctccctcccggacgggacggctggccgggcggggggctgacccccccacctccctcccggacggggtggctgccgggcggagacgctcctcacttcccagacggggtggctgccgggcggagaggctcctcacttctcagactgggcggctgccgggcggaggggctcctcacttctcagacggggcggttgccaggcggagggtctcctcaattctcagacggggcggccggacagagacgctcctcacctcccagacggggtcgtggccgggccgaggcgctcctcacatcccagacagggcggcggggaagaggcgctccccccatctcagacaatgggcggccgggcagagacgctcctcacttcctagatgggatggcggccgggaagaggcgctcctcacttcctaggtgggaaggcggccgggcagagacgctcctcactttccagactgggcagccaggcggagaggctcctcacatcccagacgatgggcggccaggcagagacgctcctcacttcccagacggggtggcggccgggcagaggctggaatctcggcactttggggggccaaggcaggcggctgggaggtggaggttgtagcgagccgagatcacgccactgcactccagcctgggcaccattgagcactgagttaacgagactccatctgcaatcccggcacctcgggaggccgaggctgacggatcactcgcggttaggagctggagaccagcccggccaacacagcgaaaccccgtctccaccaaaaaaatacgaaaaccagtcaggcgtggcggcgcgcgcctgcaatcgcaggcactgggcaggctgaggcaggagaatcaggcagggaggttgcagtgagccgagatggcagcagcacagtccagcttcggctcgacatgagagggagaccgtggaaagagagggagaccgagagggagagggagactgagagggagagggagaccgagagggagagggagaccgagagggagagggagagggagaccgagagggagagggagagggagaccgagagggagagggagagggagagggagagggagagggagagggagagggagaggaaacctctttctttagcactattcatgttctcttctcctggacgtcagtaccttaaatagagtcatcctccctcatggactccacacttctctctctctctctctgtctctctctctctgagatagggtctcactctgtcacccaggctggaatgcagtggcaagatcatgggtcactgaaacctccacctcccagggctcaagtgatcttctcacctcagcctcctgagtagctgggactacaggcatgtgccacagtgcctggttaatttttgtattttttgcagagatggggtttcactatgttgcccaggttgatctcaaattcctgggctcaagcaatcttcctacctcggcctcccaaagtactgggattataggcatgagccactgtgcctagccatatatccttctctctcttatcctactccagtctggctttggtccgcacttgttcactgacattcctctctgtgacatgatgagttctctgtgggcacactgagtttgaggtgtcaaagcacataaaaatggaaaggtctactaggcagttgtttatgtggtccaactctcttttggttcatatttgcttggtgtatctttttccatccctctattttcaacctttctttgtggttttattctaagcgtgtttcctgtcacaggtctgtagttgaattaacaacaacaacaacaaatccaatctgataacctctgttttcaacaggcatgtaatcatttatatttattttgattacttatgtattggaacttatttctaccatcttatgtttgctgtttactaccccgttccccctcatcttttcccattatatgttagatggataaagtttttgaaattgccccattacacattttattttttcctttgctggttctgaagttatagatggtatttctcctcatttagtggtttccattaatttttaaagttcctgaatctcatgcttccagtatcaacatgcctaaccagcagggcctccattaatttttaaatatatgttctaaattataaatttaagagccaggcacagtggctcacacctgtaatcccagtgactttgaaggctgagttgggaggatcgtttgaggccaggagtttaagatcaaactgggtaacatagagagatcccatctatacaaaatttttttttcaatgagccaggtgtggtggcacatgcctgtagtcctaactacttgggaggttgaggtgggaggatcccttgagcccaggaatttgaggctatagtgagctaggattgcagcactgcactccagcctggataacagagtgaaacaaataaaaaataaatacttatgtttctataaatttacatacatagataaatattaaaaatatattaagccagctatagtggcacacacctgtagtcccagctacttgggaggctaagctggcaggatttcttgagcccaggatttcgaggccagcctaggcaacataatgagaccccatttctttaaaaaaaaaaatatatatatatatatataaatatatatacacacataaacacacaaaccaatatccaaaaaatatatctttaaaaatgtattgtctcagccggacatggtggctcatgcctgtaatcccagcactttgggaggccgaggcaggtggatcacaaggtcaggagatcgagaccaccctggctaacacggtgaaaccccgtctctactaaatataaaaaaaattagccaagcatggtggtgggcgcctgtagtcccagctacttaggaggctgaggcaggagaatggcgtgaacctgggaggcggagcttgcagtgagccgagatcgtgccactgcactccagcctgggcgacagagcgagactccgtctcaaaaaaaaaaaaaatgtattgtctccagttcatcagtatatgtattatctacctactcttaaaagaataaaggccaggcgcagtggctcacgcctgtaatcccagcactttgggaggccgaggcaggtggatcacgaggtcaggagattaagaccatcctggctagcatggtgaaaccccgtctctactaaaaatacaaaaaaattagccaggcatggtgacagatgcctgtagtcccagctacttgggaggctgaggcaggagaatggcatgaacctgggaggtggagcttgcagtaagccaagatttcgccactgcactccagcctcagtgacagagcaagagtccgtttcaaaaaaaaaaaaaaagaataaagacacagtgaatcaagttctttaaaagcagagccaagaagagtcctgtgataggcagcttctgacatggccccaatgatttctgccttctgatatttacacccatgtggaaatccctgcacttgagtgtgggctgaacctagtgaccagcttctaatgaacagaatatggcaaaagtgataggatgtaggatgtcacttctatgattaggctccaaaagattgtgacttctgatgtgctagttctctctctctgtcactatctcttgccctcttctttgctccctctgatgaagccagctgccacagtgtgagctgccctatggagaggcctctatagcaagaaagtgaggccttcagtccagcaaccctcaagcaactgaaacctgccaacaaccacatgagtcagcttggaagtggatccattacccatcaggctttcagatgagaccacagccccggctgccaccttgattccaacttcatgagagatccagagacagagaacctagctaatctgtgactagattcctgactcacagaaactatgagataataaatgtctgttgttttaagctgctaaattctaggtaatttgttacacatcaatacatggctaatacaaagattttttttttctgtgacaactttttttatcatatggagaggcaaaggtggcacagactctacaatcagccaaacgtggctgtctcttgccttgggcaggttatgtaatccctgagctcagtcttctcacttgtaaatcttttttgttttcttccccttcctccctccctccctccttccttcttttttttttttctttttttttcttgacagagtcttgctctgttgcccaggctggagtgcagtggcatgatctcggttcactgtaacctccacttcccaggctcaagcgattctcatgtctcagcctcccaagtaactgggactataggcatgtgccaccacgcctggctaatttttgtatttttagtagagatgaggttttgccatattggccaggctgatctcgaactcctggcctcaagtgatccacccacctcggcctcccgaagtgctgggattataggcctcacttgtaaatctaagctaacaatgcctgccttgcatatgagcttttcagattgttaataaggtttaagagggcatggcacacagtaggtcatcatctttatgacctccattcttgtaaatctgatgctcattccaatttcagtgttctgggttcttcaaaaagtccccaccactaaaactttgctttatcatgaagatttcactcagtccattgtgtgatagtattcataaagcacctgaaagtactacctctcaaatgagtatctcccgttctcaaaatcaatgccacacatagactctaattcaaccatggtacaggggatggtgaattaggcctggagcctctaagcaatggcctgccatccaacatcaaatcatgctgaaaatcctttttttttatactaagacaaaaacacaatcaaagaatcattgcagtttctatgtgaatgaacctcatatgaaatcctctgaacagcagtggctcatatctgagagggaaggaggatgtgagaacatctacattactagatcttcatgaatgggctgctgaagtctggcttttccctgtactaaatctctctgtaattttgtgcctgctcatggaaactgcattcacaaatagtatattatgcatatacacagacttacacagacaacctttgcagataaaaagcaaatccctgccaatgataaacaaaatgaacataaaacctattacagtcttagattatcttctaaaccttacattctcttatgcttaattcttttcatttttaattttaatttttaatttttttattttcctgttctcctcagctgctcataatttgtatttttagagacagggtcttgtgctatcacccaggagtgtagtgacctgatcatggctcattgcagcctcgacctcctgggctcagtgatcctcctacctcagcttcctgagtaactgggattaacatgcccggctaatttttgtatttttagtggagatggggttttgccatgttggccaggctggtctcgaactcctggcctcaagtgatctgccagcctcggcctcctaaagtgctgggattacaagtgtgagccaccgtgccaggcctatgtttattatgtatatatttttacatttaatatgcataccttttcttatattcttgtatttcatacacataatggtcagcagcctgtatatactaccctggatcttttttttttttttttttgagatggagtttcacccttgttgcccaggctggagtgcaatggcacggtctcagctcactgcaacctccacctcctgggttcaagcgattctctggctggcattacaagtgtgagccaccacatccagccttaccctaggtattttagaacaattacagacagtaaatacctatcaatctatacctatatctacatatcttaagaattttattaaaaatgatcaaaagggaattctctcctttttccttctaattcagatctcgagttgcactgttgaagcaatgtgccaaaattgcttttattttcctaaattaaaagatgtgatattatctattcttatcagcaaagggtaaaaaaacaatttattacagaagaaaaagcgagataaaaacataggatggtaggctgggcgtggtggctcatgcctgcaatcccagcactttgggagtcagaggcaggcggatcacctgaggtcaggagttcgagaccagcctggccaacatggtgaaaccccgtctctattaaaaatacaaaaattagccgggcatgatggcaggtgcctgtaatcccagctactcgggaggctgaggcaggagaaacacttgaacccgggaggcggaggttgcagtgagctgagatcatgtcactgcactccagcctgggtgacagagcaagactccatctaaaaacaaaacaaaacaaaacaaaaacaaacaaccaaaaaaatagaatagtccttttcctttcaggattgcaaagagaacataaagaattaagcggcatactttcctaaaatcctgaaacagaaacctttcatcaaagttctaattctactccctctagacggtcatcctcccagctcacccagctggctgcccagtcagtgactaagagcagagctgttttggctcaggctgaagttaatctgtgccttgggcagagacaaactgttggtgcctgtaagagtaaaatcctaaatgattagagcagaaaactcttctgaattaagggtctgcaagacaaacaggttgccatagacatttataaggaaacagccattagcacacccatatgatacactttgctctttttttttttttttgagacatagccttgttctgtcacccaggctggagtgcagtggcacgatctcggctcactgcagcctctgcctcccaggttcaagtgattttcctgcctcagtcccccaagtagctgggactataggtgtgcaccaccaagcccggctaatttttgtatttttagtagagacagggtttcaccatgttgggcaggctggtctcgaactcctggcctcagatgatctgcccccctccttggcttcccaaagtgctgggattacaggtgcgagccactgtgcccagcctcactttgctctatcttttggcctggtttccccaggcactgtggagggaacacaaatatgagtcactgttcctgtcctccaactgcttcctgcctcttcagggagctcagccctgtactgtccaaagagaggactaccagactgggcaatatagcgagacaccacctttacaaaaaattttttagaaattagctgggcatggtggcacacacctgtagtcacggctacttgggaagctgaggtgagaggatcacttgagcccaggagtctgagactacagtaggctatcacaacactgcacgccagcctgggtgacagagcaagaccctgtctaaaaaaaataaaaataaataacaaagaggggactagcagagccatgtgggaagtagtaagtcacttgtagtaatagccacttgtaattaatcacttcacagatcaaagtagttcatatttagcctactcatcagcacctgactataaaggtgtcaggccagagtctccatttcacaacttaaattaaagtgattgttctcggccaggcgcaatggctcacacctgtaatcccagcactttgggaggccaaggccagaggatcacttgaggttaggagttcgagaccaacctggccaacatggcgaaaccccatctccactaaaaatacaaaaaaaaaaaaaattagctgggtgtggtggtgcgtgcctgtagttccagctactagggagactgaggcaggagaattgcttgaacccaggaggcagaggttgcagtgattcaagatcacaccactgcacccagcctgggcgagagagtgagactctgtcaaaaaaaccaaaacaaaacaaaaaaaaaacaccaccaaagtgatcattctcatgtttgaattgggaaattaatttagactaaccaaactttagttgcctccttctcgaatgacatcagttcacttcccttccttcagctgccctccctccttcctcttaggccatttgggctgccaaaacaaaatatgataggctgactagctcataaatgacagaacttgagaaacagttccggagcctgggaaatccacaattgaagtgccgcagattcagtgtctggtgagggccactttctgggtcacagttggtgcctcctcgttgtgtcctcacatagtggaaggggcaagggaactctctgggtcctcttctcactgatgtcactcactaatcatcattcaaggccccacctcctaatatgattatattgggaataaggtttcaaggtactacttctggagggacacagacattcagataatagcactgccctctctcaattccttgagcatggctcacctctcctccagcccagggcacactgcatgaccatcagttgttttctggggtcaggctctggacctgaacccacaaggtcaggcacattcacttttgtattacatcccgggctcagcatggggcctggacccatgtaaggaggcaaatgagtgttaagggaggctgaaggtttgttgaaacttttggagtacctcattcacatgttcattcgttcatttactcactcatccaacagcatttttttttttgagacagggtctcactctgtcacccaggctgaagtgcagtggtgcaatcatgactcactgcaaccttgacctcccgggctcaagcaatccccccacctcagcctcccgagtagctgggaccacaggcacacaacgctatgcctggctaattttttcattttcagtagagacgaggtctcgctatgttgcccaggctggtcttgaactcctgggctcatgtgatccgcctgcctggcctcccaaagtgttgggattatagacgtgagccacggcgtctggccaccagcgatttcttaaatgtctatacacgcctgaaactgaaataaggccgggaagtctcttgcccacttagcaattacagagaagggatatatgggtttatagtaaatgtgacaagtaagtccagggggccctgggaacacacaggagaggcacagaacttgaacccagggtgtcagggaaggagtcctggggaaagtgaggtctcagctaacatctgaaggctgaacaggagtttgacatatgaatggggtgaggggatgtgggagctgggggccggatatctgaggaaacagttcagctttatttcagctggccgtgtggctttgagcaaacaagtcacaaaaattctctcagattcccattactaaaatggggataaaaggagctgcctcggccgggcgcagcagctcatgcctttaatcccagcactttgggaggccgaggcgggcagatcaggaggtgaggagttcgagaccagcctggctaacatggtgaaaccctgtctctactaaaaatacaaaaacttagctgggcatagtgccgggtgcctgtaatcccagctactcaggaggctgaggcaggagaactgcttgaacccaggaggcggagtttacagtgagccgagatcgcgccactgcactccagcctgggcgacagtgtgagactccgtgtcaaaaaaaaaaaaaaagaaagaaaagaaaaagaaaaagaaaaagaaaaggagcttcctcgtgcatccgttgtgagggttaaatgagatcatgtgggccaagtgcctggcatatagtagatgctcaatggacatctgatggcataggggcgcctcagcaatccctcagcatgacaccctgtattaaagccaggtagatctcttgtgttttgccaaagatccattttgagatcctattcaccttggctctcaagctgagagtagactaagaaggcctcaagtgttcagctagtgatgacagctgagcaaaccaataggtagttactgcacacgccaggccatcagatgccaaaaaattttgttttgcaaattatatagaccaaaagggaaattgagcctgaaagttccagtgtgtggatgcgagaacacactaaagaaatctctacctgaagcctggggaaggggctgctgatggtgctcttctcacatcatactcagctcctgccaccattagcagcttcatcttccttttaaaaatttttattgaaaatagagacaaggtctcactatgttgcccgggctgctcttgaactcctgggctcaagtgagcctcctgcctcggcctcccaaagtgctgggattacagacatgagccatgtcagcagccatgttctaagctagcagcttcatgttctaagagggcagatttcaagtttaggatcctgaatttctctgtatggaagtgagcagatcacaccttctcaagcagggaaatgctcagctctgccaaaaagagaaacaagttattgagactgagaaatccgacatttttggtgagttagctgagtttgcaaacagtaaactgtgttttcaaagacataatgctgtagcaatatcttcagaataaaatcaggtaatgtaattgatcctaaatttgttattttggagccaagtaatcaatagctgcctggtgacctgggcatcttccttctagatcatggctctgtgaggacagcagctctgcccatgttgttcaccacagggctgaacaccgtgccacatacttggcattcaaaattgttttttctccaacctgggcgacagagtgagaccccgtctctaacaaaaaaagaaaaaaaaattttgttgaatgagtgaattttgattagatagatctaatacattgtataacgttcataagtgtttctctcctaagtccaatcctgaattcttgtgtaataataacctcattgaattattttagcagaataattggatatcaaggatgggtgtgtcggctaccaaatcactccatcatattagacttctctctttgagaaccctgacatggctccatgatccataggaacacacgtgtctgtgtgtgtatgcatataatgtacacacatctgtttgtccgaacaacggccatataaagattgtgtaactgtcaagagcctttccagctcattagatgggttcctggacatctcttaactctgtggttcagctttccccctgcaaagtggagatgtatttcagtttcctatttcagtgaaagtttagaagaattatcgtgacatcattttcctgaatgacaaatgtccacttagctgcagggaattccttctaggaaactgaagatcaaaaattgaaaatttatattacaaagcaatattaagatgtacgcctttttttttttttttgagatggagtcttactctgtagcctaggctggagtgcggtggcacaatcttggctcactgcaacctctgcctcccgggttcaagcaattctcctgcctcagcctcctaagtagctgggattaccggcgcacaccaccacacctggctaattttttttttgagatggagtctcgctctgtcacccaggctggagtgcagtttcacaatctcggctcactgcaagctccgcctcccaggttcacaccattctcctgcctcagcctcccgagtagctgggactacaggcgcccgccaccacacccggctaattttttgtatttttagtagatatggggtttcaccgtgttagccaggatggtctcaatctcctgacctcgtgatctgcccgcttcggcctcccaaagtgctgggattacgggcgtgagccaccacgcccagccacacctggataatttttgtatttttagtagagatggggtttcaccatgttggtcaggctagtcttgaactcttgacctcgtgatctgtccgccttggcctcccaaagtgctgggattacaggtgtgagccaccgcgccaagccagggtttttgtttttgagacagggtcttgcttggctgcccaggctagactccagggacacaatcatgactcacagcagcctcgaactcccagactaacatgatccttccacctcagcctcctgagtagctgggaccacaggcatgcaccacgatgcccagctaattattttttaatttatactttgtagagatgggggtcttcccatgttgcccaggctgctctcaaactcctgggctcaagcgatcctcctgcttcagcctcccaaaatgctgagattacaggcataagccatcgcacctggcctgtatttttttttttttaagagatggggttggctgggcacagtggctcacgcctgtaaccccagcactttgggaggctgaggtgggtgaatcacgaggtcaggagatcaagatcatcctggctaacatggtgaaaccctgtttctactaaaaatacaaaaattacccaggcgtagtgtcacacacctgtagtctcagctactcgggaggctgaggcagaagaatcgcttgaacctggcaggcggaggttgcagtgagctgagatcatgccactgtactccagcctgggcaacagagcgagactccatctcaaaaaaaaataaaaagagagacggggtcttgctgtcacccaggctagaatgcagtggtgcaatgatagttcactgcaacctccaactcctgggctcaaggaatactcctaccacagcctcccaagtagctgggactacaggcatgtgccaccgcaccccgccaattttttttttttttagtggacacagggtcttgctatgttgcccaggctagcctcaaactcctggcctcaagtgattatcttgccttgcctcccaaagcactgggcttacaagcatgagccatggtgcccagcaatataataatactgtactagagaatgtttttgaaaatcttcagcaaaaatgatacttctttgtatgaggagagatttccagccacttagtgccaacaagttcctgatggagattacaatttaacattatgggtttggttttgagaccaactgaaaattccaactactctttggcaatagaaagaattttgtaatagactgagcaaacatatcaaaacaggtgatttttgactgggcgtggtggctcatgcctgtaatgccaccactttgggaggctgaggtgggcggatcacctgaggtcaggagtttaagaccagcctggccaacatgatgaaaccctgtctcttctaaaaatataaaaaattaggtgggcatggtggcgggtgcctgtcatcccagccactcaggagactgaggcaggagaattgcttgaacctgggacacggaggttgcagtgagctgagatcgcgccattgtactccaacctgggcaacaaaagtgaaactctgtctcaaaaaaaaaagaagggctgggcgcagtggcttatgcctgtaatcccagcactttgggaggccaaggtgggtggatcacctgaggtcaggagttcgagaccagcctggccaacacggtgaaaccccatctctactaaaaatacaaaaattagctgggcatggtggtgtccatctgtaatcccagctacttggcaggctgagggaggagaacgcttgaacccaggaggcagaggttgcagtaaatcgagatcatgccactacactccagcctgggcgacagaacgagactccgtctcaaaaaaaaaaaaaaaaaaattagcaccttcacattggttattcacactaattaggcattcaaattgtataccatcacttgcccacagtataccttgtagagacacttacttggtgaaagttcataattgctttaaaaaacttttttgaatttccagtagttatcaccacaatttctaagacaagaaaggctgttgtgtcatcagggttggtttctggtgaggcctctctccttagctttcaaacggctgccttcttgctgtgtggcctcacatggtcttttccccgtgcatgagcgtccatcacgtctcttcttataaggacaccagtcctattggattaggaccctccttttatgacctcatttaacctgaattacctccctaaaggccctatctcaaatacggtcacatctggggttagatcttcaatatatgaattaagggaggggagacacaattcagtccatagcaccccctttgcaaacaatctaccccaaatgcatctagtgatacacaagatgttttactccatttacttgctttgatttcagtacatggtttcttctgggaaaataaaatctttgggatgaagaaagtggtccaaaagctggctggacctctatggctactaactgccctataggctggcatctgtttttactctttgtgaaacctaaacctacagtaggttgttcagggatactacaagtaagtattcagagaaatcttggctcactgtaacctccgcctcccaggttcaagcgattctcctgccttagcctctccagtagctgggattacatgcccggctaattttttaatttttagtagagacagggtttcgccatgttggccaggctggtctcaaattcctgacctcgggtgatctgcccacctcagcctcccaaaatgctgggattataggcgtgagccactgcgcccgacccagagtttcactcttgttgcccaggctagagtgcaatggcgcaatctctgctcactgcaaactccgcctcctgggttcaagcaattctcctgcctcagcctcccaagtacctggaattacaggtgctcgccaccatgcctggctaatttttgtatttttagtagagacggagtttcaccatcttggccaggctggtcttcaactcctgccctcaggtgattcgcccaccctggcctcccaaagtgctgggattacaggcgtgagccactgcgcccagccagttaataactttttaaagcttccatgagcaacttacatcactcacacatgctatgctaacactacgtatatgtacatatttatcacctaatcttctgaaaactcaattgatcataagattataaacacacatactgcatttttccctaagttgccaaacttagtctcctccccccaccaacccccaccaaaaaaactctttctcttcaagttgccataataaaggtctaaaatggggttgatgatggtgataaaatccttactatttaaatggctactgatttataaggcaagctatatttattggaatgtgggattctttttagcattttattctattcaaataggctttttcttttattcataagctaaagattttcttttcttccctcttgccttctttaattgtattacttttgtttgtgtttctctaaaagaggttatatagtttattctgtttgactataccatattacaaccattagggcaagatcccaaagaaaaacaatgcacctctcacctcctacggcgcctgcgcagaggtactaaagtgaagtatgcatgttacaaggccagccaccctcagaaacattcaatgatgactaaatgctcacactttatctgaacctttgatgtgttgtacccagctctctaatcctctgcacacgatcttcctcgggacaagacctgatacaaagatcagtgtgtgttttcagcagtggaggcagcactgggctctttgagtttccaagctaattaagggaaatttgtcccagttggtgaaggcagatgccttaggggtcagtcttcctaacattttgggcaccaagttaaaaaatcaacagtcccccttcccttcatcatgtgacttaccccagggcaatgaattgggtcccctctgctccatccctataaatcatacatttatacatactgttacatattttattcatttatttgtgagacatagtcttgctgtgtcacccaggctggagtgcagtggcgcaatctcggctcactgcaaccttcgcaacccgcgttcaaatgattctcctgcctccgcctcccgagtagctgggactacaggcgtgcaccaccatgcccggctaattttcgtatttttagtagagacggggtttcaccatgttggccaggctggtctcgaactcctggcttcaagtgatctgcccacctcggcctcccaaagtgctgggattacaggcgtcagcctccgcgcccagccttgttacatactttcataatgcttgtaatatatacttctatttcaacttacataaacatgaaatgtaaaaatttcaatctgtaaagaggtaagtggctacctcacctacgatgtggtaaataagacgtgtcaacgcagccatcctgccccagccgaccagaccttaatgctccaaaaccatccgtttgcgcctggaaaactgaggaaagtgtttattcccttacacacgcttcgccaaaggccctggcacgtagggctttttcactgctgcgaacgttagaccggcctgtgataaggagtacaattaatctaactttggtatactatatccagagaccacagggggctcgctctgcgatttatggtgcgaggaggaccagacaccccctgtgcccgtcctactcctgcagatcaaactcacagccacacttttcggaatgagaaactggacagtaaatgaacgcaagaaccatggtgcccaggcagagaaccccgctgggtttgctacgaaggttgcggtggaggcgcccagtgcaccaggcgccaaggcccggtatgtgacctcactaacctccgccagcgcgcaccctgtcctgccccttctcgggccaacaaccccacacgacgcagcggtgtgagaaccagcaaccggaaccgcaaaagcacggctttcccggagcccgggctctggactggcacccactgcgcatgctccagagcggcgaccaatgggagcccggcgcgcagggacggaggcgggcccgggccgctaccgagaagcacagggacccgacttcagtcatcgaccaatcagagctcacagccccccacaccccctcccccccggccctgagccaattgccagctcgtgtgcgggagggccgggtcaagactaagtcaaaggaggagagggcaacgcggtgggcaggagagaggccaacggccgcccggggcgaggggagccggtaggacgggaccaggactggccgacccggccccgcgcggggaagggggcgccttcctcccacaacacaaaacggtgcgcccgggttggccgcccctccccagtggtgcggccccgggtggacgcttccgtgcgcgcgtccatgcccagccattgcgggctgcgggctccaagggtcgcacacgctggagagtgcaggttgccgggtccacccacagggctgtagacacccctagggtcacacagacaaggctctggacacccacaggggcacacacattggggagtgggcactcctgggctcacaaagactgaggcgcaggaaggtagggcgcgcccgcccagagggagttggtggtggctgagggtgagggcaaggtagggactgggaggagacttctggttccctggttggtcctggtggggcctgactgggccagggttttcctgtgcaggtgcggggagtagggcggggtctctggttggcggggagggctccaggagcctgtcccagccctgggggtgtctggctgagccccacagaagggaactctgagatgggctttgcagcaggggaaagaaaagggaggtcgcgcatactggcttcctgaccatccaccaatggtggtggaacctggaagcctgagggaggaaggtgaggaggcgcttgagggaggggggaatctaggcgtcagggatgatagttcattgatccaagttactcagctatttcatagaaacggcaacagtaatgaataattataacacgtgccaagctctcctgatcactttacacaaatcatctcactgcatcttcacaacaaccttaactactattatcatcttcgcgttctggatgagagacctgaggccctgtagaggttaccagaaggcacacagctgagaagcgccagggccagggcaagggtcaggctgtgcactctggactctgtgttctgaccactgcgtcattgactctacagatgtctctgctttctgtgctcaccctgtcctcattccgcccccggcaggacagagggcccctgaagcatccatttgcccacagcgtcagtgaactgtgtagaactctctgtgcaagggagctggcccctgcgcaccctgagtcgtttttcttccctggctccccacgcaggggcagtgaacagaggagagggaagccttgttggaagagggcagtaaatcacagcatagctatccagactgcaattatttacttagtgcattcagggtcttgtgctaggtggtggggataccgcactgaaccagacagacaagggtcctgttcctgcctgccctcggggtgtgttttgggaattcctccttgagggtgctttggcattgaatgggcagaggtctggtgctggggggctgtcccacaccagcaagacttgtaatgtacatgaatgtgaatgtcatttcaggatagtaaaaggaggcctccaaaaatgtttcttattaaaagggagcattgggtctgagggttgggaaatgatatttccttaggtcaggcctgtcccaggaagcaaccctcagtcagggatacggaggaccatgaagatagtacggtgaggggaggaggaagatacagcaacgtaaattttgccatcttggcctcagtttggttttaaaggacagcagttggaccctccccatgcctaggtctcctgcatggattcagtcagtggtggcccaggtgtggaagacaccccccatgtcttattacctactctgggcttggggtgtggtgatcaggaccttgtagtcaatatcttcccaacaagaagcaaaataagaacaagatataaacaggaggtgattcatctggtgcccctaggggttggaggggaaggtgatggggtccatcctggttcttgggggttcctggtgtttgctgtattactgtgaagtaaattaacacttctgctgtgtgaactggcttgcattagaccaactctcctgctgagagcaaccagaaaagctggattaaagttcctgtttttgtttttgagtctatttgaaggcccaggagagcaaattatctttgaggtcatcacctcaccaagtactggcatccagtgcagaacagcaagagttgatgagaacatcagactagaagaacggagtgaaaaaaatttaaattttttttaaaaagagtttgtggatacatataaacgtaataaaccagctccaaattattgatgccagtcaatggagtaatcaaaaaatatgaatatgaaaagtgatactaaaatgattagtaaatcactatagtctataatgggaaaactcattctattagggactaaaataacaaaaatgtgctttaagtttttctttcttttttttttttcaagagccgacgtcttgttctgttgcccaggctagagtgcactgaggcaatcacagctcactgcagcctcgatttcctaggctcaagcaatcatcccgcctcagcctccccgactacaggcatatgccaccacacccagctaatttttaaaaaactttttgtagagatggggttttgctatgttgcccaggctggtctcaaactcctgggctcaagcgatccacctatcttggcctcccaaaatgctggattacaggggtgagccaccacgcccagcctgcttcaggtttttttgttttgttttgttttgttttttagagaaaaatatacattttacacttgtctgctacttagaaataagaacaggaaatatacaactttaaaaaattcattctcataccttggtaacgaaatatccacctttaaatgttaatttataaaacaaccagcacaaccagcaaggctgttgtggctcacacctgtaatcccagcactttgggaggtggaggagggcagaatgcttgagcccaggagattcagaccaggctgggcaacatagtgagaccccatctctacaaaaaatatgataattagcgaggcatggtggtgcacacctgtagtcccagctacttgagaggctaaggcaggaggatcccttgagcccaggaggtcgaggctgtattgagccgtgattgcaccactgcacttcagcctaggcagcagagtgagactttgtctcaaaaataaataaatagttaaataaaacaaccagcagctgctctgcctatggagtagtcattttttattcctttactttcttaatacatttgctttcactttattctatggacttgctccgaattctttcttgtgtgagatccaaaaaccctctcttgggtctggatcaggacccctttccggtaacatcttcctggtgaaccacgaagggatgatactgaggagaccctcgacccaaaggaaaaagactgcagcactgattggccaactttggactgaccctgcttattcctgtgaaccaatcagtgacctgtgacggctcctcagaagaaacaagagggatggacaacaccttttgttggagctcagttatgagtggctcagttatgactgagctcccttctaccctgaatacaagagaccctaataggcaggaatatcatcgcccctattcctcctgaagaagttacagaagatgaatcttcctccctctaaaccgttaggattaagggtttccttgtaaaagggaagggcaaatatgtcagaggcgtttgaaccagagtgattctatcttgaataggggctgggtaaaataaggctgagacctactgggctgctcctgggctactcccaggaggttaggcattctaagtcacaggatgagataggaggtcagcacaagatacaggtcacaaagatcttgctgataaaacaggttgcagtaaagaagctggctaaaagccaccaaaaccaagacagcaatgaaagtaacctctggtcttcctaactgctcattatacactaattatgatgcactagcatgctaagagacacttccaccagcgccatgacagtgccatggcaacatcaagaagtcaccccacatggtctaaaaaggggaagaaccttcagttcccggaattgcccacccctttcctggaaaactcatgaataatccaccccttgtttagcatataattaagaaataactgtaagtatccttagtccagcagcccaagctgctgctctgcctatggagtagccattctttattcctttactttcttaataaacttgctttcacattaaaaacaacaacaacaacaccaacaaccagcaaatatatcagaggcttagcatcccctattcaaggggacagttctggaggccgagaaagaagtagaaaggtggagaataaaagacacaaaggagcagaagaattttatcttggcctccatgtggcacctcacagcttgggaacaacaatttctctcataattttcctcagctccaccactcacaagctgtgtgacctcgggcaaggcacccaagctcctctgggcctcagcttcccagtcagtacaatggggtaacagtagtgcttacgttttttgtgtttttttttgagatggagtcttgctcttgtcacccaggctgaagtgcaatggcacgatctcggctcactgcaacctccgcctcccaggttcaagtgattctcctgcctcagcctcctgagtagctgggattacaggtgtgcaccaccacaccagggtaatttttgtatttttagtagagacggggtttcatcatgttggtcaggctggtctcgaactcctgacctcgtgatctggctgcctcggcctcccaaagtgctgggattacaggcgtaagccaccgcacccggccagtagtgcttactttgtggggtcatctgtgaatgtgaaatgagttaataaatggaaagcacttagaaaagcctctggaaccactgaatcaaattggatatcattactgaaccttcattcaatgcttcaatacccatttagtgtcatctgtccaaatgctggagatacgcctagcacacactgactgctcagtgagcagtgtcacaatgaacacgtgcaatggccttgaaggccacatcggggcttgccctgatcagcaggttggaggtgctccaggcccgaagcttagctgtgagtggggacacgggagggaggttggaactgccactgcagaaggggttctgaacctaggttcaggagagaggctttgaacctgcacgtgtgggaagccatggaagtttccaggaaggactgcaggtcccaactggagatgtgccgttcctccttcaggtacctgggaatgtcagtcacaccccagacctgctcagctcccccaaactgctgttcctgtatctgagagcttcaagtctccaaatggcctacctcatacatggggaaactgaggcctggggaggccggggactgagctagcattcacttgtggaaatagtctggcatcatctggagaagttagagacatgcaaaccctacagccctcagattcccgtctgagagtctgcatgcctatgtggaccaggagatgtgtgcgggagtgaacactgcagtgttgctcccaacagcaagaaccagaagcagcccaaagggctgttacaggagaatatggacacccaggctgcacatgcacaccatggaatgctgtatggcagtggaaataaatgaacagctaccactataggcaaacaggaatcacagcaacagccaagagtgaaggcgtggagggacgagaccatgcactcacacctggcctgcctggctcgcactccgggcaaaggggtcagaacagtgactggcacacacgttaagtgctatgtgagtgttaagataaaactaggatgtccagtggggagaaagcaagcctttgaagattatgtgcttttacaaacttcaagtgcaatgaaaactaaacaagatgttgttcaggcattcatatatgatataaagttcctttctttaaaaaagggatgggctgggcacggtggctcacgcctgtaattctaatactttgggaggccgaggcaggtggatcacgaggtcgagaaatcgagaccatcctggccaacatggtgaaaccctgtctctactaaaaatacaaaaaaattagctgggcgtggtggcgtgtgcctgtagtcccagctacttgggaggctgaggcaggagagtcacttgaacccgggaggcaaaggttgcagtgagccgagatcgtgccaccgcactccagcctggcgacagagtgagactccatctcaaaaaaaaaaagaaaaaaaaaagtatgacaagcagaaagtaatttgggagctgcggggaggcaagggtaagggatggggaagtggaccagaggcatatgcgtcattggcagtgtctaagcactcacgataggcgtggatcacaggggctcgctctgtaattaaaaggaaaagggtttttgttgtgttgttgttgttgctgtttttgagacaagggtcttgctctgtcatcatccaggctggagtgcagtggtgcagtctcagctcactgcaacctccgcctcctgggttcaagcgattctcctgcctcagcctcctgagcagctaggactacaggtgtgtgccaccatgcctggctaatttttgtattttttagtggaaatggggttttgccatgttgcccaggctcgtcttgaactcctgacctcaagtgatccactcgtctcggcctcccaaagtgctgggattacaggtgtgagctattgtccccagccaaaaggaaaagttttactgtagtaacccttccggactagggacctcgggcctcagcctcaggctacctaggtgctttagaaaggaggccacccaggcccatgactactccttgccacagggagccctgcacacagatgtgctaagctctcgctgccagccagagggaggagggtctgagccagtcagaaggagatgggccccagagagtaagaaagggggaggaggacccaagctgatccaaaaggtgggtctaagcagtcaagtggaggagggttccaatctgatggcggagggcccaagctcagcctaacgaggaggccaggcccaccaaggggcccctggaggacttgtttcccttgtcccttgtggttttttgcatttcctgttcccttgctgctcattgcggaagttcctcttcttaccctgcacccagagcctcgccagagaagacaagggcagaaagcaccatgagtgggggcccaatgggaggaaggcccgggggccgaggagcaccagcggttcagcagaacataccctccaccctcctccaggaccacgagaaccagcgactctttgagatgcttggacgaaaatgcttggtgagctggggatctcctgcccccgccccgtccccaccgtttcttcctcttcctctcctccttctctctcttcccctcctcccgctcctcctttccctctccatcatctcctctcctagaatttcccgtcataatccacccttcccaggaagatctcaatgtctacttgccttccctctggctgcagctcttcctttgggcccatgactgtcatgaggcaggaaggaccaggtctggctccaagaccttgtggctacccctgaccagactccactgacccctgctttcctctcccagacgctggccactgcagttgttcagctgtacctggcgctgccccctggagctgagcactggaccaaggagcattgtggggctgtgtgcttcgtgaaggataacccccagaagtcctacttcatccgcctttacggccttcaggtgacccccccacccccgactggacttgcaagccagttctcaacccgcaaacccagatctgtgtccatatgtgtccatagcttcaagacctcagacctgatcagtgaatccctgagccccagaaccaaagactcatccagatggcaaactctgacttgcctttctaagtctgcaatgactggccccagtctccgtatcaagatctctaaagcccccagtattagtctgctgcctaagcctaatcttttccacaaattccaataaatgagcactgtatttgtacctgaacctcaaatctattctaaactcaacattttgcatcccaggaatctctcatcaaaactcctgaaccccagatgtttgccaagctcctaagtcataaatctgttcaacaaaccccaaagttgaatattccattgatccttgaactccaaatctgtccttctaaatccacagcacagaccccagagttcccatattaaaattcctgaacactcaaataccgaggtagttcttaagcaaaaagtcttttccacaatcccctgacctgaactttctaggtttaagccccaaattcatccttttaaacccataaagatggacccagcataacttccagatcccaaggctatcaaatatccaccaaactcctaaaccataactctctccacaaaccccaaattgcacttactttagctggactccccgcgaaactcccaagtctatgtgtctgaacttcaaatctcaactccaacccccaaatactagaatcctacctgtcatgaattggggctggggtggtgggggagggcatggattgaatctgtgaatgagcctcaacttcctaagactagagtcctaaattatgaaattcaagcccccaagtcccagatctagggccccaaaccccaaatccaaacctctcacaaaagtgtatggctcccagactataccccacaatccacacccttagacaccaactctctggtgctgagctgaaaatctccaaaccagactatgaggctcccaaatccagacaccctgctccctgcccagctaacaaaagcctgccacccccggcgtgcctcagtgccactgtgcctcccaccctacacctctccaggctggtcggctgctctgggaacaggagctgtactcacagcttgtctactccacccccacccccttcttccacaccttcgctggagatgtaagtgatcaaccagccctcgggcctcacttggggtgtggagaggagatgggaaagttgcgggggacctgggaggcggctgaccccaaggtatgtgcaggactgccaagcggggctgaactttgcagacgaggacgaggcccaggccttccgggccctcgtgcaggagaagatacaaaaaaggaatcagaggcaaagtggaggtgaggaggccacaggggaggaaaggaagttgggcagaggtgagtgcaagcctggggaactagaaaagtcccctctcatggtcctggctcccaatccatctatccacagacagacgccagctacccccaccaccaacaccagccaatgaaggtgagtcctctagtgcaagtaggggtaataaggggctagcccaggaacctgtggcagggctgtgataactctctacacattccatcttcccagagagaagaggagggctcccacccctgcccctgcatccaggtggagaccaaggaggtgcgtgctgattcttccctgtgtctctggatggatgggtaagagtggatggaggaatgaggagttggatgggtgcgtaagtgggtgaatggataggtagattgataggtatgtggatggacgagcaggtgcatggatgtgtggactgatggatgggtggatggattggcggtagatggctgagtagagggatgaattgatgggaggatgaaagtctaagtagatagatgcataggtgaatgggtatgtggataaatgaatgaaaaggtagatggatgactgagtaaattaatcaatgagtgaatgaatgaacagtgaataaatgactaaatgacaagtttcagtcagtgaagaaagcatgattgaatgaataaatgagtaaatgaatattttaacaaattcattagtcaatgagccagtgaatgataaagcatgagggaatgaaaacatgaatgaatcagtgaatgtatgaatggtttgtgggatccacccacttctccatagaccctacttgaacccttcacccactacctccatgaccatccaacacacacacagatttccctcaaggcttccgtttcttgcccctgtgctttggttggttggtaagtgggtcaatgagccaaccaccctattttccccacaggccctccagtgggtccgctctccctggggctggcgacagtggacatccagaaccctgacatcacgagttcacgataccgtgggctcccagcacctggacctagcccagctgataagaaacgctcagggaagaagaagatcagcaaagctgatattggtgcacccagtggattcaagtgagagccactccccagtggacccacagattcctgggggcagaggggcacatgaacaagtggacagctgagtgaatggaaggatgggcagatgggcagatggctgggtggctgagtgggtaaatgggtggttggataggtaggtgcagggctgggtctagggagaggtaaataaggcaccaagggtacaaaatttaaggaggcactcactctcagaggcatgcaactgtaattcctgactctcagagtgagtgactcacttaaattttgcaccctaggcaccttacttgcctcaccctgggcccactctgggtgggctgttaggagagcaggtgggtgggcaggtgaacaaatggatagatagatgaggtagatgatggatgagaagggctggtgggtaggtgggtgagtggatgggtggatggatggataaatgaatggatgaatgaatgggttgaagaatgaatggataagtggttggatggacaagtttatgggtggatgggttgatgggaggtgcgtggatagatagatgggtgagtggataggtgtgtggacagattgatatgcaggctgattggctcacagacaaggtggatggggatggacaggtggacagatacgtggatgaatggacagttcaatggataagtgaacagaagtgtgtggttgcatgggtagaaaaatgagtggatggatagatggaaaggtgggcacatgggtaggtggatgggtggatggacaagtgtgtgtgaggacagactggtggacaaatgggtgaacagacatatgtgggcagatagttgcagagacagatgtatggacagatcagtagtccaacagatgaatgtgaatgaataggtggacaaatgcatgggatagatggggaaagagggatgggtggatggatcagcaccacaaactatggagcccttctaattccataactcctgcctatactcattcactcattcagtctcattcattaattctggcccctcagagtctctttgggcaggagagggcaagagggtttcactatgaagggagggaaggaagggcagtgaggattcactggagtctcttcacctctcccaggcatgtcagccacgtggggtgggacccccagaatggatttgacgtgagtaacttcagagtctcttggactccactaaacttccacccacccttccaaagaccactgctgagaccccacccccagatcgtgcccttcccacacccctctcagatcccttgctgggatggacccaacgacaatccatgtcgcttgtctcctcgccttattcctctactcctgcccctggcctttttcctcctgggcaggtgaacaacctcgacccagatctgcggagtctgttctccagggcaggaatcagcgaggcccagctcaccgacgccgagacctctaaacttatctacgacttcattgaggaccagggtgggctggaggctgtgcggcaggagatgaggcgccagggtgagaccctgcttccatacgctcccttctctagcccaagcagctcatagctaagatacgcactaagtcactcagtccttatgggagcacctatactgcttcagtcaggagttggtcagtgggggtacccattttacaaatgagcaaaactgaggctcagaagaaatcaatgagagttacagctatgtgttataccccctccacagagccacttccgccgcccccaccgccatctcgaggagggaaccagctcccccggccccctattgtggggggtaacaagggtcgttctggtccactgccccctgtacctttggggattgccccacccccaccaacaccccggggacccccacccccaggccgagggggccctccaccaccaccccctccagctactggacgttctggaccactgccccctccaccccctggagctggtgggccacccatgccaccaccaccgccaccaccgccaccgccgcccagctccgggaatggaccagcccctcccccactccctcctgctctggtgcctgccgggggcctggcccctggtgggggtcggggagcgcttttggatcaaatccggcagggaattcagctgaacaaggtgaggacaggcaggatggaggattgggggtctaggactctggggtgtcccgtctaagtcaggatactggggggctgaggccaggactgaggagagtgccaggccttagggattcagtgatagggttgaaaggttggtgggaagccttgaaggggactggagtgtgtgggagagaaaatattgatggaggggcggggagaaatgctcctttcccaggccctaagccctctgtgctgatccctgcctgctgcagacccctggggccccagagagctcagcgctgcagccaccacctcagagctcagagggactggtgggggccctgatgcacgtgatgcagaagagaagcagagccatccactcctccggtgagctgatcctgccggggcctcaaacctggctcccagggctagcactggcctcaaaacaatcccagcagtcaccaccaatagtgacatcagccccatctgtttgacagcattaacatgaatcttgtgtcagcctcgtttttgacaatgttaacattaagtcattatgtgacaataatataattaactccaactttgacagtaatattaacattaatgccagggtgtgtccacaatattaatgtcattcccacatgttcagtactactaacatcagctggccgggcgcggtggctcatgcctgtaatccaggaactttgggaggctaaggcaggaggatcacttgagcccaggagttcgagaccagcctgggcaatatagtgagacctcgtttccataaaaactaaattcaaaaaaagtagtcaagcatagtggtgtgtgcctgtggtcccagctacttgggaggctgaggtgggaggattgcttgaccctgggaggtcaaggcagcagtgatccatgattgtgccactgcactccagcctgggtgacagagatcctatctcaaaaaaaaaaaaaattaacccattatgtgatgacaatattatgaagaacactattgttgacaatattaattttaattccatgtattaacagatttacattaattcattatgacgtaacctaatctaatcttttaaaaaatttttttgaaacagggtctcgctctgtgtcccaggctggagtacagtggtgcaatcatggctcagtgcagcctcaacctcccaggctcaagcgatcctcccgcctcagctcccaaagtagctgggactacaggcgtgtgccaccatacctggctaatttttggtgtttttttggtagtgatgagctctcactaccaagctctcactactctcatgttgcccaggctgctctgcaactccagggctcaagcgatctgccccgcctcagcctcccagagtgctgggattacaggcatgagccaccaggcctggctgttaacctaatctttttataataatgttactattactctcttaatctgtcagcaatactgtcactaatccattatatgatgcaaatattagtatcaacctactataggaacttcatctttcgacaatgatttttttttttcttttgagacggagtcttgctctgtcacccaggctggagtgcagtggcgcgatcttggctaactgcagactctgcctcctgggttcaagcgattctcctgcctcagccttccgagtagctgggactacaggcacgccactacgcccagctaattttgatgttattgtcattaaccccattatgtgtcaaaaatattagcgttaaccagacaggaagcaataatatattatcacacctttgctaatattatttaaattcaccctattatgtgataaataggttaacattaaccctttgtttgacaatatctcgactaaccacatttttgacagcataaacttcaactccaactagaactcagaccccaactataatccctttcttgtcccaaatggaaactctaacttgccctcctctagcatgagacctcagaaccccagggtccagtcctcacctcccaggccctatgaagccccccaccaacctcccagggcatcttatctttctctttccctccagacgaaggggaggaccaggctggcgatgaagatgaagatgatgaatgggatgactgagtggctgagttacttgctgccctgtgctcctccccgcaggacatggctccccctccacctgctctgtgcccaccctccactctcctcttccaggcccccaaccccccatttcttccccaccaacccctccaatgctgttatccctgcctggtcctcacactcacccaacaatcccaaggccctttttatacaaaaattctcagttctcttcactcaaggatttttaaagaaaaataaaagaattgtctttctgtctctctataaatctcagtctgtttacattccaaatgtgggaatggggtccctttcccccaaagtcccttttattcatttatcccattttatttatttagccttacatgtatatattcattcattcatttattccctcagtcatttagcctgtatttctttgtttccttctgcccctctgtctttcaacatttattgtcaggtactattttaggggctaggaatcaagaagtgggaaaaaaaacagacaagaattcctgcccttagggggtgaaatccacattctaggggaagagacagacaagaaacaagaaatcaaatagaaataaaagatagctgcagatcatgataaatgctgtggagtggtaaggcagagatacagatgaaacaacattcagatggagcagtcagggatggtcacttggagtaggtgatggtggtgctggacctaaagagagagaaatgtcggcccagttaatatttggggaaaaggggttccaggctgagggagcagccagtgcaaaggccctgaggtgagaaaaggcttggcatgaggccagatgtcatgcatttaattattttttaaaaaaataattcaatcggctgggtgcagtggctcatgcctgtaattccagcactttgggaggccgaggtgggcggatcacctgaggtcaggagttcgagaccagcctgggcaacatggtgaaaccctgtctctactaaaaaatacaaaaattagctgggtatggtggtgcacacctgtaatcccagctcctaatgggggctgaggcaggagaactgcttgaacccgggaggcagaggttgcagtgagctgagatcgtgccactgcactctagcctgggcaacagagcgagactccgtctcaaaaaaaaaaaatcattcaatcaacacaatactagattaagagcagcatactcaatgagcagacctccccattctccatgcccataacaactcacacaccaggatcttgatgggcaggatccccctctcatttttaaaatttggctctgcccagttcccagttcaaatcaagcactggccaattgcaatggaaaaggcaaagacttaattatcagacagatctgctctagaacccgggaaagatgcctcacctctgagctttggtttccgcatctatacaatggaggtaactgatttccaacggggatcccactgagtcacctctctgcctcctcaggacttgctctcccagaaacaaaggagtaactcaaaagcgtccttggcgtttacagctatttccaagggcataattagaaactgttgcacagcaaagcctagaattgagctccctgccccttccgatttctgaaatctggtgaattcgagatctcagacatcctacctttagaggaggagaaaaagagaaaggtagtggggaggaagataaaggtgagggagactccagagagggcaggcttcttcagtctgcaagagcaacggaagaatttctaggtggaaaggggaactcccccaagctagagaaggagggagtctcaggtttcctttaattcattattctttacaccgcaacaccactccccaccccaccctgaccaggtccccagatgggcactgagtctaggaaggatccatcagcatcatttatccctactcccagtcccccacagaaatcttagaaatccagtgttctggttggccgggcgcggtggctcacgcctgtaatcccagcacttcgggaggccgagatgggcggatcatgaagtcaagaaatagagaccatcctggctaacatggtgaaacctcatctctactaaaaatacaaaaaattagccgggcgtggtggcacatgcctgtagtcccagctactcaggaggctgagacaggggaattgcttgaacccgagaggcagagttgtggtgagctgagatcacgctactacactccagcctgggcaacagagcgagactccgtctcaaaaaaaaaatgtggtatacacaatggaatactattcggccataaaaaacaatgaaatcatgtcttttgcagcaacatgaatgaaactgaaggccattaatttgagtgaaacaactcagaaacagaaagacaaatactgaatcttttcacttgtaagtgggagctaaataatgtgtacacatggacatagcatgtggaattataaacaacagaaacttggaagggtggggaggtgggaaggaagtagatgatgaggaaattacttaacgagtacaatgtgcattattcaggctatggatacagtaaaatgcctgacttcaccactacacaatgtatccgtgtaacaaaattacacttgtggcctggcactgtggctcatgcctgcaatcccagcactttgggaggccaatgcacattattcagttgatggatacagtaaaatgcctgacttcaccactacacaacgtatccatgtaaaaaaattacacttgtggcctggcgctgtggctcatgcctgtaatcctagcactttgggaggccaatgtacattattcagatgatggatacagtaaaatgcctgacttcaccactacacaatgtatctgtgtaacaaaattacacttgtggcctggcatggtggctcatgtctgtaatccgagcactttgggagaccaaggcaggtggatcactggaggccaggagtttgagacctgcctggccaacgtggtgaaaccccatcatctctactaaaaatacaaaaattagccaggtgtggtggcacacgcctgtaatcccacctactcaggaggcagaggcaggaaaatcgcttgaacccgggaggcagaggttgcagtgaaccgaaatcacgccactgcactccagcctgggtgacagagtgagactctgtctcaaaaaaaaaatattatatttgtacccaataaatttatatgaaacaattaaatgcttctgagatctggcttaatggttgctcagcctgcattctggttccacatgtaggtctgcttgtgaaaactcattacagtgttcacccctggtctgtgtacccttctgtatttgtgttacactccaatctgaggtttacattacaataggtcaaacctgtgaataaaaccttatattggctccggcactgggcaacgcagtaatcattaaattaatgctgaatgaacagacaactggctgggagtgggacacggtagcaataagatggcctcttaacttttgaggtctcctgaaaaagtgctagtccagaatgattcactttccagatgagcaggagacacccaccccaaggtcacttactgcaggttttacagaccagtttaagaaactgcctaagatcaagtaatttagtaaatggcagagcctggatatgagtccaggtagtcaggctccagaatccagacttttgcccactactttatagtgtttgggggcactactggcgacagacccttttgtctccctctcagatccagacaggcagaggtcctgtcttaaatcactcttgtgggttggacaggtctcctggacacccgggagtgggagagccctgctgcccgaggagactgggggtacatgaggatgagcacctgactctgctcgagaaggagtaagggagggaaggggatgcatggtgggaccttcgctcctgtctgtcccctcagggcaagctggggctgacggaacctcagaccagccagtcacttcttaatgagctcacagctggactggcaggcagacagaatatccgtttggttaactgtataactgtttggttgactacagaactcatggagtgacagggagaaggcgcaacttgaggacgtgacagcgcagtttcctgaacatctaactgaatgacagcctgcctaggactggctggggctggtagcctgacagtggaaaagacaggcagcctcctgaggaccttgcaggctggctgactgatggcccgtggtgctactgcctgcctgggtggccggatgttgtgaatgactattgtcaggaatcacagctggcgggggaatgtctagatgttatactgtctggcaccgtgtaaaggagggccacctggggaaacttcaggctaactgatcaacagacccgtggctgcttgctaggcagctgtatctggtgatcaactatccacgctgctcgaatcacagcatgctggagggcctggctgggtgctctgactgactgatcacctgacagacggtgcggtcagtcggatgctgagaatgactgacgatgtgatgaggggcggattgaacgagtcacaggccagctggccaggagcaaaatcggcatagctgtctgactcgatggctgtacgtggttacggactgtctgccctgatagaatctcagcttcaacgcatcagaggagactgacttgaccaatggtggggatgagtcgcctgagaaatgacagactggctgacccactgacaggtggtgtggaggcttaatcctacctctagttgctgtgactatttgctttgagggcctagctggatgttgtgactgatcgtggtgtgaatgagaagtaatctgagggaaagacagtgaccaactgatagtgcccgacagggctgtattagatgctgacagtgacagcttgtcccgacctaatcacagcccgcctgggggcatggctggatgctgcagtctatgagaggatttagccagggagaatcgcagctggtcccagggctatggtgggtggagaggaggactgattgatctgctgacaacgtgaggacaggatggtcttagggaatgataaggcaggctggctaacagtgctgtctgcctgcctccagggagtcgccgctggccagggcacaaatggaagccagtattgactgcccagcagtgtggatgggggccgggagtctgactaggcacctgtctggggcgaccgcctgagcagttggatacggcactagtccacctgggagccccggcctgcttggggttaaaatgagatgacgggctgactgacggtgataacagggagtatgacaggactgaggaaccactgcgactggctgataacgtgattggctagcagtgtgacagacagaccagcgcacgggcagggcctctggcaactttagctaccgccgctgtcgctcccgctgccgccgccgcccagacgcactctgggaaagcgcggcgagcacccgcctccgggaccgagccgggcggcagggaggggttcggtcacggctctccggttggtccgcgcgggtgctgcgagtcgggagccgcggccaataggctgcgcgttcccggccacgcccgcgcgagcgctcttctcgcgaggccggctaggcccgaatgtcgttagccgtggggaaagatggcggaaaatttaaaaggtgaagcagtggaggcagaggcgcgggcccgctggccgggccgggtgggctggaggggtggcgttgccggctcggggccccggcgtccgaggccccggcgccgggagccggaagctcggcgcggaaaggatgaggctcggggagcgcgggcctggtgcgcggggctgggcggggctcaggggagggggcgcgcgcctcggaacgcagcgggcctggggctaagtggggacgcaggaggggggcgcgcgctgcagatcgcggccggaccggcgcgcgcacgcgcgggggcttgtcgaggaggccgcgcccgcgcgcgggaaaatcggcccctggtgaccgttacccattcggtgtccacgcgagacgccggaaggggagggaagataagggggacagacccccccttcagagtgcggggactgagaactcttctgggggaaagtatcgcctctcggcgtgatgggggaagggtttggaatagaggatctcccagaagagagaaatggggccttcctaataggacagctggactcccccatgtgcagggaaagaggggtgactcagttatgttggggggcccctctatgtgacgaaagccgcagggaggatgggttccacaagtgggaggacctctgaggggttcaggagagtccacctgtggccagttccggagccagcagctggagggtgttaattgggaccacttaagtggggtttcaaatgcaagtgaaggaaggggtttgcgaggacaggctgtagggagaggaaagcgtgggcacaggcgggctcagtctccacttggtcttgcctaagtagggggggtagggcttgcacacgaaataattttgaaaagctcttgtacgtttttaggttgacatctaaagtttaggtgtgatttttgcaatgggaggcagaaaatattaaacattttaaaaagatgatataggatgaggactgactgcccttggaatgttttgagacatgatttgataaaatggcttctaaagtactttgattaagaatgtgccttgaatcagaaagaaatctgttttttaaaatccgtgtgtcttacaaaattttggcagtcccagaaatataccaggtatatttaaaagaatcagtgtcactaatctgtaccgctttgcgtataaattcagagcataaccctttggatgagctttactcttcacagaaagatggatgagacagaaagtcaaaatgcagtgtgaaaaaatataccttgtggatttaaggcacccagattgatcatttaaggagccttcctgtaatgtagtatcattccacaatctcttgctcataattccgaaatctaaaaagccctgaaaactgaaatccttttcttaaatttggcaccatttatggcaaaagtagattataaagtggaactcttctgtgaggctattttatatctctatttctcctatttaatgtgggaaattcatacttttgctgcaggacggttaatgcatttgattatagcttgatgtcccctggccacgctgggggtgttaggtgatgtatgggatatcctagaactagtcttgtaaaatccaaaaaattttgaattccaaaacacatctggcccaggagtttgagataagggattaaagaccagtctttccagttacgcctttgtttggtgccctggaggttttaatcttgtcctcccatccgccccacctcggggcactgcatcctactgagatggggggttgttctctttcttttgcaaagtggagagaggggtgatcaggtcctgaacccaaagcaggtttgcaggcagttttaggaatgacatggagtttgaagctctggaaatagattcctttaggacaattcatgttgcaaaccccgcttagaggtctgctgctccaggggcagctttgggcagtgagtattggggttcaaagcacatttctgttgtagaacagtctcagcactggggaaggcctgtggattaaatttccctgactcttagtcagtctttgggatgtcccagggaggatttggggtcccctttgactcctggcctagtcaggctgcccagtaatagttctttctgccccgcttgatccaggctgcagcgtgtgttgcaagtcttcttggaatcagctgcaggacctgtgccgcctggccaagctctcctgccctgccctcggtatctctaagaggaacctctatgactttgaagtcgagtacctgtgcgattacaagaagatccgcgtgagtctggggtgaccatgctctgggaggggacaggtcacaaggaagttagtgtcctgccctcttgtccccaactgcccacatctgtttccaaagggaattttctcctttgaccctgaaaacacaggatgaatagacccttttatccctatgttacagatagggaaactaagtagctttctgggcaggagccggaatgaattcccaaataaatctcttcccatctccctaggaatacaaagtaattgcagagattgagatgctgaaccctggagtggaaatgtcaatagctaatggctattgagcactttcagtgtgccaggcgtttcctctcggaaactcatttaatcccctaacaactgaaatggggatagttattgccagaagggggagtggcaggatggttaggagaacaaactggagtcagcatgcttgggttccagtcctggttgtgttaccccaggctacctacccaaaccttcagtacttcattttccttgtcgtaaaagagggataactaggagcatctacctcatgtggggttgtgaggattaagttagttaataatacatgtaagctgcctagaacaggcaaggacttgtcagggtccaggtgagccagggtggtggcagtgatgatggtttgtcactggacgtattttgaaggtggggccaacgggatgtgcagagggtgggtgtcggaagtgtgaacaaaagagaagtcaaggatgactccaggagttccggtctgaacagctagaagggagggagctgatgatggggaagaccaaggagaggagtgggtttgggagattaattaaaagttggaacagtttggacagacagtaagggggagaggaggatttgaacctagtaatcctcactctagagcccatgctttttaatcaccgcatgaagtcattccagaaaaggggtggggtggggtaggtgttatccatcagctttgggatggaagccccatgaaggctggcccaaagatctcactacttacggtacccccgtccccctacccacccccaacaggaacaggaatattacctggtgaaatggcgtggatatccagactcagagagcacctgggagccacggcagaatctcaagtgtgtgcgtatcctcaagcagttccacaaggacttagaaagggagctgctccggcggcaccaccggtcaaagaccccccggcacctggacccaagcttggccaactacctggtgcagaaggccaagcagaggcgggcgctccgtcgctgggagcaggagctcaatgccaagcgcagccatctgggacgcatcactgtagagaatgaggtggacctggacggccctccgcgggccttcgtgtacatcaatgagtaccgtgttggtgagggcatcaccctcaaccaggtggctgtgggctgcgagtgccaggactgtctgtgggcacccactggaggctgctgcccgggggcgtcactgcacaagtttgcctacaatgaccagggccaggtgcggcttcgagccgggctgcccatctacgagtgcaactcccgctgccgctgcggctatgactgcccaaatcgtgtggtacagaagggtatccgatatgacctctgcatcttccgcacggatgatgggcgtggctggggcgtccgcaccctggagaagattcgcaagaacagcttcgtcatggagtacgtgggagaggtagggagatgggacccggtgtgtgtgtgcagctcttcccaccctgtgttcacagtgtgcacccggctctcctcactgtgtgtctgaaactccctgctttccctatgggaaaggcctgggagactgatctgagtgtcacagggacattgggcaggggctagtattccaagctggtacacaccagcatggccatgctggtggttacaggaacaccaaaatacttctgcactgggttgactttatcagggtacttagcaaagaagaaaagtgggagctgagatccaggcagccttagcattccttgtaacaggccatgtggtctggcatagggctgcatcagctggaaaggcacttcctcttctcatttcacaagggcccatcttatcaccaagcagtatctgcctgaggagcattgttttaccagtctgcacagaaggaacgcagtctggagtaggatgagacatgccttggacaaaggttggctaactcctttagactttcaggacactggggaaggccgagtgtattaggcaagccagccattgtaaaaacaaccccctcatcttagtgactttgcacattacaagtttgcttgctcatggaacagtccattgtgggggtttgagtgggtatcctttcacacagcaactgggacacctaggctctttccctcctgtgcctttgctgtgccttgaagccttggagtcactaccagatcctcagcattgcctggcaggcgggccaagtgggggatagaaggggcccatcctagtgggccaggcctagatgcagcacccatcacttctgcccatgctccactggctggaactgagtcactggccttacctccatgcaagagaggcaacaggatgtgctttagccatgtgcccagctgcacaaggctaaagcacagccataactagcaactagataactagcaagtatctacaacagaaaaatgtcgcattctaagatgggatgcagttagcatttgggatgagatgatttttcgttatgtagaactgtctcatgcattgggggacatttagcatccctggaccttgaccatttaaatccatgagtgtgccctgtcatagtgacaaccccagatacctctatatatagccataggtcccttaggggtgtgatatagttggaaagtgacagaaactggcctgaggaacactcacatgagggtgtccacactgtagcactgatactgatgacaaggagaggctcctactctgagaaactgtacagagggtcacatctgacagggacagagacaatcttgggtagaacaatctacaccacagaggaccctgacagtctgggcaaggagacagccacaccctgtccagataaccctgctggcctgctggaggagatgtctacatgccacaggacctggccatctggaaggaggaggtggggaggtgtccacaccctgagggctcctgacagtgggcgggggaaggagtcctgataatctgcaggaagtccatgtcccacagtgaccccagtgacctggaggaagagcttgtgctctccacactctagaggacctggtggtctgacttaggaagtgttcacacccatgttgtcatgacaggaaaaagaagtgtcctcaccccagagggatccggacagcctggagatctagtctacacccaagggcaccctgacagtatcgggggaagtgtccatgccctcaatgtcctgacgctctggaggaagtgtccagaggttgaaggaacccaaactctctggaggagatgtccagaccccataggacccagacagtccaccgtcctaggggctgcacagagcaggaagtatctcagcctcactgtactggcatctggaggaaacactgtctaccacacagggtcctgacagtcgaggaggaagactacaccccaagggcagcctcagaccctcctgggcctgagacttttctggctgctcttccttagtgtcagtgtctttaatcctcccagggatcctctcagccctgtcctcacccttcctgctctccacacattcttgctgcactatttcctgaccgccctccagcaccctcagacccatgggtcctcctgatggtgccacaggcctccggaaagagccaaactcatcttcccgcattcccctctgaagagacagtatagcaaatggttaggagggtggactctggatcctgactgcccgaggctgaatcccagctccactactcatcagcaatcactaacctctgtgcctgcatttactatgtaaaatgggaacaataatagcactcacctcacaggcttgttacaaaaattaaatgagttactatgtatcaagcacttggaaaaagcacttgaacagtgttcagtacacagtaagtttgatacaaatgttatcagcatagttcaaacttcagcaaatccaaaatgtctggaagaccaagtttttttgtaacccatctggctacaggacccagcctgaccggatagggtcctatttgtagtttttatttatcctacttggggtaatagtcatacatttcgttgcagcagttctaatttacttgattctgtagtgccgtcccagatgctgccagggtgttacggaatcaagggcctatctgcacaccatgctatctactgtccttcttcagctgggacatgtactgacagtctgtaccaagagctccctccacgggagctgcccttccctcctttgcagcctcccacattgggtcagaactttcacgttcctgcagaacattcccatcctcacccaagagacaatgccagcctattttatccattctaaaacatgcattttcttcctattttaacatctcggaaatgaagatgtcttaattaaatcatggtgtatcatttataattaacagcagtttttcctttcttggtaaagggcacataaaattaagggtgtgccttacatttataactggtcctcataaccactcctaacattgctcactctcctatcagaaacaggaacacctttcacgtccatgatcttgtatggatctttacaacagcccctgtcaggttgggattttgtcactgtcattcccattctgcagatgagaaaactgaggcccagagaggtagaataacttgattaaaatcacaaaagtagtacaatggataaaaaaataaaggcccaaataatatctaaaactggtaccctgccaggctgtagctttttttttttttttttagctgaggaaacaggcacagagagaacattcaggatcccatatccaggagggggcagagcagcagctgactccaagtcttctagttcccattcacgtcagcaccctctcggaactgccagcttacagcctgtcttttccattcattctggagagctgttagggagcagagacaggcccatctgttcccaagctttcagggttgaccaatcattagagaatgggactgaaaagaagatgagaaggaaccaagaagtgtttgtgccctggagggcctgcagtatgactcactcctggtgagactgggagagcaggtagtggcagaataggcatgaagatggagactaggaaggatgtgggcactcctcctggctcaaggagggcctacggtgaaaaagatggctcataccccacccactaggcctgtgagcctgggagaggctgccctttgatcccaggacttgatcagacaagtggccagcttctgaggtaggggaggaacgggaagcttggaaggctgcctagagaggtcccatctgtttgagctgatgccacaaggaagactgttctccaggaggtgaagggagactgatcttgacatattccaccctcatgttgtggcccttaggagagagtccccactcttccaccaggtggtaaagcccttttatgatctgcaactcgttttagagaatccgtctcttctccattccccctcaagccctaagcactgtttcctgatcacagtcttacactgtgggtgtgtgaatctgtctctctgtgaccagactttgaccccttgagggcagggaccaatcctggttcctgtgtatcccctacccacctgtgacccctgagagtggaccgggcctggtccctgtgtctccctgatcagaccgtgagccctgcatgctgggactgggcacaaggaaggcctcaataaaaaccctggcaagggagccaggttcctcaaggaacagaactggagcacggggcagtgggtagtgtggcccgaggcagggtaaatcttggtttcctcaaggcattgttagtcagcctttggcatggaacacagccttgaggggacagccagggagaacaccagtgtggccatcctagctaaggagatggattcccaagtcagaagggcatggtcaccggcccacatgagggtgagcaaggaaggaagcccgagaggggtctctggagaagggaggggaaggaagaagtgtggcgggggagtactggagctacctggagggccgccacttggacagaggacaggctgctaagccaggaagcagaatcaaagtaaacagcagtccccatgtgtctcctgtgtgctgtgcactgttcttggctgaggtacagtgggacccctacccagggaagggcctggtcagctacgcttggggattggcaggaggctgccgttgctggcctcagggaagaggggccatggggccggagatttgttggcgtggattgggaggcaaggacaggctggggctaggatggcagcaaagcttcccatttcctaggacaggtagggaaccagctggggaggaggcacccactgccgtctgaagcaccagttggcactgcgcagccctgggccgagggagagcttctctcactgtgctctcccttcatctttcctcctcctctgctgctgtctctgaagtgtgtggcctcagcctctttctggctctctgaacctgggcctccctctgcctctgcctccacctctcttgtcttgaggcccttgccccctttccccatggcctgggtctcttcttcccctctctccacgccctccctgctgggtcctgcatgggctcaggctcccttgcctggatcagtaagtatctctccctgtggcaccctgggtcactttctttcttgcccttgctttggtctctcctgatcaccttcctgctccgtcccaaggcactggaggctccaggggttcttgggcagctcttgctgggtggcggcaggaggtgctcgcgtggccccagttgggccctgcagccaggccagcctgcactcaccgccagggactcctcctgctagccagaggcctgaggcgggccaggcagttgccagctgaggcccagctcctcaggaagggccgacagactctctgcgtcactgcccatgtgtgtccacgggcaggggtgcctcctgctccctgtccttcagaagtcaggagcagtgccggctttcctgagacttcgcggccaatctccccttacccatggccctttccctagatcattacctcagaggaggcagagcggcggggccagatctacgaccgtcagggcgccacctacctctttgacctggactacgtggaggacgtgtacaccgtggatgccgcctactatggcaacatctcccactttgtcaaccacagtgtgggtacccccggcaggcgggcaaggggtcgagaggggcaggctggagcccctcctcactctcccaactgttctttctcgcccagtgtgaccccaacctgcaggtgtacaacgtcttcatagacaaccttgacgagcggctgccccgcatcgctttctttgccacaagaaccatccgggcaggcgaggagctcacctttgattacaacatgcaaggtgggggtggcaagggactgggggcaggggcgcactgtgacttgggacacaaggacccctcccaaaggcacaccagtcactcagagaaccaaggaaaattctttagcgggagctttaagatgctcttcctgactcccagtcccccattcggactactagacccctgcctacccctcgagtcccctcattcccagcccctgaaccctaaccctgaggcattcataccaacttctcccaagattcctggagagttaagaaactcctgactccagtcttgactgagtttccctcatcccccagcccctccccactcctagctccctttggccttcttcatcccaagcctctggacacccttgtggcctccagccagtcccctccttgataagctagccacctctgagaccctcaagggcaggtctttggcaggagagttcagatgtacctctggatgcccaggtggccctctattcctgcccctgcccccccccacacacctaaaacgaccctcctggttccttgacggctccctgcctcccccagcattcttcaacccctggcctgaacaacctccagtgctgagccctggccctagccccaaaccaccaaccctaagatctcccaactcaaatcccagagttgctcccagccccaaagatccttggtctcatggtataaagggtagtgggacccttcatccaggccttctaacaagtcccctgcctccttccctaccttcctccctccctccttctccccctccctccctgcctccttccctcctctcctccctggctgtgactccacagtggaccccgtggacatggagagcacccgcatggactccaactttggcctggctgggctccctggctcccctaagaagcgggtccgtattgaatgcaagtgtgggactgagtcctgccgcaaatacctcttctagcccttagaagtctgaggccagactgactgagggggcctgaagctacatgcacctcccccactgctgccctcctgtcgagaatgactgccagggcctcgcctgcctccacctgcccccacctgctcctacctgctctacgttcagggctgtggccgtggtgaggaccgactccaggagtcccctttccctgtcccagccccatctgtgggttgcacttacaaacccccacccaccttcagaaatagtttttcaacatcaagactctctgtcgttgggattcatggcctattaaggaggtccaaggggtgagtcccaacccagccccagaatatatttgtttttgcacctgcttctgcctggagattgaggggtctgctgcaggcctcctccctgctgccccaaaggtatggggaagcaaccccagagcaggcagacatcagaggccagagtgcctagcccgacatgaagctggttccccaaccacagaaactttgtactagtgaaagaaagggggtccctgggctacgggctgaggctggtttctgctcgtgcttacagtgctgggtagtgttggccctaagagctgtagggtctcttcttcagggctgcatatctgagaagtggatgcccacatgccactggaagggaagtgggtgtccatgggccactgagcagtgagaggaaggcagtgcagagctggccagccctggaggtaggctgggaccaagctctgccttcacagtgcagtgaaggtacctagggctcttgggagctctgcggttgctaggggccctgacctggggtgtcatgaccgctgacaccactcagagctggaaccaagatctagatagtccgtagatagcacttaggacaagaatgtgcattgatggggtggtgatgaggtgccaggcactgggtagagcacctggtccacgtggattgtctcagggaagccttgaaaaccacggaggtggatgccaggaaagggcccatgtggcagaaggcaaagtacaggccaagaattgggggtgggggagatggcttccccactatgggatgacgaggcgagagggaagcccttgctgcctgccattcccagaccccagccctttgtgctcaccctggttccactggtctcaaaagtcacctgcctacaaatgtacaaaaggcgaaggttctgatggctgccttgctccttgctcccccaccccctgtgaggacttctctaggaagtccttcctgactacctgtgcccagagtgcccctacatgagactgtatgccctgctatcagatgccagatctatgtgtctgtctgtgtgtccatcccgccgaccccccagactaacctccaggcatggactgaatctggttctcctcttgtacacccctcaaccctatgcagcctggagtgggcatcaataaaatgaactgtcgactgaacaaaccaagatgtgaggtgcttgtgtgggtgggggttgaggggatagaggctgggagctgggtttgcccaggaacatgttcctcaaacctcagccatttgactctaatcctcacaatttcagcccccacagcatatcacttacaccatcatctatataacatcttgacctaaaataagtttgttttatacttaaactttaaaatgcacttaaggctgggtgtggtggctcacatctttaatcccagcactttgggaggccgaggcaggcagatcgcttgagctcaggaattcgagaccagcatgggcaacatggtgaaaccacgtctctgctaaaaatacaaaaattggccaggtgtgggggcatgtgcctgtacctgtagtcccagctactcaggagcctgaggtgggaagattgcttgagcctgggaggtggaggttgcagtgagctgagatctcaccactgcactccagcctgtctgtctccagaaaagagccaaaccctgtctcaaaacaatgcaattaaattgactggtttagactggccgtaactggttttgactggacttgaccgatcttgacctgtgttggccgactttgacttgtcatgactggctgtgactggtggtagctagccgtgactggcctcgactcgttttgaccaatcaggactggcttggactgggattgaccagttttgactgcttaaactggctgtgatcagcctggactggcttggattggcctggactagcagggactgaaatggattggttttgaccagctttgaccagccttgactggtcttggcctgctgtgactaacctggaccagctgtgactggctgtgaccataattgattagtttggactggccatgactggctttgacccatcctgaccagccatgaccagtggtttctggccttgaccagccatgatctctggtaactggccttgactggccgtgatcagctttgaccaacttagactagccataaccagctttgaccagtcttgactggccatgattggtggtgaccagccatgactggtaatgtctggctgagaccctgccacctcctgcctgaccaagtgcccaggcctcagggactatacagcactgggggggtgggggggagggtagaaggagtggagcaaagtggggagggagaaaaccaaatccactgctgtctaaatggaaaaaccataatcacttgccataagcaaacaaaaataaccagaggaatacatcaatggaaaggttaaaatgtgataatattctagctggaccttccctgctcttaaaggctttgaacccaaaatctgcctccagcattcaaaatgaaaagtttgtgtgtgctggggaaactttttctgcaaatatttattgagcacctatatggtgccagggtataaagtggagaatgaagaccacatttcagatatacttactcattttcatcatctctcaatctgaaagggagccagtgctctttgtttttgctcagggacctcacgtgccgtgacagatacccaaatatttcaaagacctcatacagaggtggcaggatcccaaaaagcccagagacctcatacacagggtaaccaggacatacacagggcatctagggtataaggccttatagaccatataccctgaatattgaccccaaacttctcagaaacctcataccctgggatacacacctacatatatctcagagctctcataattggacacaccgcaagtaacacaggcttcactgaaaactatgggctacagacccttaaacagctcttagacctcacatactgcctcatatactgggattcagaccttaaacacatcagagacctttcctttgatgacagagatgcacaaccatctcaaagaccttacaacttgagatgtcactacccaaactatttggaggctccacaccctgatcattgacttccaaaccgctcagagacttagtatcctgggacagacccccaaacaactgagctggcacaccctggacacagactgcccaaacacccgagatacctcgccctttgaaaacagatccttaaatggttctgaaaactcataccttgtatagggacccacagattgctcagagacaccctagaaaacagacaagtaaacatcccagagaccttacacgtgaatatagtgccacaaacaacttagactcaagtctttgaagcagaccccaagagcttagagatctcacagcctggaaacagaccctgctcacaggactcatacctgggaaacaaatctgtttacagctcaaacatgacctcacgccttctgacacagacccctcaacagttcaaagccaaggcagcctagtaatcaatatatttctattctattgataacagacaataccaaacacttcagagacctcacactttgtaaccccacacccaaagagctcagagacgtggaaatctgattacagacctccgggaaactcagagacttcacaatcagggataaagatccaccaatttctcagagaactcacaaactgggacaaaaatggaccaacagttcagagacctcacaacctcttctcagaccaccagacagcccagagacctcgcaccacggacacaatgctagagagccctaaaatcacttatgctggaacacaggcccgaaaactactcagaggctcacaccctggacacagattcctgttcagagatgtcatatactggacatagagttccccaaaatagctcacagcctttatacaccgagacagatccccaaacagctcagaggccccacagacctgaaagtgtggacataaaccctctatagagcttaaagacttcacaccctatgacaaaaaccctgaggaactgagatcacaccccctggacacggaccccaaacagcttagaaacctcatatcctaggctcagacccccaaacagttcggagtcttcccactctaaacgcagacctctaaatgcttaaggaatatcacatcctggactcagtcctcaaaaccattcatggaacttgccctttgtccttatccggaaagatttcagatggctgatagtcatggacacagatcaccaaacagctttgaaacctttgtgcaaagttggccacaaacagtagagacacttcataactggaacacagacccaaaacggcttaggacctcacattgtggacacaggctcccaaatgactcagagaacttctaacctgggagacagacatgaaaacagttcagagatatcacatcctggctaagtatgcccgcacagctcaagcacctcatattatgggacacaaaccctcaaagagttaacctcacaacctgaaaagtaaacccacaaacatgccaaagacctcacacagcagacagacaatgcaaaaatgctcagagttgacaaactttacaccctaggatacagaccccttaacagccgagtgacccagtgacatacaacccgggcatagacccccaaatactagagagacgtcagaaactgataacagaaccccaaactgctcagagaccccaaaccctagaaccagacccctaataagtcacagacctcataccctgggactgagactccctcaacaggaactgtctcactcttggaaacataacagttgagggacctcaacaccaaggaatacagagatcagagatctgacactttgggacacagagggtgaagcactccagaggcttgaaacagtaaaaagacattattagtacaaagacatcagactctggaaacagatcctgaaactgctcaggaaaatcaaccctaggacaaaacccacggcatcacagataactcatttgttgggacattggctcaaaacagtttggcggtgatactcaaatacatcagagttctcatacaagggtacaaacacctcacacctgaaaagagagactgctaaatagttcagagacatcatactctgcacaggaaccaccagagagttaagaaatttcacacctatagaccttcaaacaactcagaaaactcactcactggcgcacacacacccattacaagctcagagaccttaaccctggaacaaacccctaatgagtcagatatatcaaaccccgggactgagccctctgaaaaggaacagagacttcacgcctgaaaatatatcccaaacaggtcaagggactttgaaaccaaaagagctcagggaccacgtatcctaggacaccagtggacaaacagctcagagacctcacaaggtaaacacagtccgcaaaacagcccagtgaactcacccccctggaatgtagaccagaaaaagcgcagaaccctcgcattcaggattcagaatccttctgagacttagggtatagaccccaaaatatatttcagagaattaatatgctggatgcagagtatcaactaattcagaggcctcaaattgtgggacgtacacacccaaagagatcagagaactcacatcctggacatacaccaacaaacagaccagggacctcaaccctgtgacatgtgcgcgcgcgcgcgcacacacacacacacacacacacacacagctcagaaaatccaaattctaggaaacacacacccaaaaagaacggggacctcacatcctgtgacatactcacagaaagatcaaaaaccacacaagctgagatatacacccacaaatatttcagagaactaacatctggggccttatacccacaaacagatcacagaactcagtccctgagacatatacacataaaaataccagacacttcacatgccaggacatatacccatgaatagatcagagcactcacaccttgggaaataaaccaaagactacatcagggacctcacatattacttgaggcacacactcacaaagagaccagagactcaattcctgggacataaacccaaacacctcagagatctcgcatgctgggacaaagaaagaaagacaggtcagaacctcacaacctgggacacagagccacaaacagatcagagattacacactgttgacaaacatacaggaacagatcagaaccctcacatcctgagacatacaaccacaaggagatcagagagctcacatcttgacatacacccataaccaaactagacttgacattctggtacgctgaccctcaaagagatcagagaattcatacccttggacttacacccacaaataagtaatagaccttgcaggctagaaatacacatagagctagatggacggcctgtcatcctggaacataaacccaaaaagaggccagagaatttacgtcttgggacacacacccacagtcacaatagagacttcacatcctaaaatataaacccacaaaggatcagagatcataaaccaagggatatacacccacaaagggaacagatactgtccactgtgggatatacattgagaaagaccagagaaatgcacatcctaggaaatacactaaaaaatcctgggaaataaatccacagacagtaatgaaacactgggatatacaaacccacaaacagatcagagaccacacaccctgggacacatatccacagacagtatgagatttcacgtcctggaacaaacagcaagaaacaaatcagagacattaaacacttggcaatacatgtgaagagatcagagataacatagcctgggacactgacaaaatgttcacagacctcgcatgctaggaaatttgcccagaaaaagatcagaaacctcacatcctatgacacacaacctcaaatagatcacagacataaaatcctgcaaaacacacccacaaaccattcacaaatcttgcatcctggaacatacaatgacaaacaaatcagagacctcacatctaggggaggtcacacccataaagagaatacagataacagaccccgacacacacgcatacccagaaacatacagataactatcttacgaatatagctgcaaacagatcagagggctcacatcatgggatatacactgacaaaaggattagagaccttacaacgtggacatgcacccacacagatcagagacctccactccagcaacgtacatggacaaatggctcagagctctcacatcctggagcatacaaaaacaatcagagacttcaaatcctgcagtatacaaccataatccagtcacacttcatgtgctgaaaaacacacccagaaacagatggtagacatgacatcttacagcataactcccaagagatcagatgattcaacagttttggcttcaaatttctctctgacctctgcttctgtcatcgcatcaccttctgtgactctacttctgttgtcacatggtcctctctgatgtgacacacacagtcttctcagaccctgaaggtcctaccttcctcatataaagactcttgtgatgacagtgggcccacctggattgtccaggataactgcccccatctcaggatgcttacctaatatgtatttgcaaagccccctttccagataagacaacatattaacaagctccaggaatgaggtgaggacatatttggggatctattatctgacgaaacagaacatacatgcacaaagagaaccctcacatcccgggactttcacccatgaactgctcacagatctcacagctggagtcatagacctccaaagggatcggagaactcccactcctggacatcaatccaaaaagatcagagagccacacactctggggcatacgccaaatgatgctcatagtcctcacaccctggggattaaacccacaaagacataagagaaccacactctgccaagtacattctcaaagagaaccggaacctgacacgctgggatatacactagcgaagagatcagggaccccacattctgggacaaacaccctcgaacataccagatctctgactctgagacacagacacaaagaacacaaaaaaacacattcattgacagacacccacagacaggtcaggaacctcacaaactggacataaaaccacaaaaagaatgggactcacaccctctataaacaccctgaggagatgacacactcacatacgatgacacacacgaacaaatggatcagagacctatctgagaacctatctgagaaacacaaccagaaaccataccagagacctctaataccacgacatgaaacaccaggtcacaggcctcatatgcagaaaatactcctgaagaagtacagagacctgctgtctttggtatagacccaagaggagatcacaggtctcccacagagtgctccaaaaccacattgtggatacatgtaccacaacaaaacctgacttctactataaataccagcacacaaaccagaaactttatatgcatatcataagtacccacaaatattggcaaaacagctcagaaaattcatgccagggatatatacccacaaacagatcaaagacctcatatcctaggctaagcattcagaatcagatcagagaactcacttcctgagagaaccctctcaaagaggtgagaggctgggcgcggtagctcacgcctataatcccagcactttgggaggccaaggtgggcggatcacctgaggtcaggagttcgagaccagcctggtcaacatggcaaaacctcatctctactaaaaatacaaaaattatccaggcatagtagcacgggcctgtggtcccagctacttgggaggctgaggcaggagaattgcttgaacctgggcggcagcagttgcagtgagccaagatcgcaccactgcactccagcctgggcaacagagtgagactccatctcaaaaacaaacaaaaaaaaagaggtgagagacctcactctctgcttcattcaccagcagacataccagaggcttcacaccatgacacagagacagacaaatcagggagtctcacatcttgggacataaacccagaaacagggcaagaatttcaagcaaaaggaaatatactcacacagagcttggaatccttacaccctagacatacgcacctcaacagatcagagaactcacacactggcacatgtacacaaaatcagattggagatgtcccatcctagaacatacgctcctccacaaaagctgagagcacaaattctgggacacacaccaccaaataggtcatcagatcagagaccctgcacagaaatcagtgacctccactatcagacacacaccctcacaaatagatcatgaagttcacatcctgacaaccagatagagacagcacaacctgacacactattgattttctattgctgctgaaacaaatcactaaaagctttttgtcataaaacaatgcaaatttattatctcactcagctgggggtggctcatacctgtaatcccagccttttgggaggctgaggtaggtggatcccttgagccgaggagtttgagaccagcctggccaacatggcaaaacctcgtctctactaaaaatacaaaaataagccgggagtggtggcgggcgcctgtagtcccagctactcgggaggctgaggtacgaaaatcgcttgagcctgggaggcagaggttgcagtgagccaagatggcaccactgcactccaacctaggtgacagagtgagactctgtctcaaaaaaataaaaataaaaaaaaacttatgatcttacatttctgacaaagagtcttacagggtaaaagtcaaggtgttggcagagctgacttctttctggagttccttggggagaatccaatttcttttttctttttcttctttctttcttttttttgagacagagtcttgctctgtcgccaggctggagtgcagtggcgcgatcttggctcactgcaacctccgactccctgattcaagcgattctactgcctcagcctcccgagtagctgggattacaggcacgcgccaccacacccagctaatttttgtatttttagtagagacaggttttcaccatgtcggccaggatggtcttgatctcctgacctcgtgatccacccaccttggcctcctaaagtactgggattacaggcgtgggccaccacgcctggccaaagaatccagtctctgtaggctgcctacatttctgagctcatggcctcttcctccatcttcaaagccagaggtctgtttcaccttcaaatctttctctctctctctgtctctctccccacccccctttcttcctcctcccccatctgtctctccttgtatccatctatctctagctctctttgatctctgtatatgttgtccatcatcttttctgtacttccatcactacatagccctctctgactcttgccttcacgcctccctcatataaggacacctgtgattacattgggcctgcccagttaatctaggataagcatccccatctcaggatgcttaacttccacaaagtcacctctgcaaagtccctcacaatcacctctgcaaagtccccctttccatgtaaattagcataattgtaggtttcagggattaggaagtgcacatctttggggtaccattagctaccagagacctacatacacacacaaacaattcacagactttacatcctgagtcatacacttccaaatagataagacacctccactctctaacagacatccaaaaagagcagagacacattctgggacatataccaaaaaatactcagagtcttcaatcacttggaattaaactcacaaacacataagagaactcaccatctgggacatacacactcaaagaaaacatggacctgacatgataggatatatacccacgaagatatcaggggccccacatgctgcaaaatgcacccccaacagatcaaatctccaaacctgggacatacacacacacacacacacacacacacacacacacacacacacactgcagaaagaaacattctcagacataaacccactaccaggttaggtatcttacaatccgggacatgttgaattagacctcacatccttgacaaatacacacaaaagagacactcacatactgtgacattcactagcaaacagatcacagacctcatgtaagaaacacaaccaaaaagagatcagagaccttgaatcctgcaacatgaaactacaaacagcctagagaccttacctgcaggatatatatgcagaataggtatacagacctgacatcttgagacataaagccacaaacagatcagagacctcacaacctgagctagatacccataaacaaatcagaggtctcaatcctgcaatacagacccataatcaagccatagacctcacatgctagggaaaagagccagaaatagatcacagacctgaaatcttgcaacatacacccataaagagatcagagagcttatattctgagacatactcccaaataggtcagaggttttcaaaccaagggaaataacccacaaatagctcaataacttcacagcttggacacatacacacctcaacaaatcaggtatatatattatacacacacacacacacacaatatatatatatgttatatctactatcagccctcggattcaaccaagtctggatcaaaaacactgaggaaaaaaataatttaaaaacatagtaaaaataatacaaataaaaacaatgtagtataacaactacttacgtagcattgtatcaggtattataagaaatcttgagattatctaaagtatacagaagaatttacataggttacatgcaaataccataccattttatataagggacttgagtgttcacggattttagtatccacaggggtcctggaaccaattcctccaacccacagatactgagggacagctatattgttacatatatatatgaatatatatgtcagcatataaatcacatatgcttggaaatataactaaaaaaaaacttcagaggtctgataacctagaacattagaacatgtatgccccaacagctcagagaactcacatcctgggatgtacatccataaagagctcaaagatcaaacatctcatagggcatgcttttacaaatagatcagaaaattcagatcctatgttaaaaccctcaacaaaggtcaaagacttcacacagtggttcattcaccagtgaacacatcagacatttcacaccatcagacaccacccacaaacagatcagggaattaacatcctgagacatataccaacagatcagagacataacaacctggacatgtatccacgaacatcagaggcttcaggccacgggacctgaaaccacaaagggttcacaaactttcttccctggacacacatactcaactagatcagagatcactcatcctgggacatgaatccagaaatagaccagagaattcatattctgggacacataccctcaaagaggttaaagaccttccaccctggttcattctcctgcaaacagatcacagaattcacatcagatacacccctacgtgtatatcagggagttcacatcctggcacatatactgacaaatagataacagacctcacaacatggacacgtaaccacaaacagatcagagaccccaaataccaaaaatagcgcagagccctcagattatgtgccattcagcatcaaacaggtcagggagctgaaatcctgggatatgcacccacaaacagagtagaggccttacaacctgtacatgaacccacaaagagaccacagacatcaaactctgcaacacaatccacaaacagatcagaaacctcaggccctgagtcatatataacaaactgatcagaaagttcacatcctgggatatactccacaagcaatgcacagaccatacactcctgagacacacacccacaaacagagatctcaaatccttcaatgtacaactccaatgaagtcagagacctcacaggttaggaaaacaccagaaatagacccgacatctcataacacagaaccacgagcagatcagagagctcatggactgggacatttctttaccagtaagcagatcagtggcctcaatcctgagacatacatccacaaagagctcagaaacctcacaccctagacaaataaacctaaacagaccagacacctaacaacctaacatcctggtacatatgtaaccaaacaaatcagaaacctcatgtcacaggaaataccccccaaacagatgacagacgtaacaacctggaacataatccttaaatatctcaaagacttcacctactggaatgtactcccaaaaatcagctcaaagatgtcacatcctagtacatgcacacacaaacagctcagagaccacggattctgggacacacaccctcaacattcagagacctctcaatgtggttcatacaactgcacacagatcagagacttccaccatcagacatacactcacaaacagatcatggagttcacatcctgggatgtgtaccaataaacagagatcaatgtgtaacaaatcgtaatcataatgtcataaaacaacacacatttattatcttacttttctgcaggtcagaagaaaaaaatgggtttcaaagggctaaaatcacagtgtcagcagagctgcattactcctggaggctctaggggagaatctgtgcccttgccttttccagtttctagagctgcttgcgttccttggcttgtggccccttcctccaccttcaaagctaggagcatttcatcttcaaatctctatctctctgatatctgcttctggcatcacatctgcttctctgactcggactgtccagcctctctcctctaaggacccttgtgattacactgggctcacctgggaaatccagaaccgtccccgcatctcaagatgattacttaatcacatttgcaaggaccctttaacatgtaaggtcacagtcacacattccagggatataaggatgggaaccttcactccaccaacctaagatatacatctacaagcaatgaaaaacatcatttgctgaggtatccacacataagcaactcaaagactccacctcctatgttatataattccaaagggatcagagacctcctcccacctttggacatgcatccaagaaagaagtgaagcacatgttctgtgtcatatacccacaaagagggtggggacttcacacactgggacatataatcacaaacagaagatacttcacacccttgacaaacacacatgaggagattagaaacttaaatactgcaatataaaggcaaaagcagaatggaggcctcatctgagaaatacacccacaaggagatgagagaccacaattcctgcaatacattactcacaaacagatcagagacctcacactccaagacatccacaaacagaacagagatctcaacctgtaacatacacccacaatcaaagaagagatctcacattctagaacaaacagccagagactgagtatacacctgacatcttcagaatacacccacagagaattcagagttcatatccttgggatataaacccacaaaaatatcagagacctcaagccatgcataatgtagtcacaatatttattgtgaatggtatattgtgaaatataccataatataatatatattgttactacacaatataatacaatatataatatattatggtatattatatataaatataatatatactatatagttatctgttcatgttaatatgttaacatattatatatactattatgtatatataatatatacttaacatatgcttatatgttaatatattgatatgatataatatcatataataattataatgcacaattataaatattgtgaacatatacattatatattatataggttattatatatattattattacctcagagatctcacttactggaacatacactccaaatcagccaagagacctcacattctaggacattcacccacaaacaggtcagagacctcatatcctgagactacctgcagaaacctcagagaacacaaactgagggatagacaccctcagacaggtcagagacctcctccctggttcatacacccacacacagatgaaagatctgccacataagacacgcactcggcggggcgtggtgcctcacacctgtaatctcagcactttgggaggccgaggcaggtggatcacctgaggtcaggagttcgagaccagcctgatcaacatggtgaaaccctgtcctctactaaaaatacaaaaattagccaggcgtggtggcacatgcctgtaatcccagctactggggaagctgaggcagaagaatcacttgaacccaggaggcggaggttgcagtgagccgatatcgtgccactgcactccaacctgggcgacagagcaagactccatctcaaaaataaataaataagtaaataaataaaagacatgcactcacaaacagattggggattcacatcttgcactaacaaccagacagagacatcatgcacctgggacacagtattcatttcttattgttgtaacaaatcaccacaatcttagtgctgtgaaaaacacaaatttatttattatattacatctgtgtagggcagaaacccaagaatgggccttagggtactaaagtcaggtgtcaacagagctgtcttctttctggagactctaaggaagagcacgtttctttgccttttctgggttctagagctgcctgcagtccttcatcccttccccctttctccatcttcacagcggacagcagttcatcttcaaaatgctctctgatgtctacctctgttgtggcatctcctttttgactccgcttccaccatcacattcccttccatcatttagggctccctggtcatatctctttcactggacatctttgagggatgctttattcagccaaccacagactggtgtgcacaaacaattagagatttcacctcctgggatatactcccatgaacagcgcaaggacttcatgagctgggacccacacccccaacacttgtgtcatcatatcgctgtctctgactcagtctgtgtcattatattcagtgaaaatccaagaaaatctcccgatctcaagatgcttaatttaatcacatctgcaaggtaccttttaaaaaaaatttttttttttgagatggagtctcactctgtcacccaggttggagtgcagtggcaccatctctgctcactgcaacctccacttcccgggttcaagcgattctctctcctgcttcagcctcccgagtggctgggattataggcgtgcaccaccatgcccatctaatttttgtattttttgtagagacagggtttcaccatgttggccaggctggtctcgaactcctgacctcaagtgatccgcccacctcagccttcctaagtgctgggaatacaggcatgagccactgcgcctggcctttcaaaaatgtttttaataaacatttttaaaataatttaatcttaaaaaaattttctggaacacttcacgaatttgcatgtcatccttgcacaggcgccatactaatcttctgtgtatcattctaattttagtatatgtgctgctgaagcaaacacttaaatttttatatatttagatataaatttttatagatttaggtgtacaagtacagttatgttacatggctatcttgtgtagtggtgaagtctgggcttttagtgtacctaccaccggaataatgtactctgtatacaataggcagtatttcatccctcacccctttcccaccctcacatcttttggagtctccggtgtctattattctactctgtatatccatgtgtacccactgtttagttcccacttataagtgagaacatgcagtttttgactttctgtttcagtcattttacttaggataatggcctccagctccatccatgctgtttgcaaggtaccttttagcatgtaaagtcacatcacagtttccaaagattaggacatgggcatcttcgggggccttaagtcaacacaacaaaaacatacatgcacaaacaatgggagacttcacacacttccagaaagctcagagacctgaaatgctgggacacacaccacaaacagctcacttacctcatcctgagttatacatctagaaagtgatcacacacctcctaccttgagacatacatctaaagagcgagcagacacacacgtgttctgggacatacacccacaaacagttctgggatctcacaaattgggacatacacccacaaacagaacagacctcatacccttgataagcaagcaaaagagacttttttttttttttcagacagggtctcactctgttacccaggctggagtgcagtggcatgataaagactcactgcagcctcgaactcccaggctcaggcagatcctctcaccttagcctccccaatagctgggactacagatgcgccaccaagcctggctaattttttattttttgtacagacgggggtctcactatgttgcccaggctggtctcaaactcctgggctcaagtgatccttctacctcagcctcccaaagtgctcggattataggtgtgagccgccatgcccagccgaggtttttttttttaaactcacatactgtaacatacacacacaaatagatcagagacttcatctgagaaatataaccaaaatggatcaggtctaaaatcctgcaacaagaacccacaacatgttagcgatctcacatcctggcaaatacacactcagaataattaaaaatacttgatatcttggggtacacacccacaaagagatgagagagctacgatcctgggacatatacctgcaaacagatcaaaagcctcgaccctgagacatacaccaacaaagagctcagaaacctcataccctggatgtatacactgtaacaaataatacgccttgcaacctgttatgtatatgagcatacaaatcagaaatctcatatgcttgtaaataatgccaaaagcctaagatatctaccaacctgggatgtatatccataaatggctgagaaaactcacacctgggatatatatccacaaatagccctgggacatcacatcctaggatatgtattcggaaacattagggaactcgcattctgaaaaaactccttcaaggatgtctgacttatctcaacccggttcatttaccagaaaacagatcagaatcttcacaccattaggcatacacctacaaaaaaaaaagatcagggatatacatcagcaaacagattagagacctcataacttagacacgtaaccacacagagaccacaggcctcaaacccggcaacatatacccataaagataccagagacggccgggcgtggtggctcacgcctgtaatcccagcactttgggaggccgaggtgggtggatcatttgaggtcaggagttgaagatcagcctggccaacatggtgaaaccccacctctactaaaaatgcaaaaattagccaggcatggtggcgggcacctgtagtcccagctacttgggaggctgaggcaggagaatcactagaatccgggaggtggcggttgcagtgagctgagattgtgccactgcactccagcctgggtgacagatcaagactgtgtctcaaaaaaaaaaaaaaagatatcagagacctcacactcttgagatgtacaccaacaaacagataagggagctcatattatgggatatactccaaaacacatcagagactatatatgaccagggatcctaaattctgcaacatacacttacaagcacatcagaaaccagacatgctatgaaaaaaagtcagaaatagatcatagatctcataacctgtgacatacacccacaaagagatcatagagctcatatccaggaacaggaacccacatgtacccacaaagagatcagaggattcagaccaaaagatatacattcactacgggctctttgaaaccccacacgctggacattcacaactaaacagattatattaggtacatccagaacatatatagaaacatgtgagagtcctcaaagcttggtatgtatatgcataaagaactaaggctgggtgcggtggctcacacctgtaatcccagcattttaaaagggaggctgaggcaggaagattacttgagatcaggcgctcaagaccagcctggtcaacatgcacaaacatgcccgtctctactaacaatacaaaaattggccgggtatggtggtgcatgcttgtaatcccagctacacaggaggctgaggcaggagaatcgcttgaacccagaaggcagaggctgcagtgagtcgagatcgcgccactgcactccagcctgggcgacagagcgagacgccatcttaaataaataaataaataaataaaaattaaattctgcagtatataccacaaacagatcagagacttcacatactgggaaatcaactcagaaatgaatcagtcctctcaaattgtgacataccacccaaaagagacaggagagttcatatccttgggaataaacctgtaaaaaaaaaataggggcctcaaatcacagaacatacactgtcacacagttgagagacctcatgtttggaaacacactgaggaatagatgaaatacctcacacatcctcgaaaagatcagacattacatcatgggacatacacctgcaaacagattgatgatgccaaactgtaggaattaaatccacaaactgatcagagacctaatatgcagggacatataatcacaaatagatcagagaccttacattttttacatgcacccatgaaaaagatctcacataccaggatacacaatgatacaacgatagccacggacctcacacacaacaagaaaaaggtcataagccttatatcctagtaaataaacccccaaccagctcaggaacctctcactgtgggacatactccacaaacagataagagaactcatacctaggttcatacaatcacaatcatatcagagaacttctattcttagcatatacccatgaaagatgcttcacatactgataattacaatgacaaacacatcacagacctaaaatcctgggacatacatgcacaaacacagatcagatcagtgacctcacacactgggacatacatccacaaacatgtcagagatcttctattctagtaaatacatctacaaacatgtcagagacctcaacctcacatcctgggacatacttgcagaaatagcccagatacctaaaatttctgcataaaccatcccttaatttgcatgtaactaaaaggtgggcataaatatgactgcagaacggcctctgagctgctactttgggcatactgcctatgggtagctcttctctgcaaggagcagcacatctgctcctgctatacactgccgcttcaataaaagctgctatttaacaccaccagctcactcttgaattccttcctaggcaaagccaagaaccctcctgagctaagcctcaactttggggcttgcctgtcctgcaaccagatgaaagatctcaaactcagtgtatccatgaacagatcagagaccttacatacagagacatatgtgggcacatggatcagagacttcttacttgggaacatacatccagaaacagaccagagacctcatatcctgagaaatacaccaacaaactgactttgacatacaccaatgaaaatcacatactagtatacagcaacaaatggatcagagacctcacatcctgggaaatataccaccaaacaaatcagacatctcacacctctgcatatataccatcaaagagctcagagacttcacaccatgggacttacacacccaaaaagatcagatacttaaatcctagctcatataaccacaaacatacttgagaactcactctgagcaatccacccccaaacagattagaaacctcatatcctggaacatatagccacaaaaatatcagagacttcatacccttgacacttcacatatacaggaacatatacagggataaacagatctgagaccttacatgcacccactaggagctcagggaactcacatcctgggaaatatacccacaaacattttggagacctcatacccagagatgtacacccacagtcatagcagagacctcatgccctaggacatacaccctcagacagaatagtcctcatattctccaacacacaccaaataaacagattaaagtactgacatccctaaaaaaatacaaccagaaaagctcagaaatataacatctagggaaatatagccacaaaaagctgagactcacaccttggcacatacacccacaaagagatcagagatctaacattccgggacataaaaccaaaaacagatcagagacctcaaacccttgacatgcattcatgaagagagacctcacatcttgtcattgtataatgacaagcagatcagaggcctcataccctgggatgaatactcacaagcacattggaaaccttacaccattggacatatacccacaaacagaacggaaacctcaaatatacttccaaatggatcacagaactcacatcttggaatatatacccacaaaaaaatcagaaatctcttattctgggaaatatagactcaaacagattagagaccccacaactttggacacacacgatcaaagggctcagataccttacaccctggtatatacacccatgaacagagatctcatatactgtgacataaatgtcagggatactcacaaacagtttgggagccttacatcctgagatatatactcataaacagtgcagagtactgattccctctgccctcaaactcagaaatatcaaagtcgggacacaggttctcaaacacattaaagacttcatatccagggactcagtggcccaaacagctgacacctagtgttctggatgcagaatccagtcaccttggtgatgtctcttcctgggacttagaaatccatatacctcaaagaataaacagaaacaatacaccgtcctccaaagagtgcatggatgtgaacctgggacacagactgccaaacaccccagtgacctcatacccagaacagactgccagagagctcagataattcaaattctggacttgatcacgttctgaacatgaacagaaaaaaacagcccagaatccccatgctttgggacatagattcccaaataattcagagatctaaaaacctagagagagaaccccaaaaggtcacttaaaaatgcgaaacatagaatgcccaaaagacccagacatcatggcatggatacagaccacgaaaaagctccaaagtctcgaactccagacagaccatcaaagagctcagaaacacctcttatgagttatctattgccacataaaaaataacccccaaatttaccggcttttggctgcttgagcatcctcgaatgatggctggcttctactagtcagtgatccaagaaaaagtacagcagaagccataagtgccttttaaatttccctctaggtaagtactgctttgctgcatcccacaaatttggtaagttttattttgattttcatttagtccaaactattttttatttctcttgagactactttgagctactggggccctgcatcctcccctaaagtctttctctggagctcataccctgcctctcacataaatgtataaacccgtctcataagcacagttttcagaagaggaacaaagttttttctcactgtgcatccttgcctcatggtgcacaatctattatgcatgttctcaagagaacaactgaagtaaaactgtggatttactagagatgaagacacaattctggggagtgtttactctttcttaaacccaacatacatttacattaaacaacatgtgcacatgattcctaagttccaactgagacagtcccaagcccacactggcccctggcatttatatggattgcttgcttcccttcccccagccctgaattctactttcagaaggggtgtgggattagggggaagggactgaaatcaggagagcgtgtgtggactgtgcattgtcctaccgattcttaccagtcttgtaaaaacctcagcagctcaaggtttagatgatccaaaacgctagactctcctaccatccaaccaggacttgggggttccaggctttgaaagagggtctatcaggctccaaagtccatgtgttctgggttatcatcagtgtgatcaaagcctaaggggagatggactccaacatccatctgagcaacgtccatcctgagagatgggggtccccactcagtggctgatgtcaggagacacagaacaaacatctccctacaacacaatctccacaaacagtgtcaagggaaactgtgccctccagaacagagggcgagataggttctgaaggaagttggtaatttatactttatggtctaggccaagcttgtccaacccaaggcccatgggccacatgcagcccaggacggctttgaatgtggcccaacacaaattcgtaaactttcttaaaacattatgagatgttttggcgatttttttttttagctcatcagctatcgttagtgttagctattttatgtgtggcccaagacaattattcttccaatgtggcccagggaagcctgctggtctagacaaagaggctgggattgctgtgaatcccgatcctaatgtgtactggaggagttcacaaccaattgtggggttcctacttctcaccacctttctttttctttttctttattttggagacagagtcttggtctgtcgcccaggagtgcagtggtgcgatctcggctcactgcaacctcagcctcccaagtagttgggattacaggcatgcaccaccatacccggctaatttttgtatttttagtagagacggggttttgtcatgttggccaggctggtctcaaactcctgacctcaagtgatccacccaccttggcctcccaaatgctgggattataggcgtgagccaccacacccaaccctcactgcctttctgaactggcatatggtccaggcagagggaaaaggagatgtcacacatacctcatgtctggatttggtatgtgaaaaggtcactaattcctgatatagcaccccgaaagagctcagagctttcaaaccttggaacagaaaccgtaatacagaccacagacctcacactctgagacacagacccaaacacctctcagagaacataaacctcagacaaagacccctaaattgttcaaacgcttcataccccacagaccagtggttctcaaccagaggcgattctgccccgcaaagaacatttggcaatatctaaggacattttggctgtcacaaatatgtgttgcgggcgtgctactgtcatctgtgagttgaagccagggatacagcttgccagtgtcctttagccaaagacccccgccccacccaggaacatacctgtagtggaacaagttgggatgattactcattgcagtgagggagaacgcactccatggggaagtgtggggtggtcgggtttgattgagtgatttgggggtagggtctaaggaagtgggggctcactctagattagatgctgtcagaaaacaagggcaattttacaattgggtatttcaataaatcttatctatagggagggcagactagagtgaggctaacgctgtcattggtaaggaagtggcagtcactcattttaaccaagagaggagaatgtttagtattttatgggcaacacagtgaatccttatttttgtttgtgcttaaacaacattataaagtggctgtgctctattttattattttattattattattattattattatttttattttgagacacagtctcgctccgtcacccaggctggagtgcagtggcgcgatcttggctcactgcaagctctgcctcccgggttcacgccattctcctgcctcagcctcccgagtagctgggactacaggtgcccgctaccacgctcggctaattttttgtatttttagtagaggcggggtttcaccgtgttagccaggatggtctcgatctcctgacctcgtgatctgcccgcctcggcctgccaaagtgctgggattacaggcgtaagccactgcacccggcctattttattatttttttgagacaagttctcactttatccccaggctgtagtgcagtgtggcatgatctcggctcactgcaacctcaaatgcctgggttcaagcaatcctctggcctcagtccctcaagtagctgggattacaggcacccaccaccatgcccgactaatttttgtattttttgtagagacggggtttcaccatgttgtccaggctggtctcgaactcctgagctcaagcgatcggcccacctcaaccccccaaagtgctagtattacaggcgtgagccacctcatccggccaagctctgtcgattttatcatggtctcagactaaccttacctgacgctggtattctgtgagattgttcacgtccgttaggagaataacatggcctacctatgggggccgggcctgcttctgggtgtcagaggctgctcccttcttccctccctttttctctcatgctaaacgtctcttatgggtgaaattatgtcccctcaaaattcctacgttgaagtcctaaaccccagtacctcagaatgtgaccttatttggaaatagggttgttgcagatgtaattagttaagttagagatcatgctggagtagagtgggcccctaatcctgcgccactggtgtctttataaaaagcggaaatttggacacaagacacacagggagaatgcaaggtaaagatgaaagcagagatggggtgatgcagcagacaccagggaacagcaaagattgccagcaggcatgagaagctaggaaagatgcagggcacacattcccctcataggccccaaaggaaccaaccctgccaacatcttgatctcacacttccagcctccagaattgtgagacaatacatttctgctatttaagttacccagattgtggtactttgtcatgacagcagccctagtaaacaaatacaatagaccctacaatgcacagaacagccctccataacaaagaattttctggtccaaaatgtcaacagtcccaaggctgaggaaccctgccctggatacagaaccgaaaagtttttattgacctcattatctctgatagaagacaataaaaaccagctgacagtatacacatctttgaacatagtccttcaaagtgctcagaaacctcacaccttgaacatggaagcccatacagcccagagaagacaagcctaaagagactactaacaggtcaaagacatcatactctgggacaaagactaccaagatgacgaaagacctagcatctaaaaacatataccaaatgttcagagacatcacatcatgagacacaaaacccaagagagctctgggtccaaagagctcagatatttcacaccctggacacaaaccggtgaacaacagctcataaataaccgtgtcattcatttcctgattttaaaaattgtactaagattatataagtaagcattaggagaaaaagagtatataagaactctctgcactatttttataatttttttaagtctaaaatgcttttaaaatttaaaaaatgttaaaggctggacgcagtggctcacatctgtaatcccagcactttcagaggctgaggtgggtagatcgcttgagctcagaagttggagaccggcctgggcaatatggtgaaaccccttctctacaaaaatacaaaaattagccaagggtggtggtacacacctgtattcccagctacttgggaggctgaggtgggaggattgcttgagcccaggaggtcgatgctgcagtgagccatgatcacgccagtacactccagcctgggtgacaaagcaagaccctgtgtccaaaaaataaaataaaataaaaattttaacaaaaatgatcacaggacgtaaaagggaatttagaaaacttaaataaggccaagtgcagtggctcatgcctgtaatcccagcactttgggagggtaagacaggagtccaggagttcgtgaccagcctgggcaacatggtgagacgtggtctttacaaaaaataaaaaaattagtggagtgtggtggcacatgcctgtggtctcagctactcaagatcaggaggctgaggtgggaggactgcttgagcccaggaggtcgaggctgcagtgagccatgtgcatgccactgtactcagcctgggcaacatagtgagaccctgtctcaaaacaaaacaaaacaaaacttagatacatcttgccaacaagcacagaaaacaatgttaagcccttctagcagtcacagaaatgccaataaaagaaaaatgaaaatcaattttaagaaaaaaaaaaaaaggctgagtgtggtggctcacatctgtaatcccaacactttgagaggctgagtcaggagtatcatttgagcccaggagtttgagaccagcctaggaaacagagggagaccctgtctccacacgcaaaaaaaattattttgggacagggtcttgctctgttgcccaggctggagtgctgtggtgagatcacagttcactgcagccttgacctcctgagtagctggggacaacagacacgtgtcaccatacccggctaatttttttttttttgtagagatagggtttcaccatgttggccaggctggtctcgaactcctgggctcaagggatccacccactttggcctcccaaagtgctgggattacaggtgtgagccaccgtgcccagcctacaagaaaaaaaaaaaatagccgggccaagtgtggtggtacgcacctgtggtcccagctactcaggaggctaaggtgggaggattgtttgagccagaggtcgaggctgaagtgagccatgattgcaccactgcactccagcctgggcaacagagagagaccctgcccctaaaaacatacaaaaaggcctgggcaacatagtaaaatcccacctccacaaaaaataaagaaagttagccgggtgtggtggcacgtgtctgtagtcccagctactcaggaggctgaggtgagagaatcacctgagattggcaagttgaggctgcagtgagccgagatcacaccactgcactccagcctgggtgacagagcaagatcctgtctcaaaaataaataaataaaagtaaagacacacaaaaaaagaaaagaaaaaaaaactctgcacatccggggacaaagatccataaacagcttagaaaccttgggacattctggaccaacgtaaacagaaaaacagaaaagaaaaacaaaaaaaaacaaaaaaaaaagaaagaaaaaagaaaccaaccctgggacagagacccacaaagatctcaaacacctaaacctctgagacacagattttcaaacagcaaagagacttcacagtctttttataagtcataccctgaactgagattccaaaacaaatcagacttcacatcctgcacacagtcctccaaactgcagagtgttgtaataactaccctatgatgagctgacttgacttgagaatcactttcttcctactacctacctacctcaccagccaaacacctcccctgtctgatgtttaaaatcccatcatttaaaagcgtactcttttaagtcttgcccccaccttccaaaattctccttgtagttgccacaagctcttcagcatcccagagcgtgaaaccatgcatctctcttttagtcacttatagcccaccccatcacactcctagtcaggcctggtcctgagggaagcctccaaatcaccctcttctgggagatgggggctggcctggaggaggatcatgagatcaccttgaatcttatctgctggactcagacctacaggtagcctgaaagacaaatgccagggaccctgaagaatttttcttagtgctgttgtgaacggtgagtgggtcctgaaatcaatataatgggatgcaataggcattgcttaaaaaaagaaagaataggtaaaagaaaatggaaaagattacccgacacactctgtgccagcccttgagtacaagccaataatgccagcttcttttacaggtgcacaagttgaacttcccagacgggattcgaacctacgatctccagtagccaaagccctgcctcggcaaccctgaacgccaacccaggagccaaagcgcttgcgccgaaacagcagccaataggaacgcggagccgaaggacccggcctgtagcctcttagtgattccggaaaacctcggtaccctggaagagcttaggtaggcagtctcgcggtgaccaatcagagctcagggcaagactttgtcccgccctacgcaactcgtccaggaagcaatcgccgctccgcggccttcctcctcaccccacccccggagttgattcgcatctgtatagccaacccggcgggaacggatatattaataaaagcttggtggcggcggcttccagacaggtggacgctttaggccgaagatcgggtccgcccggcgcgggggtcggtccaggcagagccattctctcctcggtctagggtggaggccgatccactcgcgggatgaggagacctttcgtgtctccactagtacaatggtatcttccgaaatacacgacccctcccctgtggtacctcccatgaccgtagtggtatggtcctggagctgcacagtctagtcgttaacccttcattcccaccgctcacgctccccttgtgtgtgcgacaaggactctttcatgtcagtgtcaagtgaatcaatcttcagttcaccgcaaaagaactaaatggactctttcatgccttcctcctgcccacgttccagccctgtctcccccaaccgacgtcccccagagcactgtccctgccccataccctgatgattcgtttgagagcaaaggcccaagcgtccaaacccttgctgcagagccaccgcccattaatgggcattcattcccgaggccactgatggaagtctgcctttgtgtggcagcatttatcaaaataaaaagcagacacccctccttactggaatgtcaccaccacgaaggtagggagggatatgtgtatttctagaccccccaaagtctctgcctgaaactgccctgcacacagtaggtgctcaaaaggggatttgttgaataaatgactcctttggcgtggcagtttcacttttaagtatgtgttctaaggaaataatcatacatacgtgcacagtcctgtgtgcacaagaatggaaggagcaaacaactaagggagaaaacggcaaatgcttaaaggcgattataccatagagtaccagctggctgtgaaacagaatgagacctcattactggaaacacccagatagctcagggagttcacatcattgcacacagagcacaaaagagctcagagatctcacaccgtgggatacagagtccaaaacagttcagggaactcacactgaacacagaccacaaaacaaaattagagaactcaataatggaacatatcttaatagattcccagtcatttcataggtctcatcctcgtcacaaaatcctacaaacatttcagagacctcaccctgggacacaaaggccgaaacacctcagggacgttgcacgctgggaaaacaaatcccaaacaccttacatacctcatatcctggacgcagactccaaaacagctcggagacctcaccacctgggatatagattaaatctggacagagaccacatactctttttgcagggtctcactctgtcacccaggctggggtgcagtggcgtgatcacagctcaccgcaacctccgcctccccagctcaagcaatcctcccacctcaacctccccagtagctgggactactgaagcaggccaccacacccgactaatttttgtatttttttctagagacggggtttcaccatgttgcccaggctggtctcgaatcctaggctcaagcaatccactggcctgggccttccaatgtactgggattacaggcgtgagccaccatgcccaccatgagaccacataactccacgtagaccacaaaacaattcagaggcctggacacaaacaaaatgaaggtgacccacctgtactgcctggagagaccacctaaaggacatgctgttaatggaggcaaagcaagtgggaaaaaatgctcaaagaatggcctcataacctgagaaccagccctgaaaagtgttctgagatcttatacacaaacagctcagaaatcacagaaaatatattcttttaccatagtggaattaaactagaaatcaataacagaaatgtatctgaaaaatccaaaaatacttgtaaattaaacaaaacacttttttttctgtttttgagacagagtttttgctctgttgcccaggctggagtgcagtggcatgatctcagctcactgcaacctccgcctcctgggttcaagcaattctcctgcctcagcgtccccagtagctgggattacaggcgcctgccaccacgtctgcctagtttttgtatttttagtagaggcaaggtttcaccatgttggccaggctggtctcaaactcttgacctcaggtgatccacctgcctcagcctcccaaagtgctaggattacaggcatgagccaccccacccagccacaaaacactttaacccatgagccaaagagaaaatccaaagggaaattaaagatctattgtgaattgaaaaaaatgagaaaatacaacaaatcaaaatctatgggatacagctagagtagtgatcagaagaaaattgatggcattaaaatgcttacatgagaaaagaaaggtctcaaatcaattatctgaatttccaatttagaaaagtctaaaaattacacctgaaggaataaaataataaagataagggcggccaggctgggcgctgtggtgcacacctgtaatcccagcactttgggaggccaatgtgggcgaatcaccagaggtcagacattggagaccagcctggccaacacggtgaaaacccgtctctactaaaaatacaaaaaactgacacctataatctcagctactcaggaggctgaggcaggagaattgctggaacctgggaggcaaaggttgcagtgaagctgagatcacgccattgcactccagtccggactcgacaacagtgagactccatctcaaaaaaaaaaaaaatacaaaaatttagccgggtttggtggcacatgcctgtagtcccagctactcgagaggctgaggcacgagaattgcttgagcctgggaggcagaggttgcagtgagctaaggttgggccactgcactccagcctgggaggcagagcaagcttcgtctcaaaaaaaaaaaaaaaaaagaaattagccaggtgtggtggcatgtgcctgtagcctagctaccagggaggctgagcagtggggatcagttgagcctgggaggtggaggttgcagtgaaccaagatcgtgtcactgcacaccagcctgggtggcagagtcagatcctgtctcaaaatcaataaaaaataaaaatataagagcagaaatcaatgaaattgaaagcaaaaacaatagagaaaatcaatggaggccgggcaccatggctcacacctgtaatcccagcactttgggacaccgaggtgggcagatcacctgaggtcaggagttcgagaccagcctggccaacatggtgaaaccctatctctactaaaaatataaaaatagctgggtgtggtggtgggtgcctgtagtcccagctactcaggaggctgaggcaggagaactgcttgaacgcaggagacggaggttgcagtgagccaacacagtgccactgcactccagcctgggcaacagagtgagactcgaaaggggaaaggggaagggaaaattaatggaaccaaatgccagttcttggaaaaaaacaataaaattcaaagtctctagcaccaaaagcagcacatttttctcataagatccaaatttaataagagtctctgcaaaaattttctgttctttctgaaatctcaactgaaagggattttactcgaaatagcctaattaaaggtctttttcttttcaaaaaaaattatttatttatttagagacaggatcgtgctctgttgcccaggctggagtgcaacagcgtgatcatggctcactgcagcgtcaacctcctgcactcaagcaattctcccacctcagcctcccaagtagctgggaataaaggtgtgcaccaccacacccggctaattttttgtaattttggagagacagggtttcactacggtaaccaggctggtctggaactcctgagctcaagtgatcccgcctcggcctcccagaatgctgggattacaggtgtgagccactgcgcctggccaaaaatttattattttatcagtttctttggcgtgagttgaggaaatcgtatgtcctttatacttaactagactgtattggtttgtatctgactttctactatttttgatattgaatgaaccattggatagtactcaaagagcttcaaaaggacttttttctcgttaacatatgtctactgttcagaaaatttatcacgaaatttatacctacattttagcagttggagagttaaataaacacaaaaaacagattctagcaaccccaagaactgaaaagattgaatttgatcatctcacagtgctctgttacacgtcgttatgcataaacaaatcctaagaactcgtgaatttaccacaaattgtactggatattcaatgcaaataaagccaattttgtgcttacttgtgagggagagctgtacttgtcagacgatatattccggaacaaagccagacctttgggaaagttttgggaagccaggtcttcagtgatgggcacacattgagaagcgggaggctggagaggcaggccatggggctttctagcatgttcctctactcacggcagtaaggctgctatcgaggtgcaactttaaaatggcggcgacaggaaggattgctcgctgattggctgttgtgtagaagggtggggctgtcactgattggctgactttggctgactttcatggggtccattgctaattggctgagtttcaggactgagcgtatcacctagtgataattgagtatacttcctgatttgcttgtcccttctcttagtgtacatggagggatggaatttctgggtcaccagggatgcatatctttaaattttcctaaataatttcaaatgcggccggatgcggtggctcacacctgtaatcccagcagtttggtaagccgaggtggaaggatcgcttgaggtcatgtgtcccaaaccagcctggccaacacggcaaaaccccgtctctactaaaatacaaaaattagccaggcagcacacgcctgtaatcccagctactcgggaggctgagaggcaggagaatcacttgaacctgggaggcggaggtcgcagtgagccgagatagcaacacggtttaggtagcagccaccccctaattccatctccacctctttctttaccttcccctgccaactgggctctctgcaaacctagaaaggtcagggagagatgggggtgagtgttactcacatgccagctcgggagttgtctctagttcccacttttttttttttttttttttttttaaaagacagtcttgctgtcgcttaggctaaagtgcagtggtgggagatatcagctcactgcatccttgacttcccgggctcaagcaatcttcccaccttagcctcccaagtaagctcccacattcttcatgccctacatgagcagtggctcacagtcaagtcctgatcccttctccatagggcctgcccccattccaaccacttatacctcccctgatgtcccagggccctgcgtgttctctgagctctcacctggctgtacagcccaggtgcgactggtgaatattttctctttctttcttttttgtttttttttttttttttggacagagtctcacttgcccaggctggagtgcagtgataagatcttagctcactgcaacctctgcctcctaggttcaagcgattctcctgcctcagcctcctaagtagctgggaatacaggctttcgtcaccacgccaggctaatttttgtatttttcgtagaggtggggtttcaccatgttagccaggctggtctcacacctgtaatcccagcactttgggaggccgagaggcggatctcctgaggccaggagttcaagaccagcctggtcaacatgttgaaaccccatctctactaaaaacacgaaaattagccgggcgtggtgggatgagcctgtagtcccagctattcaggaagctgaggcaggagaattgcttgaacctgggaggcggaggttacagtgaaccgtgattgcaccactgcactccagcctgggcgacagagtgagactctgtctcaaaaaaataaaaataaaaataaaaataaataaaaactgaggccagtcacagtggctcacacctgtaatcccagtactttgggaggctgaagcaggaggatcacttgaacccaggagtttgagaccggcctgggcaacatagcaagaccctgtctccacaaaaatttttttaaattagaaatttaaaaaattaaaattgatccatattcccattagtagggatgtttaaataacacatctgttaatcttgagttaatggaaagagccaggaagggtccggtttggtcttgtatctgtaaaattaaaattaggaacagttaaacaaatgtcttctatggtttttgttacttgagcccaggggttcaagtctgtagtgagctatgatttcactgctgcactccagcctgggtgacagagaagaccttgtctgtaaaagaaggggaggagggcaaaaatatataaaattaatattagcaaatttttttttttttagacagagtcttgctctgtcgcccaggccggagggcagtggcacgatattggctcactgcaacctccacctccctggttcaagcaattcccctgcctcagcctcccaagtagctgggattacaagcgtgcaccatcatgtccggctaattttttttgtatttttaatagagacagggtttcaccatgttggccagactggtcacgaactcctgacctcatgatccgcccgccttggcctcccaaagtgctgggattacaggcatgagccaccacgcctggccattagcaacttttaaacaaatgtcttgtatgcttttcattacttataaaaggctctctgaaggataggatggggccatcttagagatctggaccaaacaccaatgtgattcttccagaagactgcaatttgatggactatgtcagagatgagaagaccgaattcctggctccctttccacatcttcctgatctcaaggcttcaggattggagtctgaaaatgtgaattctagctatgtagctttgaccaagtcatgtgtcccccgtgggactcagttttccttctgcccagtggggaatcataagcgccattctgacttgtcacagggtttcaggtttgttgggagattacaagacagtgaaaatgaagtatctttgactaattaaatcatctgtctcagaatataacacattttaatgtttttatttattattattattattttttacaagcgtgtgccaccatgcccggctaatttttttgtatttttggtaaagacagggttttgccatgttggccaggctggtctcaaactcctggcctcaagagatcctcccaaagcactggggttactggcatgagccattgcgccccgccaaaagttgtttctttggagcaaaataggtgataatgccaacgtattcgcttgctaagatttccattacagaataccacaggctgggtggcttaaacaacagagtttattttctcacagtctagaggctggaaatcaaagatcaaggtgtcagcagggttggtttcttctgaagcccgtctccttggtttgtagacagccacctcttccccgtgtctccacacggtccttcctccttgtgcacccatgtttgtgtcctgatctcctctccttataagggccacaagacagattgaattgcagcccaccctgccaacctcattttaacgtaatcacatctttaaaggccctatctccaaatacactcacattctgaagtactaggggctttaacatatgaattggagggggacaaaattcagtctataacagccagagatgaatgttatctatttgcgtgagatgaggaaagagtaggaggcagctggctgcatctgggctgtgttggtttgctttgggaagagctcatcaggtatgggcaggttgctcactcagtggtggacatgggtagcaacacatgctttgtcaatgaaaatacataatcatgacctcatcgttttggtaaaaaaataacaattttttgttgttgttgttgttgagatggagtctcactctgtcatttaggctgctggagtgaagtggtgtgatctctgctcactgcaacctctgcctcccacaagaaattctcctgcctcagcctccctagtagctgggattacaggggcccgccaccacgcttggctaattttttttttttttttttttgagacagagtcccgctctgtcacccaggctggagtgcagtggcgcgaccttggctcatcgcaacctctgcctcccgggttgaagcaattctcctgcctcagcctcctgagtagctgggattagaggtgcacgccaccatgcctggctagtttttttgtatttttttagtagagactgggttttaccgtattggtcacgctggtcttgaactcctgaccccaggtgatccacccgcctcagcctcccagagtgcttggattacaggcatgagccaccgcgcccagcctaatttttgtatttttcgtagagatggggtttcaccatgttggccaggctggtctcaaactcctgacctcaggttatccgccccaccttggtctcccgaagatctgggattacaggcatgagccactgcgcccagccacaaagatgtaaactaaaaaaaaaaacactccaaatcccactaccaacaaataaccaacgttcacaccatgctgtctccacatacacagatagaaggcaagaacactggagcaaaaaaaaaaaaaactggagcaaaaaacaaaaaaacaacactggagccaaaaataaaagaaggcaagaacactgggttgagagacagaaagaaacaaaagcaatttttacaaatgtgtgtgtactataagtgttaaagtaaaagttgttatacttttctgcaattgaatcaacagaagaaaaccaaatggttgctatgctagtttcttcattgttaatgctgctgtaacaagttaccacacacttagtgggtcaaatcaacatgaatttcctctcacacagttccttttttttttctttctagagacagggtctcactctgtcacccaggctggagtgcagtggcgcgatctcagctcactggaacctctgcctcccaggctgaagctatcctcccacctcagccacctgaatagctggggccacaggcgcgccaccaccatgcccggctaatttttacattttctgtagagacgggacttcgccatgttgcccaggctcttctcaaactcctgggctcaagtgatgctcccgccttggtctcccaaagtaccaggattacaggtgtgagccaccatgccctatcatacagttctggaggtccgaagtctgccatgggtctcagtgagctaaaagcaaggtgtcagcagggctgtgttgtcttttagaggctctaggggagaaactgttttcctgttttttccagcttccagaggtcacccacattcctttactcatgaccttcttctttcatcttcaaagccagcaactgtggttgtgtcttctcaagtcacatcacttctgcctccttctacttttaaggacttttgtgatgaccttgggtctactggataatccaggataatttctctgtcttaaaaccaactggttggaaaccttaattccatctgcaaccttagctccttttttttttttttttttttttttttgagacagggtctctctctgtcgcccaggctggagtgcagtggcgtgatctcagcttactgcaacctccacctcctgagttcaagcgattctcctgcctcagcctcccaagtagctggtaccacaggcgcgtgctaccacgcctggctaatttttgtatttttaatagagatgggattttgctatgttggccaggctggtctcaaactcctgacctcaagtgatctgcccgccttggcctcccaaagtgctaggattacaggtgtgagccaccatgcctggccttagttcctttttaccatgtaacatagaatatccccaggttccagggtgcaggcattgttctacctacacaggaggaagggagggagcgtacagggaggtggccatccacaaaagtttgggtttttcttggagggaaggcgtggaaacaccacgggccccaagactgggagagcagggttgactctgagctgcgtttgcaggtggcagtgaaacagccgacagatggaagctgaaaggctaccagaatatccactcttccccagggactccgatgcagggttaggggctctgagtggagacagtgtcaaggcctcagctgaaggcaggtcgttagctctgaaagcagcaccagctcccctgtgacaggggagctctctgtctttctctggcagcccttgactccatgccactccccctgcccctgccctacctcctgcctccaagggcctcccacattcccaggaatgcagacttcacctttctcttctgtctcccttaaacccagtcagcctcagcagtttagggctataaagtccagcagaaaccatcttgtctaaccccctcactgaacaaacggggaaatgagcccctggctctgtcccaggaatcccttatatacactcagagtgacttcttcaaggacaaccaaaaatgaccttaatcccaggggaagagaaatcctcgcccctactaggtggcagtctctacaccttccctattcaagactcagtaggggccaggtgtggtggctcacacctgtaatcccagcactttgggaggcagaagcgagcagataacctgaggtcaggagtttgagaccaggctggcgaacatggtgaaaacctgtctctactaaaaatacaaaaattagccaagtgtggtggcgcatgcctgtaatcccagctactcgggagggtgaggcaggaaaatcgcttgaacctgagaggtggaggttgcagtgagccaacctcacaccactgcactccagcctggacaataagagcgaaactctgtcttaaaaaaaaatactcagtgggcagccaggcacagtggctgatgcctgtaatcccagaactttgggaggcccaggtgagaggattgcttgagcccaaggagtcggagactgcggtgagctatgactgtggcactgcactccagcctgggtgacagagtgagaccctgtatcttaaagactcagtgggccttctctgaggtagactttacagcccagcccccagggccaagtcaaagccacagggtcaccaatgcatggagtgtcctttgagatcactaagctcacctcctcctgatacagaaaaggaaaacaagatgcagagagtgcaagggacagaaaccaagccacacagcagtgccaatggagaactaggcctagaactcagctcaccttgcttccaagtctgtggttctatgaaatatgctttccactgctttccctacaatcttcaactctatccccttcttttgcactacccgatccctattctcttcagatggagggcagagatacatccccccaacaactttttttttttttttttgagacagagtctcactctctgtcgcccaggctggggtgcagtgtcgcgatcttggctcactgcagcctccgcctcctgggttcaaacgattctcttgcttcagcctcctgagtagctgagattacaggcgcacaccaccattcctgactaattttttttttattattattagtagagatggggtttcatcatgttggccaggctggtcttgaactcctgacctcaggtgatccacctgcctcggcctcccaaggtgctgggattataggcgtgagccacctcgtctggcctctaatagggctttctgttacttaaaggggaagaatgcctaactgccaaagtctctttacacataatctcttaactacccttaggatggccaggctaggttctagcatgcccattttatggacagggaaactgagctaccgagcctatgtgatttcagtgtttgtcctcaagtcctcagaaactccagatttgagagaaaggcaggcattttctttggagtagaaatacactctctaataaaaaggcaacccacagaataggagaaaatatttgtaaatcatgtacctaacaagcgattaagatccagaatgtatagagaacccccaaaactcaacaatgaaaagacaaacaacccaattcaaaaatggataaaggacttgaatagacatttctccaaagaagacatacaaatagctaataagaacatgaaaagatgttcaacatcactaattattagggaaattcgaatcaaaactagaatgagataccacctcacatccattaggatggctactattgaaaaaaaaacaggaaataacaagtgttggcgaggatgtggagaaactgaaacccttatgtactgttattgggaacataaaatggaactgccacagtggaaaacaaaatgacagtttcttaaaaagttaaaaataggctgagcgcagtggctcacgcctgtaatcccagcactttgggaggccaaggtgggaggattgcttgagctcaggagttcaagaccagcctggccaacatggcaaaaccccgtctctaccaaaaatgtaaaaattagccaggtatggtgacgtgcacctgtggtcccagccacttgggaagctgaggcagaaggatcacttgaacctgggaggcagaggttgcagtgagctgagattataccactgccctccagcctgggtgacagagcgagaccctgtctcaaaaaaaaaaataaaataaaatgaccatatgattcagcaattccacttctgggtatgtatccaaaagaattgaaagcagggttttgaagagatatttgtacaaccatgcccatagcagcattattcacaatagctaaaccatggaagcaacccaagtgtccacagacaggcgaatggctaagcaaatgtggtttatccatacaatggaatactattcagcctcaaaaaggaaggaaattccggcttctgacacatcctacgacatggatgaacgttgaggacaactatgctaggtgaaataaaccagtcacaaaaagacaaatactgtatgattccacttatatgagaaacatagtgtagtcaaagtcacagagatgggccaggcgtagtggcttacgcctgtaatcccagcactttggaaggctgaggcaggaggatcacttgagcctaggagttcaagaccagcctatgcaacatagcgagaccctgtctctacaaaaaaagttaaaaattaagccgggtaggctgggcgtggtggctcatgcctgtaatcccagcactttggcaggccgaggcgggaggatcacgaggtcaggagatcgagaccatcctggctaacacgctgaaaccccatttctactaaaaatacaaaaaattagccgggtgtggtggcgagcgcttctagtcccagctactcaggaggctgaggcaggagaatggcgtgaacccgggaggcggagcttgcagtgaggcgagattgcgccactgcactccagcctgggtgacagagcaagactccatcccccccacacacaaaaaaaaattaggccgggcgtggtggctcatgcctgcaatcccggcactgtgggaggccgaggcgggtggatcacgaggtcaggagttcaagaccagactggccaacatagtgaaattttgtctctactaaaaatacaaaaattagcccggcatggtggcgcgtgcctgtagtcccagctactcgggaggctgaggcaggagaatcgcttgaacctgagaggcggaggttgcggtgagccaagatcatgccactgcactccagcctaggcaacagagggagactccatctcaaaaaaaaaaaaaaagaaaaaaattagccaggcatggtggcatacacctgtgggcctggctgctcaggaggcttaggtaggaggattgcttgggccccggagttcaaggctgcagtgagctgtgattgcccccctgcgctttgtgctgggtgacagagtgaggccgtgtctcaaaaaaaaaaaaatcatagaaacagaaagtagaagggtggttgccagaggcttgtgagaggaaagaatggggagttgttgggtacagagtttcaattttacaagagaagaagagttctggaaatggatggtggtgatggttgcacaatactatgagtgtatttaataccactgaatggtacacttaaaatgattatagtgataaagtttgtcatatgtatttcaccacaattttttaaatggggaggaggagaaagaaatgcatctgctaaacaagcgctgtcccagcgcattggtgggcctgtgtttgcaggaacaccaactggccctgaaggtggccatggtttgggaagccctggctgctgcctctctggttctctgggctttgtcctgggagatgtgctggggccagcagtggatggggaagaagcacggtaggtctctgttactcaacagaaagtgcctccattctaaggagacaagaaatcgtctgctggaaacatttagtgaaaccaaagctatcttggatccgtttatggaaaggagtggctgagttctaccagatgtaccctgaagcctgttaccaaagccaagccaagcgtcagcaccaagcagtacctcattcacctctggatctctgaagaacagggtcccacgtccaggagcctcccacaatggagccagtgtccaggttggaggtgcagatgctctcctggttaccacctctgctctggcctggttcccttcaccctggacagagctcttcctgcagtagaggaaagagccatctcctggaagccaggaggtccttctggaagaatgcttccctgtccctgagcttcccagtgtgcagagagcttctccacacaggatttgatccactgtattgaggaattccttctcctgcagtaacaaaccaacccgacaatgccatggcttcacacgctaataaaagtttatttcttgctctcatcacagactgctgtgggtgttcctggttgatgagcggacttccatgtgggggctaaggactccagcctccttggacactgtggcctcaccaccctccactagggctcaagaactccaaaacatagacaaagagcaatggggaaagcactactgcttcttaaggacacaaaccattttagctcaagttccatttgggagaactggtcgcatggccccacccaggggcaagggacagtgggaagtggaacttctggctggacagctattttgcaacagctcaacgtgcgtgacttttgggagcagctaaacatcactgtgacaccctgtcagatgggtatcatccccgtattactgatcaggaatctgacggtcaatgcaggcaacggactcactccaggtcacttagctagattcgttatcatgatcacaaactaggtgtcccctcttccagctcctggcctgatgccaccttgatcagccagctcactgctttgaattttaggaagagtctcaggcctcctcatccagagggtgctttactttataaagcagttttaacctgagaacttcacctcatcctcaaaatgtcctggtgagggaagcaggaagccagtgatccccatttaacagattaaaaaaaaaaaaaaagcaactgagtacaatcagttctgaagagcagtgaaaagcccaaggtcccaggcactgcagaccttcccagcaatagattccagatgtttctcttcctccggtatcctcaatgtccatgaaaagaggcaggctgtgggtcttccacattgatgaaaagtgaagcccacattctagaacccatgtgtcatgtgcactgcttaggtgatattcaaactttcccccctttcgtcagtgactcctgaatgtgcacctccagcatcattccttccccaatgtgtgtgaccccaggggcaccctctcctcattctgtgtgacagcacagctgtccaccccatagtctgtctgaccccaggagtgtccacttaccagtctgtatgacatgagtgttcacactcttgtgatgacagaggtgtccccaccgcagggtgtgtgactctaggagtgtccaaacccctatctgtgtgactacagttgtgtccacatgccagtatgtgtggccccaggagtgcctacctccaaagttgtgtgacaccagcagtatacagccagtctgtgtgaccccaggaaggtctacaactcagtgtgtgtgagtgttcaaacccccatgtgagtgacccacgggagtgctgaccccccatgtgtagtaccccatgacagtctgctgcccttcctatgtgatcccaggaagcacactgcccagggtgtgttactccatttacaagaccccagcgatgttcacacctgatctgtgtgagcccaggataattcacattccagtctgtgtaacccgagggccgccccacactgcagctgctgtgacctcagcagtatctactcccaaatctgcataccgaggagtgtccatgactatcctgggtgaccacggcagcatccacaactcagtctgtgaccccaggggtgccaattcatcatttttttttggaccacaggaatatccacttccctaaaactgagattgcaggaatgttcctaacacagcctacgtgaccacaggactgtcccccccttagtcactgtggccccaggagtgtccacaccccagtctgtgtaacactaggagtacctggtccacaatgtgtgatttcaggggtgcctgccgcccagtgtgtttaatattaggagtgtcccaaaccccctgtgtgaccctggaagtgtccactctccagtatgggtggcccttggagtgttcacacctctgtctatatgaccccaagtctgtccacagtccagtctgagtgactctagcgatgtcgaaacccccatctttgtgaccggccagcactctaggtgacctcacaattgcccacacctcaggctgtatgagcccaggagtggccacattccagtccgagaggccccaagaggctctacattccaatctgtgtgaacccagggacgtgcacaccccagactatctgacctttaggatgtccacatcctcgtgtatgtgaccctaagaatgtccactagccagtctggatgactcaggagtgtctgcttcccggtctacgtgggaaatgtccacatacaaatctatgtgaccctgggaatgtccacactccaatcattgggaccccaagactgcccacccctcagtttgtttgacaacaagagtgttgacaccctagtcaatctgaccccagaagtgcctgcatccccctctgtgtgaccccgaaagtgtgcattctccagtgtgtgtgattcctggagtgtccgctctgcagtgtgtgtgagactcctggaatgtctggaaccccatctgagtaacccacagctgtccacatgccagtgtgtgctgcctcaggtggcattcacacttctatctgtgtgaccccaggagtgctcacaccccactctgtgactccaggattatccacacccctgtctttatgactgcaaggttgtctacacaacagtcgtgtgatcgatcccaggagtatacacacaacaattgcacaacagcaggttccaagacagtactaagttcctcaccaccgccactcctgcacaccctctgtggtgcgacctgtgaggggctgttcatgcctcaattcaatggatcattttgtcccaagctccctccaacaccattaagtggtctcttctattcctattgcccctctgtctctccagtggaccattcaatttccatcccccacttcccaaccacatgtacacacacaggtgcccacctgcatacacatatatgtgcatgcacatccccaaatagaccatcccagcatcagaccctgcacagcttgtagggagcaaagatcaaggaagccaaccccctgctgcaggccccaccccatagagagtagtggggaggaaatcaggaaatgcattcctgatgagagtaaaaccttctaggaccttgtgaagcatctacagaaatcaatattggacactctccccactacccccagctccatgtgggcagggacatttgtctgccttattttctgttgtctggccagcacttagaacagtgctgggcacacagtacacacacattaggtgtttgttgaatgaatgaaacttgatccagcaattccacttcttttttttttttttattttttttagttttttttagtttttgccctgttgtccaggctggagtacaatggtgcgatctcagctcgctgcaaccaccacctcctaggttcaagcaattctcttgcctcagcctcctgagtagctgggattacaggtgcctgccaccacacccggcttatttttgtattttcagtagagacgaggtttcaccatgttggccaggctggtcttgaactcttgacctcaggtgatacgcctgcctcagcctcccaaagtgctggaatcacaggcatgagccactgcgcctgacctgagcaattccacttctaactctaacactcacacatgtgcacaaagctgtgtgcacaaggctggtgggagcagatcagaaaaaccttgtaaatgtccatttataaagaatgactgttgcagagtgaaatgaatgatggaggttcatgtcgctccacagagcacttgctggacatgatacagaatgaaggggacctgctgcatttctggagggattgcagaggacttcaaggaagcagggatggtgattcctaccacatccccattcaactctcctatttggcctatgcagaagacagatggatcttgcagaatgacagtggattagccaggtgatgacttaagcttaacgtaagcttaactaggtggtaattccaactgcagcggctgtaccagaggtggttgcattgcttgagcaaattaacacatcccttggtacctggtgtgcagttatttgatctggcaaaggccttttttctccatccctgtccataaggctaccagaagcactttgaactggcaaggccagctgtactctgtcaccatcctgcctcagtggtatatcaatcaactctccagccctatgtcacaatttagtccacaaggactttgattgcctttcccttccacaggtatcacagtggcccatgacattgatgatattatgctgagtagacatagtgagcaagaagtagcaactactctagacttattggtgagaaatttctgtgtcagagggtaggaaataaattcaacaaaaattcagggatcttctacctcagtgaaatttctaggagtccagtggtgtgaggtctgtcaacatattctttttttttttttttttttttttgagatggagtctcgctctgtcacccaggctggagtgcaatgatgcaatctcggctcactgcaaactccacctccctgttcaagcgattctcctgcctcagcctcctgagtagctgggattacaggcacacgccaccatgcccagctaatttttgtatttttagtagagatggggtttcaccacgttggtcaggttggtctcaaactcctgacctcatgatccgtccgcctcagcctcccaaagtgctgggattacaggcgtgagccactgcacccagccaatatattccttctaagatgaaggataagtagttgcatctggcccctcctacaatcaaaaaagaggcacaatgcctggcacacctatttggattttggaagcaacacattcctcatttgggtatgttacacatgcccgtttaccaaatgacctgaaaagctgcaagttttgtgtggggcccagaacaggagaaggctctgcaacatgtccaggctgctgtgcaagctactttgccacttgggccataggacccaggagatccagtggtgcttgaagtgacagtggcagatagggatactgtttggagctcttggcaggccgctataagttagtcatagcctagccctctaggattttgttttattttattttttgagacagggtcttgctctgtcacccaggctggagtgcagtggcacaacacagctcactgcagccttgacctttcaggctcaggtgatcctcccacttcagcctccctagtagctgggactgactgcaggtgtgcaccaccacatctggctaacttttgtattttttgtagagatagggtttcccaatgttcccgaggctggtctcgaactcttgggctcaggcaatccacacgtctcagccccccaaatgaaatttggtgagcctcctttaggattttggagcaaagccctgctattctctgcagataactaccctccttttgagaaacagctcttggctgggtgtggtggatcactcctttaatcccagcactttgggaggttgaggccaacacatctctctcttgagcacaggagttcgagaccaccctgggcaacatggcaaaaatccatctctacaaaaaaatacaaaaattattaatagctgggtggggtggtgcatgcctgtagtcccacctactcaggaagctgaggtgggaagatcgcttgagcccaggaggtcgaggctgtagtgagctgtaattgtgccactgcagtgcagcctgggtgacaaagtgagaccctgtctcaaaaaaaaaaaaaaaaaagagagagagagagaaacagctcttggtctgctactgggtcttagtagaaactaaatacttgaccatgggccaccaagttacatcattcctgcccatcatgaactgggtgttacctgactaaccaagagtcggtgtgcccagcagtgctccatcgtcgaatggaaatgggaaatatgtgatggggcctaagcaggccctgaagacacaagtaagttacatgaggaagaggcctaaatgcccatggtccccactccttctaccttgcctcctttctcccagcctgcaactgtggcctcatggggagttccctacaattagttgacagaggaagagaagacttgggcctggtttacagatgattctgcatgttatgcaggcacactctgaaagtggacagctgaagcactatggcccctttctgagacacctctgaaggacagtggaaaaggacagttaataaggggtggacttgtgatggtaaattttgtgtcaacttgatagggacccagggtgccctgttgaatattatttctgggtggatctgtgagggtgtttccagatgaggttagcatatgaattgttggactgagtaaggcagatggctctgcccattgtaaatgggcatcacccaatccactgaaggttggaatagaacaaaaaagacggaggaaggtggaatttgctctctgcgtgactgcttgaggtagaacaccagtcctttgcccttggctggtacttacaccatcagccctttttttgttttgttttgttttgttttttagagacagagtcttgctctgtcacccaggctgaagtgcagtggcacaatctcggctcactgcaacctccacctcccaggttcaagcgattctcctgcctcagcctcctgagtagctgagattacaggtgtgcgccaccacgcccagataatttttgtatttttagtagggatggggttttgccatgttagccaggctggtcttgaattcctgacctcaagtgatccaaccaccttggcctcccaaaacgctgggattacaggcgtgagacaccatgcccagccaacaccatcagccctttggttctcagaacaacaccactggctctcctgggtctccagcttgctgatggcatattgtggaacttctcagcttccaaaatcacaggagccaatccttgtaatatattacatattggttctgtttctcctactggttctgtttctctggagaactctaatacacccagcaattccacttctaattctagtactcagacatgtgcacagagctgtgggaacaaggctggtaggaacaaacaaccaggaaaatcttgtaaatgttcactgatacccaaggactattgcagagtgaaacgaataatgagggttcatgttacagcacagagtgcccactggacgtgacacagaatggatgggacttgtgtgtacctgcaagggtgggggttatcttctacaggatgtgctataggcagggaaaagcaagggggagtcagttacagtgacctagtgcatgtgtgtagtgtgcgcacacacacactatggaaacacagggaactgtatctggaaggaaacaccagaatctgaccccagtggtcattctgggggaatggggatagagatgattgctagagtccatgtactgatgtgttgttcaaatctttttttttttttttttttttcgagagaaagagtctccttctgtcatccaggctggagtacagtggcacgatctcagcccactgcaacctctgccaccaattcaagtgattcttgtgcctcagcctcccgagtagctgggattacagctgcgtgccaccatgcccggctaatttttgtatttttagtagagatgggggtttcaccatattggccaggctggtcttgaactcctgatctcaattgatccacccgccttagcctcccaaagtgctggaattacaggtgtgagccaccaccctcagcctgtttttcaaatcttttatacaaacctgtattcacatattatttgtgtaactctttttaaaggaaaatcatatgcttaaaaacaatatctggccgggcacggtggctcacgcctgtaatcccaacacttcaggaggccaaagcaggccaattgtaggcaacatagcaagacctcatccctactaaaaatacaaaaattagccaggcgtggtgacacacacctgtagtcccagctacccaggaggctgaggcaggaggatcccttgagcccaggagtttgaggctgcactgagccatcatggcgccagtgggctccagcatgggtgacaaagtgagacactgtctcaaaaaaaaacaaaaacaaaacaatatccacaacacaaagtgtttgtgttgggggtaactagaaacaaaaatctcaaactcacatgctccaggggccagacaagtaacctgtaagggagatgggggagttctgctcagggtaaagtgaacagcaactgggctgatgaatgttctctgactctcagcagcggaaggtgagggtgagtgaagggtgagtggggaggaggaggaagactgcaaatctcatcccccaaaactcatcccccaaaataattcaggaacatcacaccctggggctcagacatttttttttttttaaacagagtctcactctgtcacccaggctggagtgcaatggcgcgatctcggctcactgcaacctccgcctcccgggttcaaactattctcctgcctcaggctcctgaatagctgggactacaggtgcacaccaccatgcctgggtaatttttgtatttttagtagagatggagctttaccatgttggccaggctggtctcgaactcccagcctcaagtaatccgtccaccttggcctcccaaagtgctgggattacaggcgtgagccaccgtgcttgaccaaggggctcagaactcttaagagttcagggatcttggcttggaaacagacacctaatgggtcagagcagtcatactctaactcagatagctcacaacttcatacccctgacacacactctcaaacagctcacagatctcacactttggagacatacccctaagtagaccagaggcatcacacgctagaataaagatccccttaatacttggtggtttttcagtattattattattgagatggagtcttgctctgtcacccaggctgaaatgcaatggcgccatctcggctcactgcaacctccgcctcccggattcacgcgattctcctgcctcagcctcccaagtagctgggattacaggcgcccgccaccatgcctggctaatgttttgtatttttagtaaagatagggttttgccatgttgtccaggctggtctcgaaatcctgatctcaggtgatccacgtgccttgtcctcccaaagtgctgggattacaggcatgaaccaccgcacccagccttcagtgttaacaagaagtaatcccttacacacatccactttaagctttcaattttgaggccctgaatttaatgttaaagtccttccatttgcactacctacctgtgtcacctcccacagtcctcagcctgtgccctcccattcctgccccttgatctccaggcgctgagccagaggattgtcgggaggaccctgggcaaagacgcctaccctgccatgctgcgccatctgccctccaggctgccagtcaagatgtggggcaggactttggagaaacaggtgaacaagatggcccctggggatctggggcaagggtgttggcactgaaactggtctagtaacctgtttcccttctctgcgggctcccatttcctgtcctcctctctccctttctctttcagagacaagcagagggcagcagaggcccatggaaaggcccggctctaagccatggagggccctgtgctcaggtgtgcagggctgggccggggctgagggctggctcctcccccagtttagccagggacaggtggagagatacaaaggtggctcacgcagggtgcccccaaagctgtcatgattaaggccatgtggagagaggctaggaaacacagcgctgaccttgagctttaggagaggaattcagaggcccctggcaacctgaaggggaccttgaagaggaccctgtaggaagacagaacacttccctgtagaggaggccaaaggaggaaggacatggtgttccgggcactctgactatagggattttatatgctgtggtgagaaataaaatggattatatttttgtagagtgtgtaaaacggggcttggcacacagtaagccttgtgtgattactatgtctttttttttttttttttttgagaccgaggtttgctcttgtcgcccagggtggagtgcagtggtgcaatctcaggtcactgcaacctctgcctcccaggttcaagcgattctcctgcctcagcctcccgagtaggggattacaggtgcacgtcaccatgcccagctaatttttgtatttttaatagagacaggatttcaccatgtaggccaggctggtctcaaactcctgacctcatgtaatccacccaccttggcctcccaaagtgctaggattacagacgtgagccactgcacccagtcctttgtgtgatgactatgtcttgatcatcattttataaagcaggctttgtaacttcacctccaagagtctgcaggatccagaccctgccttgccctcccacttatctctcactcactcttgggttctgactacgctggccttcctgttattgaagacagccatccctgctcgtccttgaatttgcaaggatggagctccgagtctgcaaagcaggatctggggagtgaatctaagctggcagggaagaatagaataatgggaggaataggtggagtttatttctaacagactatcaaaatgatgcagatgtggccaaagcagtgcttagaggaaatctatagttctaaatgcacagatcagaaaagtagaaaagttgaaaatcaatgacctgagcttccctatcaagaaactgggaaaagaatggcaagtggaacctaagaaagtagaaggaaggaaattataacagcagaaactggtgaaatagaaagcaaagatacaataaagccaacaatgttaaaagttgattctttgaacagattaataaaatactagcaatgtctattttctctcgagaaattaagaaaatatatggattgccaatatcaggaatataaacagggtattgtgacagattctacagatgttagaaggttaataagggctgggtgcagtggctcatgcctgtaaccccaacactctgggaggctgaggagggaggattgcttgagcccaggaattcaagaccagcctgggaaacatagtgagccctcacctctacaaaaaaaaagaaaaaagaaaacaaaaaatagttgggcatggtggcacacacctgtaatcccagctactagggaggctgaagtaggaggattgcttgagtccaggaggttgaggctgcagtgagctgtgatcatgccaccatgctccaggctgggcaacaaagcaagaccctgtctcaaaaagggaattaaaaaagaaagttaataaaatttatttcaacatatgactttattttcaatggagccaaaatgtcggtcattttctctttctgcagttcctatgtccatgtggatcttttgtatccaccgggagagcaaaactcagcaactttgctaatgcctcctccactcaggaaaatagaatggtacaggattttttttagctggagctcagtgaaatcaattgtttaaaatgggctggtttcaatggaactaaacgcagtggaatagaaaataataaaatagcaaagggtagaacagaatagaatggaatccaatggaatcgaatcgaacagaatagaaactagtcagactttgtgccaagcactgtccctagttgttgcagtagatatttatttattgaacaaatatgattgaactagttgtttgggaaagagtggggaacaaaacagacagaagtccctgctcttatgaagcttacattctagtcagggagacaggcattaccatctgcaaaggcccataaatgaaaggtacaagggtggtccttatgaggaacaggctaaaggacagtgtagattggagttcaagagcaatggatgaggctgtagagatagggtgtcattgtaactggagtctagattttaacaagatgaccacacatcatcatcatcatcaatcgttttatagcacttgatatgtattaggcattgttctatgcccttaaaaacagtacttttttaaaactctcacaataatcctacatgtataaaatcatgctcattttatagaaggggaaaccaaggcacagataaattagataaattatttaaacgtcaatctggttccagaatcttcttttttttttttttttttagatacagtcttgctctgtcacccaggagtccggttgagtgatcatagctcattgcaacctccgcctcccaggctcaagtgatcctcccaccccaggcccccaagtaaccagaactacacgtgagcgccccacaacctaattttcatatttttttgtagatacagggtctcactgtgttgcctaggctgatctcaaactcctaggttcaagggatc

SEQ ID NO: 23291 - DNA, 113853 bp, Homo Sapiens
gatcacttgtggtcaggagttcgagactggcctggccaacatagtgaaaccccatctctcctaataatacaaaaattagccaggcatggtggcgggtgcctgtaatcccagctactcaggagactgaggcaggataatcacttgaacccagcaggtggaggctgcagtgagccaagatcgtgccactgcactccagcctgggtgacagagcaagactacatctcaaaaaaaaaaaaaaaaaaaaaaagaagatagatgaccaacaagtttatgaaaatatgctcaacatcagtggtcacagggaaatgcaaatcaaaaccataacaagataccacttcacacccacacccagtaggatggctagaatcaaaaagagggacaataaaaagtgttggaggccaggcatggtagcctgtaattccagcactttgcaaggccaaggcaggcagattgcttgagcccagtagtttgagactagcgtaggcaacgtggcgaaaatcccatctctacgaaaaattaacaaaaatttagctgggtgtgatggcatgcacctgtagtcctggctactcaggaggttgaggtgggaggatcacttgaacccaggaggttgaggctgcagtgagcagagatcatgtcactgtactccagcctggggaacagagtgagaccctgccaaacaaaagaaaaaagaaaaaaaagaaaaaagaaagaaagaaagaaagagagagagagagagagagaaagaaagaaagaaagaaagaaagaaagaaagaaagaaagaaagaaagaagaaagaaaagaaaagaaaagaaagaaagaaagaaagaaagaaaggagtgttggagagaatgtggttaaatttaaatttgaatccccatatggcagctgtggagaacacttgcagttcctcagaaagttaaacatagaattaccatatcaccccgcaattccattcctagttatatacccaagaaaacgaaaaacatatgtccacataaaaactttcacatgaatgttcatagcagcattatttgtgatagccaagagtccatcaatgggtgaatggataagcataatgtggcatttctttttccttttatcttttgagacagggtctcactctgttgcccaggctggagtgcagtggtgcaatcatggctcactgcagcctcaacttgctgatcctcccacctgagccccccaagtagctgggaccacaggcatgcaccaccacacccggctaatttttcttttttgtagacacgtgttcttgctacgctgcccaggctggtctcgaactcctgggctcaagcaatccacccacctcaacctcccaaagtgctgagattacaggtgtgagccaccgcatcctagctataatgtagtaggtattttcatacaaaggaatattattcagtcatgaaaatgaatgaagtactgatacatgctacaatatgaatgaaccttaaaaaacttatgtgaagtaaaagaaggcagttacaaaaggccacatattatatgactgcatttatatgaaatgtccaaaacagacaaattcatagagacaaagagatttgtgatggcccggggatgggaggagagggaaatggaatgggagggtgtatgttaatagatatagggttccttttgggggtgatgaaaatgttctggaattaggtagtggatagttacacaacctcgtgatatactaatcgctttgctatacattttaagagtgaattttatggttaagagcaaattttatggtatgtgaattatgtctcaataaacagaaaaagaaaaaaaagaatgaactattgatacacacgacaatgtggaagaatgtcacagacattatgctgagcaaaagcagcacatactgtatgatgtgcttccatttccatgaagtgcaaaaacaggccaaaaaaaccccaggtatcatatggtgtttatgggtaccaacatatggagtgatggagtaaaaatactcatgaggaagataaacaccaagctcaaggcagtagaaggagagagggaaatggaatcagtacaagagcatctgtaatatcgcatatcctttaaaaacaatctgaagtcaataaggcaaaatattaatgtttgacaaaagtagatgcttgttacagcaccctttatactttccattttttaaaacagtcaaccaacagtttgtttctgagggcaaacgcttgactccttaaccaggctttggttgacatttgccttggtgcttttgacaccacagtctgtcaggctctgtccccaccctgatgggctccacagtacagaagaggcacaaacagtacaaatgccatggggcctggaccaagcaggggctctagaaccccagaagatgccaggagggagtgagccagtcagggaaggcttccgagaagagaggacattgaagaagagtctcaaacttaggcctgacggagaagacgcgcggccaggacaccccacccccgccctcgtctcccccaaagcctgatctggccccactgattcccttatctgcccactcccagctgcctccttgctggctgaactgtcgccgcagacttctgagcctgcgccccctccacggggatgggggagggaatggggtgaggcctggcctcacagcctcggggtttccagctcttgctggaggcagggctctggggcgccctactcctcacccttggcttctcttcctgagcgctctgtgctctccagaaatgaagaaatggggtgagtccagcggccaaacccttgtcttagctcttagacatgcctcgagcctgccattccctgtgaggacagatttccctatgttgcgaccgctgcttctaataataataatgatgatgataattcccatttacagagcacaccatttatggtgtgccagcaggccctgtgctgagtggttcctacccacgtggggggctaggactttacccgttttccagatgaagaaactgaggctcagagggcgtctggcccaggaatcacacagcaaatcacacagcaaatcagagttgagacaagaacccagggccctggaggaacatcttcatttccacacacctatgtagaaccagtctggaggtgagggcaattatacacacttgcaccacaaggagctggtgagaatgcgatagaattatgggtggagagcgcttagcacagtgcctggggtcactcagcaaataatgccgctgctgttattattagtctattaatgctattattaatatcagaattaaacaagcctcggcaacatagcgagacttcatctctattgaaaaaaaattttttgctgggtgtggtggcatgcacctgaagtcccagctcctcaggaggttgaggtgggaggatcacttgagcccaggaggtggaggctgcagtgagccaagattgtcactgcactccagcctgagtgacatagtgagacactgtccccaaaaaatatttagtacgtatcattatcactattgttgttagaattagaatagttttagaattagtgttagtattaataatagtattagtgttagattaaaattagtattagcattagatgagtattactatgaaaattagtatgtcctcatagaagtagagagtagaatagtggttaccagcagatgggagggtaggaggcagggagggatggggagaggctgtcaatgggtacaaagctacagttagataggaggcataagttctggtgttctaatgcatagtacaatgactagagtcaacaataaatgtatatttcaaaatagctgaaagaggcgttctcgaatgttctcatcacaaagaaaagataaatgtttaaggtgatgaatatgctaattaccttgatttgatcactacacaatgtatacatgtaacaaaacatcatgttttaccccatatatatgtacaactattatgtgtcaatcataaatttaaagaaataaaattagttttagtgtcagtatcaatattacaatattggtattactcttagtgtcagcatattattagcattagtactataagtagtagtagggttagaaagggctatgtactctcccttgtatgcagtaggtactcaataaataaataggggtacttaatatttattgagatttcagattcaagtaagttaagatcatgtaacatgggttaaaactcatttagtctccccagtcactgcatggagtggcttattggggtatattattaccccatttttacagatgaggagctaaattccagaggggatggtaactctcccaaggtcacctgatccattagtggttagggcagtctatgaacgaggatgagctggctctagagaccatctcctgaaaccactgccacttaagtcagaggtgtctttgtattcgttctccttattactgatgagggttcagcatggggcgtggcacaccagcaggagctcaataaataggaattcatgggcttgctctctttcctcctcaaatctcccattgcatatgaggacactgaggctcagaggagtgagataagaatggtaagatccctccagggtgggccagtgggcaagctgaccccactgacctggggctccacccttggcctctgccctttgtaggtctcagtctccccatctgtagactaggtgggcaggacagctccttgtcccacgtgtgcatgtgtgtcagatgctttcatatagaaaaagtgctcaggttaggtacaagtctatgtgaggtctatgagacactgtggttgttgtcattaatatttggaggaggtggggcagggcaagagtgtggggactggggtgcggaggcctagccacattctggttgtcccctgctgagggctgagggcagagccacaggctacatcaatccacatcctcccatcctacctgcatgggcaccacatgcccagggtgtgatccagtctgcctggaccttcttctgagtctgtctctgaatatccctctgtctctgtctcccttctcagttctccacttctgtctttggcctctttccctttcaggttttatctgtcacttctgtccatctctgtctctcattctctctttgcctctctctatatgtctttaatggtctctggttctccccgggtgtctcgccctctttgtctctccttttcttttgtgccctctctctgcctctttccacgtctgtctccttctctattcatctctgtcactctctttctccccatttccatctctctccgcctatctctgtttttgtttgtctctctgcctctgtctctcccactccacccctttcctttcctaccctatcccactcctcgaggaatcatccctggctcccacctcagtttcccgcctccaaggcagcatggcgggcaagaagttgaggccactgtccctgggtgttcctacccccacaccctcaccccaagacagcctgttactgcggcgccaacagccacggtcgcctacatctgataagacttatctgctgccccagggcaggccggagctggcgtaagccccagtggggcgctaagtgagtgtgcccctgcctcccgccagcactggcctggcctgcaggcttagcctgggtcatcaaggtatcccacaggctctagttcaaatccagcagaacctctctgagcctcactcttctcacctgcaaaatgggtacagccacatcccttctctccctgcagccaggaagacgcacatacacaggagtctagcccacaccggccccgcacaaattaagggctttactctctgaaaagcccagtgaagtcatgaaaccatatctgctattttcatttatcttggtttcagcctattttgcttgtctggacactacagtccacgggagcctaggtcgagcgaggtccaagaatccccagggtgggcagggagggtggaagagggcctccagtgcccaagaggtgccccacaagcatgggacccgccccctcccctggactgccccacccactggggcaccagccactccctggggaggagggaggagggagaagggagggagggagggagggaggaagggagcctcaaaggccaaggccagccaggacaccccctgggatcacactgagcttgccacatccccaaggcggccgaaccctccgcaaccaccagcccaggtcagtctcagcccccagagagcccccaccaaggcaaccctgggcctgctgcccctacccttatgcttgctccaggctccccaacccacagctggtccccaaagtgtcagccagccctgaatccctttacagctcctccaacccacctgtctttccaactcccatttctaccccaaatctaccccctaaaccccacctctttctgccctctcatccactccgtccaagatatctatatcctctggatcccttcactttgctcgctatacccctaggtctgtctcccctaaacactaactctgtctcccaaaacatgactttatctccccaaatcctttccctgtcccatatctgatttccactcacccaaacttgtctctgtctccctgacttctcctccaaacctcacttttctgctcccaaaccccttatctgctctacaacgccttgtctttgccccactctctctgagcccccaaacctgtctctgatctgccaaaccctagctccatcctcttaccaccatctctgcctttcaaacccactctttgttcccaatgacttctctctgatctccgcaaaccatttatctctcccaactccctgcctgctcagtaaaatatctttgtcacttcaaacaccaagtcaactccccaaaatctgttctgccgcatgaaccctcatgtctgccttccccaaaccgtatctcagccctaaaacacatctcattgtctccctgaatctctccagctccaagcctttctctactccaattctatcttggcttctcaaactcccctttactagccacattctgtctgcccaaacagatctttgactcctaaactccatctctcctccagaaaaacccttgaactccccagacttttctatgaccctcagaatctgactcccacactacttctcaactttatttctgactctcaaacttcgccccgatcccccaacctcgtctgttttcacaacctattcctgagcccaaaatgtgtctctgaacttccaagctcgtctctgctccacaaccccgcccatatctgcctccccacaaactccatggctacaccccaaacctctctgacttaaccccatatctgaccttcaaattccacctctatctccccctaagccccatatctgccccctagaccttatatctgctcccttcagcccggtgagaccctcccttgagggctgggattggaacgttacctggggtgaggggctggggccgagggagagtggagggtgccagctgctgcctgctgccgccgttggggcaacacttactctagtggggcagctgataaggagctttcatatcccccagcctcgagataaactttatctctgtccggagagtgataactgggggtgaggaggctgggcccctgccatgggaggggtgggcagccctggactcaccaacgtgtgaggtgcaggggttgggggcagtggggctggagggagatcatggtgggtaaggtggagttgaggggatgagggaatagtggtgaaagagtgagcagaagacacacaatgagacagggaagagagggagaaacagggagagatgggaagagagagacagagacacagagacaaagagcaagagacaaaagagacatgaagagaaaggaaaaacagagagagagaaactcaacgagtaagagacagagacagacagatggccggagaaaaagaaggaaagacccgggagcagaaaaggagatagaaatgcagagatacacgcaggtagcactgtgaagaggcagagactaacacagaattagagacagagaggaaagagatggagaccaagatggggaagcaaaacactctcttcagagagcaacagcaggcaccctggggctgagaaggtgttggcggtgggcacacttgtggcccatctctttcctagcataactcccaagcctgggcctgccccttagcctgtctataccatgggtcatgtaagcaggagtgaggggcagtttgaagacagccttctagtctagccctgtcactccaccctacagacacagaaacagagcaggccagcacaatagggccagggccagcattccaggctccttatcctgagctgcatgtggctgggtacggtcaggggtatgggactagtaagaggcacgtggacataaggtcagagggcccaaagagagggaaacagagggaacagacaaacaagcaggaagagtgggagagatgcagagatgttcagagagataggagaggagagggagaaagcaagagtaacagaaagagagagccagagagagaaacatgggaagacagaaaagaagacagaaaatcatcaaacattacaaaagcacagaaagaggtcgggcgcagtggctcacgcctataacctcagcactgtgggaggccgaggtgggccgatcacttgaggtcaggagttcaagaccagcctggccaacatggcaaaacctcgtctttactaaaaatacaaaaattagctgggtgtggtggcatgtgcctgtaatcccagctactagggaggctgaggcacgagaatcacttgaacctgggaggctggggttgcagtgagctgagatcgcaccactgcacaccagcctgggtgacagagtgagactccgtctcaaaaaaaaaaaaaaaagaaaaagaaaaagcacagaaggagaagacaagctatatcatagaaacacagaaagctggggaagctacagagtcagacttgagagggaacagagagtcaggggaaagagccccaggggatagagaagtggagagctagatgacagacacacacaaggcaaaacaggcaaagggccatcccacaggtctcagctcagccccagcccatcaccacccccaatacagcagatggggaaactgaggcctgggaactgaaagagcctgaaagcagaactctggtgggcctctccaggggagagggtaccggtagaggtacctcccacctgccaccctcttcagaggaagtcagtggccttggggtgatttcaaaagttgggcggggaaggcagagataagcagtggggggtactgacccccccccaaccaagaagtagggaggaactaagggggccttctgtctgtagacgcaacagaggtggagggaggagggagtcaagcccggaaaccatggggtttctgagaaagttagagggcaagatacaacagatagggatgaagttggggagcagaggatggtgaaccccaaagtcctgggtgaagtgaccaagaggcaagggactctggtcctgcatgccatcccaccctcacccagactcttctagagggggagggaagaaaggacggggggacggggagaataagaggaagtggaggaggggaggagaggagatggggaaagggagaaaaggatgaacagaaaagggaggagaaggatgaagaaattggaggggaggagaaaatgagtagtaggagaaaggagtggagagtagatgtagacaggggaagagaggccggaagtggtggctcacacctgtaatcccagtactttgggaggctgaggtgggaggatcacttgaggccaggagttcaagaccagcctgggcaacagagtcataccccatttctacaaaaaaaaaacaaaaactagccaggcctggtggcacacacctgtagtcccagctactcaggaggctgaggcaggaggatcactgccgggaggcagtggttgcagtgagccgagatcgtgccactgcactccagcctggcaacagaggagaccctgcctcaaaaaaaagtgtgtgtggatgggggagagggagataaggtgtgtgagaaaggtagaaaaggagaatgaagacaaaaagagaaggaggacaaggaagaggggaaacaggaaaggagaaggaggaggtcaaggaggaaaagaagaaggtggaggagaaaaaggaagcaggagagaatgagaaaagagtggaaagagaaggaaatggggaagaggggggcaaagaagagatgggaagaagagagacgggagaaagacaggaggaaaagggaaggggggaagaagagagagaatggaaggaagaagggagaggtagaagcagatgagagtggaggaagagcgagaggagggaggagaggaaagacaaacggcaagagggggagaacgaggaggaagatgaaaggaggggcacacaggagtggaacggggagatgcaggagggaaaagagaggagagggaggaagagaaggaggggaaggagaggggagactaaggtgaggaggaggggggaatggggaggtgggaaggagaaatatggagactgaggtgatggagtgggaggagggggaaaggagggaagaggagcaggtgaaaggaggtgggggggaaggatttctgtgtctgaggaccccttctgtcctcgcaggttaatccccagaggctccatggagttccctggcctggggtccctggggacctcagagcccctcccccagtttgtggatcctgctctggtgtcctccacaccagaatcaggggttttcttcccctctgggcctgagggcttggatgcagcagcttcctccactgccccgagcacagccaccgctgcagctgcggcactggcctactacagggacgctgaggcctacagacactccccaggtaactccattgagtggctgtcttggcattggctgagtgctgttggggttgccatggagatccttggctaggtcagaataccactgtgaggatatctcagaaatggctggaagcttctcaaatggatgtgccgaccactttccctagttaagtgcagacctgggaattccaatgctcctcaacctgccatattggggcggccacactgagaggcaatactggaagtatgtggtggttgccctagttgtcgagtgatccgtggagctccaaatcccaacagtcatcctcaaaaacccacttggaaatggtcagaggttattgcagaggccacactgaccagtgggggtcaggatccaggaagcatccaatggccagcagctgttctggtagcctgtggaaaagctgggaacttggccaccatgttgggggtgctgggaaccactgcaccctgacgtgcgctgaccctagactgattttgcctcttctttcctccatccctacctgcccccaacagtctttcaggtgtacccattgctcaactgtatggaggggatcccagggggctcaccatatgccggctgggcctacggcaagacggggctctaccctgcctcaactgtgtgtcccacccgcgaggactctcctccccaggccgtggaagatctggatggaaaaggcagcaccagcttcctggagactttgaagacagagcggctgagcccagacctcctgaccctgggacctgcactgccttcatcactccctgtccccaatagtgcttatgggggccctgacttttccagtaccttcttttctcccaccgggagccccctcaattcagcagcctattcctctcccaagcttcgtggaactctccccctgcctccctgtggtgagaaattcaaaaaaggacagggaagttgaggtgggaggggtggcccaaagtaaagctgagctgagcctagctccctcttctcctctccaccccaccagaggccagggagtgtgtgaactgcggagcaacagccactccactgtggcggagggacaggacaggccactacctatgcaacgcctgcggcctctatcacaagatgaatgggcagaacaggcccctcatccggcccaagaagcgcctggtaagaccacagacctgcttcaccttatacacaggaacccctgtcctcaccctgtacaagaagccacatcttcccattatataggaacgctgttctcatgattacaggaagctactgcaggccaccctgtatgggaacccctgtcccaatatcacatggaaacccttgccttcatcctacacaggaaaatctcctcatcccatatggaaatccttgccctcaccctgcatgagaactcctgccctttccttgtacaggaacccagatctatagaagctcctatcctcaacctacccttataagcttcaaacagaaacctttgtcctcaccctgcacaccagtgttttcgtccttggcttcacactggaatcaccccaggtcccttctcccagatgtgctgatggaattggactgggatgctgcttgggcatcaggatattttagctccccaagtgattccgatacgcagccaaagctgagaaccaccaatgtagtcccccatagaatacagaacaaaagaaacttataccagataggaacccctgtactggccccatacagaatcctcaggcatcaccctgtaaacaaagccctgccttcaacctgaccctcacttcttgggtcctcctgacatcccctgtgagccccttacccccacttccacatccccagggcactgatctcacatcctgtcgtcccctagattgtcagtaaacgggcaggtactcagtgcaccaactgccagacgaccaccacgacactgtggcggagaaatgccagtggggatcccgtgtgcaatgcctgcggcctctactacaagctacaccaggtgacgccctgccccttggagccacccctctgctttccctgtcttcatgccacactgccccccactctgttcctgttctacctctctcttcccccacaaccctctttcctctttcccctttccctccttcctcccccttcccccatctcttctactttcccccttcctccatctcttctactttcccccttctctgttattaccctccctccttccttctccattccctcctcctccgccctcctccttcctctcctctcccccacctccaggcatcagctaatgtccaaccccctgccctagaccttgggcagctcctatcagccttggaggctttcctaagctcagggcctcacagcctcaggattccttggacaatctcagcacccaaaaattatcttaccctgaaagaagtggggtagagagggtgtccctggttgacacagagaggcaaaggtctggagttggggacacccgcagcctcctttttggcaggtgaaccggccactgaccatgcggaaggatggtattcagactcgaaaccgcaaggcatctggaaaagggaaaaagaaacggggctccagtctgggaggcacaggagcagccgaaggaccagctggtggctttatggtggtggctgggggcagcggtagcgggaattgtggggaggtggcttcaggcctgacactgggccccccaggtactgcccatctctaccaaggcctgggccctgtggtgctgtcagggcctgttagccacctcatgcctttccctggacccctactgggctcacccacgggctccttccccacaggccccatgccccccaccaccagcactactgtggtggctccgctcagctcatgagggcacagagcatggcctccagaggaggggtggtgtccttctcctcttgtagccagaattctggacaacccaagtctctgggccccaggcaccccctggcttgaaccttcaaagcttttgtaaaataaaaccaccaaagtcctgaaattgtgggtgtgtctatgtgtggctgaacagcagagctgagtggagtgtgtaacaatgcctgtggctctctgatgacagtgcatggctgcaatgtgtgaccatgtgaggctggctgaggcggcacatgtgacactttgtgaccaagggttatgttgtgtgattggaacaatctatgtgaaacttcttgtgaagtgtccaggtggttccatatgtcatggtaagaggccacgcagggcttgctgacggtgggggtggtgccgggtgactataagcacactggaagtgtgtgtgctggagcaggtgataaggaggtgtgcggggctgtggtcttgtggctgggcatgacgctgggggacctttgagacggcatgacgctgggggaccttttagacagcatgacagcatacgtggtgggcacagaatctggtaaagattcttggaatgttgaacaagaagtgtgtgtcaggatgtgtttgtgggtctggcgatggcaatatttcagtgcaagtccctgtgcatgggcatgggtgtgcgtgtgtgtgcattacgtgtggcatgtgccatgtcacagtgtctctgagtggctgacaacatgagcagctctgtgtacatttgtttgtggaggtctcaacagcagagtttcagagggtataagttagggactctcttccaagggacaaaagacacattcaggaaaggaacacggagaagggtggagctggaatggtagctggcaaggtcagaggccagtgctggggcgcagggttgtccgtgggtcttcctgtcggactggtcttatcttgctcagcccagctcagcctgcagccctgtgggaaatggtagagaatgagagggggagattagggggacaaagcagcccctggaggtggtttcaacctcagtaggtggggcgctccacacagtgccaaccccttccccaacattcccactcacctgggtgaactgctccccccacagcggagtctgttcctcaatttcacaaacacacaggagcataatctgagtcatgccttaagcatcctaaggcagactgcttaagtggctcaatggaggccacacagccagtggcaaggggcccagcggggcagtctggcctggtgtccatgtgctcagccacaccccacagccagcagcaccctttcctaagggctcactgtgggtcaggcggcaggctgggaggctccagttgctttagttcattagtgcctgaaataaatattctgaggaaaatatacccatactcatttcactaatggaagagtgaggcccagaactgatgagtaacttaccctgaccaccaagtttaaggagtggattttggatggggtgacacacccagcccagcaaataagtgctgctcacacttaaccgctctttatggcttcttccctagagccccggatatgggggttgcagggacccacaggtcctgaccatattataggtaagcagctgtcctccacagaacaccagcccatcagctagcgggcattccagctccactaagtagcctgctgcagaatcacaggagtctattatgctcactgtgggcattgtccacaacagccctgatcccataaaagacacgtgtctggcctcccctcagaagcccagccctcacaccctgcaggaggccccatcctctaaaaacccccttcagaacctgtgctggacacatgcctggccccaccttgttcaggagccccgggcctcacccccataagtatagctcccccagcctggtacagaagactagctctgaagctctaggggagcccttcatctaattatcgacaggaaacccatcctgatcctgtacaggaatgccagcgcttaccctgaataggaggaacctctgcctaaccccagctagggacatctggactaagctgtaaggaagcccctgcacaccctggacaggaacccttgtcctgaccatccacacaagcctcagtctccctatacgaatcctgtcttgacctcagacaggaacacctttgtactcacactgctgcagtcctgtcctccaggtagcattttaaaaacacctcactcacaataatctgagtagtaaaccatggacccagctctgtctttacagaaatccctgtcctcaacctcttcaaggaccctgactgtgtgtggaacctcttgccttcattgttgacaatgatccctgatgttgccctgcacaacaatccatgacctcacaccctatcccatagagtccacaggaacccatgatccaactctcaacatgaacctcagtctttaacttgtatagaaaaccacttcctgaccttatggcaggaatgcctgtcttgaccatttactttaagccctgacctcagcctatacaggcacctatggcctcacctgatacaggacccccccttctcactatataggtcgcatttattgatgctgcacgaggctcctgggccttaccttgtattagctccactaccctgaccctctacagcaggggttcccaacccccaggacacggactggtactggtccatggcctattaggaattggtccacacagcaggaggtgggcagcaggcaagcaagcattaccacctaagctccgcctcctgtcagatcagcagtggcattagattctcataggagcacgaaccttattgtgaactgtgcatgcaaggaatctaggttgcgtgctccttatgagaatctaactactccctgatgagctgaggtggaacagtttcatccccaaaccatcccccaccatccgtggaaagactgtcttccacgaaaccggtccctggtgccaaaaaggttggggaccgctgctctacaggaagcctgaccctaaaactgttccaggacttctgactggtctctgcagaaagcctttgtcctgaacctcaacagaaatcctttacttttacagtaatttatttacaggaatctctgtaatttacaggaatctctgatctttataggaactcctagctttactctctggaaatacactgcttaccctgaacaggaagcttaatgtgattctctataacagccttttccctggccttgtcccagaagccccacctgcaccctgtacaggaaccactgccctgacccaacaaagaaacaccgacctgaatctctgaaggggcagtgtcctaactacacagaggatctttgtcctgaacccgcacaggaacctctattacccccagcaggaacctgtgccctgagctagcacagaaaatcctgcccttacactcaacaggaacctttgatttgcctctttagagtaatccaaagaatgaaccagtataaaaaacctctacactgtacaagaacctctgttctgtacttgttaaacaacccataatcagaatcaccatgaatacctgcctggagactgtacaggaacccctgacctaacccccaatggaatcacctgatctgtctgtctctagtaacacagctctgatcctggacagaaatacctggcctgagtacgctgtgatcctctggcctggccgtctacagaaaaccactctcctggcctcaaaaggaacacctaaccttaatctgtatgggaaaaaatgccttcacagttttccctctcactttacaatgtctccaacctttgtatttccctgcaaacctgccttaccaggtaacagaatcattctcctgaccccagacaggaaacactaacctgacccagagatgctcctacccctacacagtaagagtccctgtctcaatgctttaaagagaaatttctatagcagtgctgtccaatagaaatatgtgagtcacacgggtaattttatattttcaatgtagccacattaaaaagagaaaaaaaagataaaattattttcaataacatcaatatacttaactttacccaatatattcaaatattattttaacatgtaatcaatataaaaattactgagctattttaaactttttatactgagttttgtgatctggtgtacatttcacatttatagcacatcatctcaagttagactggccacatttcaagagcagtagccacacgtggctggtagctaccatataggacagcataggtctgtggagtctacggaaccctatagcagacactgctataagctcattgagacctgttcctgttcttcctgagctcactctacctattccagcctcctctgcagatagatgtgggcacatgacagagttctgaccaatggagtatgggcaaaagtgacatataccagttccaggcctgacccataaaaatctctcatgcaatcctccatttcctctctttccctgtctaccaactgaaaaccaactaactccaaggacctagaggaggacagagtcacaaaatagagtttgcctgggtccatgaatgaacagtagtaaatattcagattggcttttgaatgagcaagaaataaacatttattcgttaagcccctgaaattctgggttacagcagctaggataatttagcctaattaataataatctctccccctctctctctctccttttttttttttttttttttttttgagatggagtcgcccaggctggagtgcagtggtgcaatcttggttcactgcaacctccgcctcccagattctcctgcctcagcctcctgagtagctgggattacaggtgtattagcccggctaatttttgtagttttggtaaagatgggatttcaccatgttggccaagctggtctcaaattcctgacctcaaattatctgcccacctaggcctcccaaagtgctgagattacaggcgtgagccaccacgcctggccagtaattttttttttttttttttgagacaggatctcactctattacccaggatggagtacagtggcacaatctcggctcactgcaacctctgcctcccctcccaggctcaagcgatcctcacacctcagcctcccgagtagctgggactacagatgcacaccaccacacccagctaatttttgtgttttttattgagatggggttttgtaatgttgcccagctggtctcaaactcctgagctcaagcaatctgccctcctctgcctcccaaagtgctgggattacaagtgtgagccattctgcctggccaataataatctcttgaccgaaatctagacacctgatctcactgtctatatgaacacaagctctgaacctatacagaaacacctgtgacccagtactggcccacctgatctctttgtaggaagctgtcataacataggtctaagaagccccatcctggccacgaatggtggctcacacctgtaatcccagcactttgggaagctgaagcaggcagattgcttgagtccaggagtttgagaccagcttgggcaacatggcgagaccccatctctataaagaaaaaaaaattaggcaggcatggtggcatgcacttgtagtcccagctacttgggaggctgaggtaggaagacagcttgagcccaagaggttgaagcagcagtgagccgtgttcacaccactgcactccagcctaggcaacagagtgagaccctgtcccctgtatcaaaaaacaaaaacaaaaaaacaaaaaaacaaaaccttaatccttaacttgcacaggaacaggaacccatagtctggagctctctagaaacccctgcttgattcagtaaaggtacaatatagaaaccataggaatccctgtcctcattctgtccaggaacatttggaatgacccaccagaggtacactagaagtgacctgaccctgcccatgaatccctgtcctcacacacctcacacaaaaggaatacctctccttaggaaaaaaggcccctaccctcaatcctgcaaaagaataccagccagatagagaccaaggcctgacactacagcacagatcggcaaactatggcattcaagccaaagccagactgtgggctgttttacatttttaaagggttgttttttaaaaagagaaaaaaagaaaaatgccactgagaccgtatgtggcctgcaaagcctaagatgtttactctctgtccctttataaagtttgctgacccctgctcttcagaaacctctcttctgatccaacagaaaaatgggccttgaccctttgcaagactccctactctatcaggctgcaggtatcagaactctagaatttttttgtagtgtgttatcattgtatgtgttttctttggtgagtgtaggggtttaaaggtcttaggtctgcaactcttttgcgctgagacaaaagataggttcacgtaggaggggtgagagggaagaggcggcaggacatcttcaagaggatcagagggcaaagctactgggcggtgagaccgtcaatctgtcagtctgatgcagaacccccggactgcttatctctccggtcccagcttatagcccggtaggaaatggtggagaatgagacagggagattaggaggacaaaccggcctcctgcagagctgacatttagacatggagtgggagttgcgggggagagggggtgcctagggacagctccccagacgcacacacactttctattactgcttgggagcagtggttacccgttggagggggcagatagggagagctgctgcccatgagaactcccatcctcaaggccattctggccctgggcactattattatcacaactttccagatgaggaaacggagcacagaactgttcagcaacttgcccaaagtcacatggttaagtcccgtaacctcagtttccttatctgcaaagcagccttaataatgggaactacctcatagaattgtggtttacaacgatgcctgtcacataatacttgctatcattaccattccctgcccccactaagactccttccactcagaatattgcggcagaatattaatagctaatattcggccagtgtttcctgtgtaccaccatagtgaatattaactcggaaaatcctcacatttagcatcgtcaccacgcctattttggccgccaccaccaacgtccagtggcaacctcgctctcggcccagccacaaccagcccgcccgcgctacgtcatcacggcgcgtcgcgcgggaagtcgcggggaaaaggtaagatgccccttcctaattccctcgcttccttgcttgctctccagacaccgccgacccgaagggctcctaagtgactggacagggacggaggggcggcggctatggcatccgggacgacagcgacgatagccgaggcaagaaaaagcttgcaccgcagccctgtcgggaaccgccggcgcctgccttttacgtaggcgcagcacagctggcgtagcacgccgacgcaccgccccgtcgcctgtgagctcgcggtgtggctcagcccagctggcgtagcacgccgacgcaccgccccgccgcttgtgagctcgcgagaggtgtggctcgcgcgaggggcgcggccttgaggcacggtcccctctggaggcgggatctgggcgggcagtcgagagacgaggcccaatggaaaagaaaagcctgagcgctcgcgtccccacaggtcgccagaaacttggtggagcgagccaagggcggagtttgagaaaggggctgcgtccaatgagtggagcggtgagtacagcgcgtcgacggcggaggcgggaagggggcggaggccgaccgaaggcggctagggactggctgaagagggttagcgaaacgttagcggtcgggtctgggcagggggtggagctggttgaaggaacggggcagtcccctgaggagcggggctggttgaaacgctaggggcgggatctggcggagtggaaggtaccggtccggcccgataaggggtggagttaagtgaatcgttaagggtggagtcgaaaccggggtcggggccggggccggctgagtgaaagggtgggtgattatcccgggagataggccgaaagggcaggttcgtgaaggaatggggtctgggctgggcttagagggtctgggaatggggcttaggagagtagaaggggcggtgattggttggaaagggcaggccctaagacggactgtgtgagcccgggggctcattgctccgtgaaagggcaagaccagggaaagagaatcgtgtaaaaggggtggagtctagcgggccgggcggggccgggtagaatggccacctgagtggagggagaaggcctgagagaggcggagtttggaaggctgtggagaatcagatcgcgtaaggaatggaatctaatagagggggcggagcctggaaaagggcagagaggtggggtcctcagggcacactagccccctcacatacccacgctcctccccccacccccagaaccgcggcaggggccaagcctcctcaactatgacctcaaccggccaggattccaccacaaccaggcagcgaagaagtaggcagaacccccagtcgccccctcaggactccagtgtcacttcggtgaggccctagacccgccctgatgagggggagagggagcaagttggtcatgccctggactctgacccttctctctgattcacagaagcgaaatattaaaaagggagccgttccccgctctatccccaatctagcggaggtaaagaagaaaggcaaaatgaagaagctcggccaagcaatggaagaagacctaatcgtgggactgcaagggatggtgagcagggcctggctgcagtttagcctcgtatgacaatcaaaacccaaaggttccccaccctggacagttccctctgactcagggcctaaaatggatctgtgtctccttttttttttcctctgcaggatctgaaccttgaggctgaagcactggctggcactggcttggtgttggatgagcagttaaatgaattccattgcctctgggatgacaggtgaggctgggtcctccaggctgtctccaaaccacaaaaatacacacacttagagcccattagcaagaataaatcttttcttaccccagcctggatactggaagcagatgatttggggaggtagggctcacacttgaaagggttcttttatgtagctaacaaacatttattgagtgcctattgtgtgccaagagttggtgatacaaatgtaccaaacaacagacaggggtccttctctaggagcggattgatgagtaggagggcagatcattaaacagccaacagcagtatgaggtgtttaatgaagacagacttaagaccaggggattcaagggtgtataatagaggatcctaaactagtatccgggcttcccagaagcctttatagaggaagagacgtttgtactgaaacagaaggatgaaacctcccgtttgctttacttttcaaaaagaatcagcaaatccttttggctatatgttcaaaatatattcaccatctgacctctcctcaccacctccactgccaccatcatcatcactcacctagacttgcagaggcctcctccctggtcccctacttccaacctcacctctattatctgttcatgcagcaacctaaaaaaatatgtatgagttgatgtctttgttaaaatactttaaggaggccaggcatggtggctcacgcctataatcccagcactttgggggggccaaggcaggtggatcacttgaggtcaggagttcgagaccggtctgaccaacgcgatgaaacactgtctctactaaaaatacaaaaattagttgggcgtggtggcacacacctgtaatcctagctacttgggaggctgaggcaggagaatcgcttgatctgggaggcggaggttgcagtgagccgagattgtgccattgcaccccagcctgggcaacaagagcaaaactctgtctcaaaaagtaaaaataaaaaaaaaaaaagtactttaagggcaaactgttgccctcaaggtaaagtccaaatttttcatcctggcctcaaaggttccacatgatctggctccacatcactttgtgacctcatcagccaatccttctcgcccacactactccccttgttcttccaacatgccaggcaccctcttgcctctggtctgtaccctgaccaacccctttcccagagattcttttcggtcttctactcttccagctgcctttcacatcccaatgagactttctcagagaaggttttgcctggccaaaccctaccccaatacctgatcttattttcctagcccatgacattgtttgctaattatcatacttgtgtgtttaccaattaatatctatatcccttatcccaacctaagactaacttactatgggaaaaagacttcttttatggaatacctatttaccatctattgaggagctagggatacagcagtaaacaaaacaaacaaaagcctgtgtcttcagggtaaagggggaagacagacaataaataaacaaaaagtaaatgatgcactgtggtagaaagagcagtgttatgaagaagcagtaaagggaggatagtaggagaaagtacagtggaggagacttcaattttaaataggctggtcagggaaggcctcactatttgagcagggatctgaagaggtgaaggagtaagtcatggagacagttggaggaagagtattctaggcgggggtgggggggccagctagagtaaagttctagggctggctgaagagtatttggttcaactgagaaccagggaagagaccagtgtaggtgaagcgaagcaaaggaaagagggaggggtaggagatggggtcagagaggtgatggaggacagattgtttagggccttctgggcatgggtaatactttggcttttactcagaatgggatgggagcctcgaagggacatgaactgattagggttttaaccagtgtctagctgctatgcacagaaaggaccgttgaggtggcgagggtcgaagcagggaggccgaggagatgccgccacagcccaggcgggagggtatggtaatagcagtggcagtggtgaggagagggtcacacaccagagctgatgggaggcaggactgacaccacagttttggggtaagcagctgtggaagggtggatggggagatgtggagagaacagatgtggagctccccagtgtcctcatgcatctgtgactgtgactccatctccccagcttcccggaaggccctgagcggctccatgccatcaaggagcaactgatccaggagggcctcctagatcgctgcgtgtcctttcaggtaaggcccccaagccaacactctgggtgaagggcagggagctgacctgacctgggtgcagcccatgccttaaccctttaccccactttattcctcatctctccccaggcccggtttgctgaaaaggaagagctgatgttggttcacaggtgaaggcttgggagccttgtagggatggggaggagcctgccctggacaaaccagggcaagctaaacgctttgggaagcaatgtcatggtctctgcagccagccttgggcaagtcgctgagcctttctgaatctgtgtcatcgcctgtaacaaggggaccagtaaacataagttcctcaggagagtttgatgtgtgtcaggtgcttagaacagggcctgatatataatcagcccatgatgagctattactgttatcatgatctgattgtgtgaatagatggtggatgtgtggacagagtgatcggggttcccccaggggcttccagatttagaggcctagtgctatgtggcttgaggaaagctagcttccagagcaggtatctgagctgaactttaagaggagaaaaagagtgagtcagatgaagagggtgactgagggaagggaagaacagacagctgaaccagtgtggccaaaggcctgaaagtaggatttggtgtggctactgcaggggagcagagaacattacctgaactgaggcgggctagggaagaaacagaatgtgtcttatatcctggctattccttcaggttgacagttgggggagccaagccctaatttgaccagggggttggtgtatggacagctcagttggggaagagacagggccctgaatctcatctcccatctgtgtctagcctagaatatattgatctgatggaaacaacccagtacatgaatgagggagaactccgtgtcctagcagacacctacgactcagtttatctgcatccggtatggatgagaactctgcgggcagggaatggtggcaatcttggggtccccatccctatgcccaccccaccctgggggaagcagctgagtggatagggctgttctctcccttactccctttctggctccccactgtctctccagaactcatactcctgtgcctgcctggcctcaggctctgtcctcaggctggtggatgcggtcctgggggctgagatccggaatggcatggccatcattaggtaggactctacagcatttgactttttacattgttttaaagtccttccttcaagtgtaaaatgtattgatatgggtaatatattcatgtgattcaagaatccaaaggtaaaaaagagaatataattaaaaatctgtctcccatccttgtcacccagacacctgcctcctctcatgggaggtagtcattggaaccactgactcatgtgtcctcccacaaagtcttattcaagaaataaataccatatttcattgattctaaggtgtacattttttcatatttgtaacatcttgaaatccagatgcatcttacaaacagtgacatctcagaattccattggcagtattttctgcttcgtttttggcatgtaaaatcatggtacatcttatcatcattggcatcccagaactgatgaaatgcaaaagctttctcctccctcccctgtttttaaccacaaatggtagtaacatgacatactcccttcgtaccatcttttcacttacacatcttggaaacctttctctaacagtatgtatcttggagcccggtagaacaccattgtgtaaatgcactctatgttaatcagtccccgactaatgggcattttggttctccccagtcatttgctgttttaaaaaaatgctacagcaaatatgctagtacctttataaaaataaaattttattttacactaacataaaataaaaatgttacttcaccctttttaaaacacaggttgtgggctaagttcctgcagcagaatgactgggtatgagaatgaatgcgttgatcattttatttttatttttatttatttatttattttgagacggagtctcgctctgtcaccaggctggagtgcagtgatgcaatcttggctcactgcaacctctgcctcccaggttcaagtgattctcctgcctcagcctcccaagtagctgggactacagtcgcccgccaccacacccagctaattttttgtatttttagtagagacggggtttcaccgtgttggccaggatggtcttgatctcttgacctcgtggtccacccacctcggcctcccaaagtgctgggattacaggcctgagccaccgcacccggcctttatcattttagtgaacattttcaaatctcctttggagacagaggggtagattggcagggggtgagagtttgagggcctccattactcagttcccggcagatttttaggcatcagcattaaaggaattggtggtccaggattagagagcaggggacagtctgtctctgcagaggaggacccctcacatactccaagctgttatttccttgtcttgcccaggcctcctggacatcacgcccagcacagtcttatggatggctattgcatgttcaaccacgtggctgtggcagcccgctatgctcaacagaaacaccgcatccggaggtcagcaacagagggcagatgtgatgggggtggcatggggtggggtgtcctggtctgggctcttcccccagattcaccttgatctccttgcacagagtcccctctctctgctgctcctagggtccttatcgtagattgggatgtgcaccacggtcaaggaacacagttcaccttcgaccaggaccccaggtataccccgactcccacctaggtgctagactcccagccacctcccacccttacaggcccagccagaaggggtccagaaggaggaaaaggcattcacattcatggggcctatcctgggatcaggatctgtgctacttttgtgtgtctgccatctctcctaatttcactctgaggcagggactgttgggttccctattttacagatagggggactgaggcttatacgttaagaggtcacacagagaagaactgggagagacgggatttgacccacaaatatttgaagatcttattcactgattaaccgttgggttagagtgaacctcaaattactgctttattttttctgattaggataatgcttcaaagtgtttgtttatcctttcagtagatagtaaaaaacaaatataaataaataaataacaaactatttgtttaaagaaattaaataatacagaagtgtctgaagcagtgagtctcctctaatttccattacctcaaaaataagtgttgacagtttaggttatatccttacagattttctctatagatgtctgaatttttattattattgttataattattaataacacactgcctaatggaataattctccacatgttcttcgacaacttgctttattcatttaacagcatatctgggacatttctccatgttagtacctcttaaagtatctcgttctttgtagtattcaattttatgactgtacctctggttatttaaccccaggacttttaagatgcctgccagtttttgctattacaggcacttctactgtgaatagtctagtaaatatgtaattctgcacttctctgagtctatctgtaggatgaatttctaacagtgggttgcttgggccagagagtcagcatactttaaagtctggtatacactgccagacttccctccaggaggggaccagcttacccttcctgcagaaagtgattgagcaagtccttgtcagtaggagacattactaagtacatgtcgagtatcccttatatgaagtgcttggaaccagaagtatttcacatttcagattttttcagattttgaaatatttatattatacttagtggttgagcatccttaatctgaaaacccaaaatccgaaataccccaatgagcatttcctttgagcatcatgttggccttcaaaaagtttaggattttagggccgggtgaagtagctcactcctgtaatcccagtactttgggaggccgaggcggatcacctgaggtcaggagttcaagatcagcttggccaacatggtgaaaccccgtctctacaaaaatacagaaaaattagccaggcgtggtggcacacacctgtatttccagctactcaggaggctgaggcaggagaatcacttgaacccaggaggcagaggttgcagtgagctgagatcgcaccactgcactccagcctgggtgatagactgagaccccatctaaaaaaaaaaaaaaagtttaggattttacagcatttcagatttcagatttctagattagggatgctcaacctgtagtagttttatctagccttcttcctagctgactacagagaatccacttatccaagatctgaagaatccaatttaggttggttgttctctagacattgctttattattttgcagcattcagtgttcctgacaggtgtctgcttttcattcctttccaagtaatctactttcctctctgcaaggttatcttggtgttcttttttttttttttttaaattattagacagggtatcactgtgtcacccaggctggagtatagtagcatgatcatagcccactgtaacctcaaactcctgggctcaagcaatcctcctgcctcagcctcccaagtagctaggactgcaggcatgtgccaccacacccagctaattttttaaattatttgtagagacagggtctcactatattgcccagactggtctcgaactcctgacctcaagtgtcctcccactgcagcctctcaaagcactgagattacaggcatgagccactgtacctagccttgatgttctaaacttttaccctggccttttcactctgtttaatagtaggtagacattttacatctgaagattcatgcttttcttaaactcttggaaattattttctattagatctttgataatttcttctttgttttctctgttctctttctaggacttctgttagtcagatgttagacttcctgggttgatcctctatgtctctctcttttttattatttatttatttatttatttatttattttttttgagacaaggtcttgctctgttgcccagactggagtacagtggcacaaatacgactcactgcagcctcgacctcccgggctcaagcaatcctcatgcctcagcctcctgagtagctgggaccacaggtgcacaccagcatacccagctaattttttaatcttttgtagagatggggtctcaccatgttgcccaggcttcttattttttatcttatgttttctgtctcttttttcttttgctgtgacctgggagattttgtcaactttatcttcaagcccttctgttgaattatgtatttagatatcctgttaaactccaaaagctctttcttcctctctgtttctatgtcctctcatacctgatcttgtttttatagagtatggattagaagtgccggctgggtgcggtggctcatgcctgtaatcccagcactttgggaggccgaggtgagtggatcacttgaggccaggagttcgagaccagtctggccaacatggtgaaaccccatctctactaaaaatacaaaaattacccagacgtgatggtgcgcacctgtaatcccagctactcaggaggctgaggcaggagaatcgcttgaacccaggaggcggaggttgcagtgagacaagatcatgccactgcactccagcctgggcgatagagggagaccctgtctcaaaaaaggaagtgccttaagtttcttctgttgtctgagttatgtctctttattctgaggctggttgaattatttttttcttggtccttctcttttatgctgatggttttcctcaaatgtctagcaatccttatttggctatttatacccaagaatgaaggcccattgtagggggctgtcagaggactactctgctgcagtgtttgtaggtctgttttcctgaaaggcatttccccagaatggggacagggaatgtccactgacaggttgcaactttagcgagtgtgggcaaggacccgggcattagatgggatcctgccagatgtcagaacaaaggaggcctcttctttggggtaacatctcttttttccctcagcctttccaaagtgtatctgttgtacttatcttttccagtgtagctttgggctttgttggtcatctctactgttttattatggtgggtttttaatacttcattaatttttctggttttatctttattaatgttttcctccgacgttctttattttgttcatttctggcttctggaatttaatgcttcaacatttatcaactcattggccgatctcatttcatctatacctgtacccactgccctcttcctgttttccttcaaagctaatcccagataccatataatttctcctgtaaatatttcagaatgcatctctaaaacataagtacacttttttagaaaagcattaccttagtatcaatacctgaaaattaacaataattatttttttaatctgccaagggtctgtcattcaaagaattctttaatatcattaatcattctttttgtttgaataaatgcataggaggctatagctgtgtgttctttcatgggtacactattgattacacacacagatgtgaaacactgtgaatatattcagtgcattcttccttattaacaaacgtgtgtaaacaaacaaacaaaaagaacatgtccatgcccttggatctcccagctccccatctctcagtctctgaactccagcagcagggagacaaactggataatccttaaaatactgttgtgaagacaaggaaagcagatgatctaaaactaagtagttaaaagaaacaagtaactttgttgtattggtgattcagtgagttggctcttcagaagggattttgtgtgcattgacctggatctgtactggatttctccagaaaggaaacttcagcttatcttgggtgcccccttatcctgctcagcatgagacagagcaccctggggcccctggaatctcaaagtctactttctagaaattcattgaagtctcttattctctgacatcctttccactctctctttctgggttgctgtttgtttacaatttctttactgtattttgaatggggtagtaggaggttgaggaagtaaacctgtgctatcaatccaccatttaacttgaaggtggttgaacttattttgaatttcccttctgttttctttttaaacttagcttgagtgctagttctgctgtttattgactttgatggctctcttttagagtcagctttcttcagatcttttctttcttcctgtcttccccaatgatatttttttcttttcctttctttttttttgagacagagtcatgctctgtcgcccaggctggagtgcagtggcccgatctcggctcactgcaacctccgcctcctgggttcaagcaattctcctacctccacctcccaagtagctaggattacaggcacgcgccaccacgcccagcaaattttttgtatttttagtagagacagggtttcgccatgttggccatgctggtctcgaacttctggcctctagtgatccgcccaccttggcctcccaaagtgctgggattacaggtgtgaaccactgcgcccagccctctggtgataatttttatgtcctactgtgtttctcttcctctaatgattaacttactaaaagtttagaaccaagatttatctatcaatgtcaaaaataaaacaatcatcctccacctactcaacaccagagcttttgcttgtttttattccccaattccaagctcttttccctcaattttaagaatctttctatatcacttgcattaaatttcacaactacattatcaacccattaaaatgtgactcttaagtttgtctagattcaatgcataccactatttcttgcatttccctaaaaaagctgccttagatcctctctggaacaaagcagggggtaaatgaccagatagaaggatggatggatgatagattattcattttgctttccccagtcagaattaagccctcccatggccccttgctgggctttctgtcaaaacacgtgcatcgcatcttttcagtatctgttttgcgtgtcggtcatactcacccctctgagtgctcattctctcgcctataaaatagaagaagtagtagaggtggcctgtaaggcattggggaggaggaactgccctttcactggcctcatgacagccccagccagcacccccgctctagttccacccacagaagcaagtctcacccctaccccccaggtctctccacttcctgctagagaatcacccagctccccagcctggcttgaggctcttttcagccttagctggctccccgcagctaagagccccatgctccatttgggcctccagtgtcacagggtttgacctgctgttactactacctttgtcataggggcaggtagtgggcggacatgatctagagtaccccacagagtcaggagcccccatgatctgagatagaccctagagctgagcctgaaattgggtgggcactgagggggcagcgatgtttgctgagggagaggttctggtgagagactaaatgaatgagcgagtgaggtaatggataaataaagataagaatgaaaaaatggtaagatgattaaattggtgactgaatgtaagggtaaattaatggaagaatggattcatggattaaataattaatggggaaattaatgaatgagagaatgaacgagtggttgaatggggaaatgagtggtagaggaaactggcaactgttgggttgggggtgtctatggggattgacttctccaactctcttacctctttttcttctgcccccagtgtcctctatttctccatccaccgctacgagcagggtaggttctggccccacctgaaggcctctaactggtccaccacaggtttcggccaaggccaaggatataccatcaatgtgccttggaaccaggtcagcatctacccacctctgcccccaaagtgaggcccagccccgcccttctgtcagcggctcgggacaggtggctgaacatcccccatcacactcctgtgtctgcaggtggggatgcgggatgctgactacattgctgctttcctgcacgtcctgctgccagtcgccctcgaggtcctggggatctggggtgtgttgggaggaggagtggccttgaaggttaggctgtgagggtaggtagcctcatggagtctgttcccccttcagttccagcctcagctggtcctggtggctgctggatttgatgccctgcaaggggaccccaaggtaaggcaggctccctggggcggcaggtgggttgcatggagccaggctgaccctccatgtccccccagggtgagatggccgccactccggcagggttcgcccagctaacccacctgctcatgggtctggcaggaggcaagctgatcctgtctctggaggtgagtgactcaccttcgtccctcagcctgtggatcctggagggcttaagaacgaagctttcaagtccaacaggagttcctggcccaggaattcacttactagctggacaaccttgcataagtcacttcacttctttgtgcctccgctttccttctataaaacgagcataatgtaatcacctcatatcattgtccagtgaattcagtgaggcacccttctaagttccttgttgcttgacatgtggtatgcactctcttattatcatcattattattattccctggtcatgtctggtcctttcctgatcccccttcacaactccttgccccagggtggctacaacctccgcgccctggctgaaggcgtcagtgcttcgctccacacccttctgggagacccttgccccatgctggagtcacctggtgccccctgccggaggtgagccccggtggaggaggggaaagcgggagcctcactgcccgcccacattccttgacatcatattttctccctgccctgcagtgcccaggcttcagtttcctgtgctctggaagcccttgagcccttctgggaggttcttgtgagatcaagtaggaagtggggtgtgggcctggtgtggggtggacgtgggatgagccctgggggagactgtcttcagacttcctctgactttactgggctgccttggtgggagagggtcaggccctctctctctccctgggccctggtttcaggcctcccacccctttttctgtttgggtcacctgagttccagagtatgacggggattcagattgagagggtaggacaaacgtggcctcccccttttagctgagaccgtggagagggacaacatggaggaggacaatgtagaggagagcgaggaggaaggaccctgggagccccctgtgctcccaatcctgacatggccagtgctacagtctcgcacagggctggtctatgaccaaaatatgatgaatcactgcaacttgtgggacaggtaggcatttggagggctggatgagtaggtgttgggggtccctccccctcaggcactaagcctctacctctcgtttccccactgctagccaccaccctgaggtaccccagcgcatcttgcggatcatgtgccgtctggaggagctgggccttgccgggcgctgcctcaccctgacaccgcgccctgccacagaggctgagctgctcacctgtcacaggtcagaccccggtgcctggggtgggtggattcccaggactgtggatgaggtctcaggggctggaacttgggtttcccctcctggggagctgctgcaggacttgagaggggctgaagtccctgtcttaggggtggggaccagggaggggacagaccctcctcactgtcctgcgggtgctcctctctgtgcttccagtgctgagtacgtgggtcatctccgggccacagagaaaatgaaaacccgggagctgcaccgtgagagttccaactttgactccatctatatctgccccagtaccttcgcctgtgcacagcttgccactggcgctgcctgccgcctggtggaggctgtgctctcaggagaggtgtgtcctctgtgggctggggagaggaggacctggggggaatggaaaaagagagccatctgctgtttctggaggctctgagagagtcaagcagggcctgaggaaaggggccatggggaggggcacgggagggggtgggcctagaggctgggggaataatggaaggaactggagaaagggaagggtggccaagtgcagtggctcacgtctgtaatcctagcgctttgagaagctgaggtgagctcaggaggtcaaggctgcagtaagccatgattgcaccactgcactctagcctgggcaacagagtgagaccctgtgtcaaaaaaaaaaaaaggtccgggcgtgatggctcacacctgtaatcccagcactttgggaggccgaggtgggcagatcacgaggtcaggagatcgagaccatcctggataacatggtgaaaccccgtctctactaaaaaacatacaaaaaattagccgggcgtggcagcaagcgcctgtagtcctagctactcaggaggctgaggcaggagaatggcgggaacctggcaggcggcgcttgcagtgagccgagatggcgccactgcattccagcctgggcgacagagcgagactccgtctcaaaaaaaaaaaaaaaaaaggaagaaaggaaggtgagggcaggctgtccgatcttagcaccctgctgcttcccaggttctgaatggtgctgctgtggtgcgtcccccaggacaccacgcagagcaggatgcagcttgcggtttttgctttttcaactctgtggctgtggctgctcgccatgcccagactatcagtgggcatgccctacggtaaggactccctggggaccccccaaatcctgatccttgtggggacctggatgctccccccagcccattgtttactcatgccccatggtccagctcccaggacttccttccccagaaagaagtaagggtgcagtccttacccagagaaggaccgaggatggagcctctcagtgcttatttagataggacccccagatcatgttacctgggcacttacaaaacaggatccagggtcccaccccagcatttctggcctatagcagctgcctcgacagaacccaggtctaggctcctgatgcatactccagaagacccacgaaccagcccccagcattagctgcccaaggcccagggtccagttccctagcaatgacccagaagagcccagggcccagccccgagcacttgctcaggcctaccgggcagcccttgggaaccaggatcagacttttctccttaactgataggacccagggtcctgccactcagcactaaatgcccctgcagaccccaggggtctagcccagccctcttccagggcgtgagtatcgtcggttactgaggtgctgtctcctccccaggatcctgattgtggattgggatgtccaccacggtaatggaactcagcacatgtttgaggatgaccccaggtaagggctgcagtcaggggccgcagtgtgatcagggaggcgggtgagcacctcaggggtactggagcccctaaccagccatggtccgcttcccaccccctccctggcagtgtgctatatgtgtccctgcaccgctatgatcatggcaccttcttccccatgggggatgagggtgccagcagccagatcggccgggctgcgggcacaggcttcaccgtcaacgtggcatggaacgggccccgcatgggtgatgctgactacctagctgcctggcatcgcctggtgcttcccattgcctacgaggtacagctcaggatagatcgcaggacgtatgtgacacgcctgtgcaggtggcagcctggacctgcctccttggcatgtgtgtgtgtgactaccatgtggctgatgatatgagacagcgcatgggtgtttaatgaggctaccagggcagttggtggctgtgatcaccttgtgtatttgtgcacagatggctgtacatgactgccttctctgtgtgacactgtgtgagtgactgtcttggctgtgtgtgtgagggccttctgactatgcaccaatggcccgtgtcctggctggatctgtgttgtatgtgcgtgccatcacaagtgcttgagtatgtgcgtgtgcgactctgtgcaggcaggtatttctcaccttttctctgtgtgatgggtgtgatactgtatgtcactaaatgcaaccatctctgtgacagcctgtgtgggaccttctggatgtggaaggctgtgtgtgacagcagtcactgtctggctgtctgccctggctgtttgtgtgtatgtctctgactgggaggtagctgccttccctctgtgtgagctaggaggctggtggcttgtgtatggctgactctgggagggagggaaagggtgtgagcaccgctctgtcaccctgggcgccggtgtgcatctttggatctgcatgtgcatctgactgtgcatgggtagccaggacagccttctgtgtgtgtacaactgtatgtgcaaataaccagctcttgtggacataccagagtgcatgtcgccgttgtggctgtgtggtgatggcatgtgtatgtgactgtgcaggatggctgtgggttattgtcctctttgagaaactgtgtgtgtgtacatgactagtgcagatatatagtactgatctatatggtactgtctgtgtggcagtacgtgtggctctgtgtgaccatcttctctgtatgtggttcttgcgttgccatcttctgttttggaagtgtgcaagcacctctctttggcactatgtatataaaaccctgtatcttgtgtatgtgtgtcccacgtttgaccctggggtatgtgtgtgtgaggacatgtctctgtctctctgtttttcatgtcactctcttgacgtgtcagtctgtctcatgtccccatctgtccctttttttttttttttgaaatggagtcttgctctgtcacccaggctagagtgcagtggtgcaatctcggctcactgccagctccgcctcctgggttcatgccattctcctgcctcagcctcctgcgtagctgggactacaggctcccgccaccacgtctggctaattttttgtatttttagtagagacagggtttcactgtgttagccaggatggtctcaatctgacctcatgatctgcccgcctcggcctcccaaagtgctgggattacaggcctgagccaccatgcccggcccccatctgtccctttctgccatctccatgtctctaagtctgcatctatttcttctacctctgagtctgtatttcttttcttcccttcttcattttcagtctctgcttttgtgtctcctagtctccaggttctgtgtctccatctctctgacttgcatctccatgtcttcatttgtccttttctccatgtctctgggtcgccatcacttactgcctaccaaaagcccctaccctcatgcttatacatctcttctctccctgcctcagtttaacccagaactggtgctggtctcagctggctttgatgctgcacggggggatccgctggggggctgccaggtgtcacctgagggttatgcccacctcacccacctgctgatgggccttgccagtggccgcattatccttatcctagaggtaactttctcttggtccctcttcccacagtgggagggtagtttggaaatgttggcaccatcactcaggacagtttcctgaaatctcctttgagtgtccctgcctgggattgttggcacatactgggtagtaataagaataacagcaacattaacagccttaattgagtgctcactatgtgcagagcactcttctgagcacctcatgtgtcttattcattcagttacttggcaaagcagccttatgaggtagggtaagcttacctcattattttcctctctgaagatcagggaaactgaggcacaaagaggtgtgatgactagcctgagatggcacatttactgatggcagaaccaggacttgaacccatgcagcctggctccagggtttgtgctttttactctacctgaactgcctctaacaagttcctgggacaaaggaaattcactgacctttgtaaatgactcagtatccccacgccctgtgcctcagtttcctcatctttatgaggcaggctaatcatggaggaatgcctggcatatggtaaatgctggatcttttggatctggttttttgttgttgttgttgttgttgttgtttgtgagacaagagtctcgctctgtcacccaggctagtctgcagtggcatgatctcagctcactgcagcctccacctcccggcttcaagtgatcctcccacctcagcctcctgagtcgctgggattacaggcacccgccaccacgcccagctaatttttgtatttttagtagagatggggtttcaccatgttggtcaggctggtcttgagctcctggcctcaagaaatccacccaccttagcctcccagagtgctggaattacaggcatgagccaccgcacctggcccctggttactgttatgcgttgttcagatattaacccactcagcaaccttctgtgctcttattttctttttctttttctttttttttttgagacgttgtcttgctctgtcgcccaggctagagtgcagtggtgcgattgtggctcactgggttcaagcagttctctgcctcagcctcctgagtagctaggattacaggtgcctgccaccacacccagctaatttttttgtatttttagtagagacggggtttcaccatgttggccaggctggtgttgaactcctgacctcgtgatccacctgcctcagcctcccaaagtgttgggattacaggcatgagctaccatacctgcctctttttttttttttttttttttttccttttgagacagagtctcgccgtgtcacccaggctggagtgcaatggcgctatctcggctcactgcagcctctatctcccaggctcgagcaagcaattctcatgcctcagcctcccgagtagctgggactacaggcgcatgccaccacgcctggctaatttttgtatttttagtagagacgggggtttcaccatgttggccaggctggcctcaaactcctgacctcaggtaaccttcccgcctcggcctcccaaagtgctgggattataggggtgagccaccgcgcccagcctgtgctgttattttcaccactttacagatgaggaaaataagtcactgagaaattaattggcttgcaaaaagtcgcacttactatgtgcccagtactgcttgtgacaggacacggtgggagttaagaacacagatgactccatcagagagcccaagttcaaaccccagtgctgcctcttcagctgttatgacctcggacaagtcatctaaccactctgagcctcagtttctttatctgtaaaaagaatagcaactgggattcctgtagagtgtaaaaaaagtcaatacaggagtccatgtggagaaagagtccagttgttcctgtactaggtcagggcaggggcttttgtatgggttcacagcagtcgtcttgtgcaggtcaggtcagtggttactgtatgatgtgaggccaggggttcctggacagtgtgaagacggatttctgtatggcatgaaggcaagttcctgtatagattgagcgcctgtggttgtgaggattgagttaatatgcatgaagtacttaaaatcgggtctggcacacagcaaacaataaatgtcagctgttactaatgcttttatcagtattgttatcttgcactttacatcacaatttactccccacaacaaccaccttacacagtgggtgctgcctatcttaaaggtgtgggttctgttcacttgttctcagtactccccctccctctccagacttgcagggctcagtagggaggattggggaggcaggacatgttgtcctccaaattccccaatgaacccccaccatacctttccctccccttttccttaacaaagggtggctataacctgacatccatctcagagtccatggctgcctgcactcgctccctccttggagacccaccacccctgctgaccctgccacggcccccactatcaggggccctggcctcaatcactgagaccatccaagtccatcgcagatactggcgcagcttacgggtcatgagtgagtggatttgggggtgatggggggaacccagggaaggagggggctgaggggcagagatcagaggcaggaagggtgacagtacccacactcaaggatctccctccctggttccagaggtagaagacagagaaggaccctccagttctaagttggtcaccaagaaggcaccccaaccagccaaacctaggttagctgagcggatgaccacacgagaaaagaaggttctggaagcaggcatggggaaagtcacctcggcatcatttggggaagagtccactccaggccagactaactcagagacagctgtggtggccctcactcaggaccagccctcagaggcagccacagggggagccactctggcccagaccatttctgaggcagccattgggggagccatgctgggccagaccacctcagaggaggctgtcgggggagccactccggaccagaccacctcagaggagactgtgggaggagccattctggaccagaccacctcagaggatgctgttgggggagccacgctgggccagactacctcagaggaggctgtaggaggagctacactggcccagaccacctcggaggcagccatggagggagccacactggaccagactacgtcagaggaggctccagggggcaccgagctgatccaaactcctctagcctcgagcacagaccaccagacccccccaacctcacctgtgcagggaactacaccccagatatctcccagtacactgattgggagtctcaggaccttggagctaggcagcgaatctcaggtaaggctcaccacacccaggtaggggcaagaaggggcaagaatcgggcttctctgatacatctcttacttctgcgtgtccagggggcctcagaatctcaggccccaggagaggagaacctactaggagaggcagctggaggtcaggacatggctgattcgatgctgatgcagggatctaggggcctcactgatcaggtgagctcagggagaggctgggactgtggcttccttctcttgccaatttgtgtctccaggtaggagcatgtgatgaataaacatataatggggagatggggtcttcagcttacctagtttcacccacccactccaggccatattttatgctgtgacaccactgccctggtgtccccatttggtggcagtatgccccatacctgcagcaggcctagacgtgacccaaccttgtggggactgtggaacaatccaagagaattgggtgtgtctctcttgctatcaggtatggagcagaggaaggggatggggcggaggttggcccgggagcaaactgcagggggatgctgacccccacctgacactcacacccccaacctcaggtctactgtggtcgttacatcaatggccacatgctccaacaccatggaaattctggacacccgctggtcctcagctacatcgacctgtcagcctggtgttactactgtcaggcctatgtccaccaccaggtgggccctgggtagacccttcgacacgtgcacactcaccccccacacacacaccccttctgtgattgggtaaagggagaccacaggcccctctgcatggctgcctcatgtgattattttgcatggggcgggggctgtgggatagtccagaagacagagtggttgagggctggagtgggggcagccctgcagccgaggtagaggggtcctcactctctctcacctgccctattcttgcctcctcctcaggctctcctagatgtgaagaacatcgcccaccagaacaagtttggggaggatatgccccacccacactaagccccagaatacggtccctcttcaccttctgaggcccacgatagaccagctgtagctcattccagcctgtaccttggatgaggggtagcctcccactgcatcccatcctgaatatcctttgcaactccccaagagtgcttatttaagtgttaatacttttaagagaactgcgacgattaattgtggatctccccctgcccattgcctgcttgaggggcaccactactccagcccagaaggaaaggggggcagctcagtggccccaagagggagctgatatcatgaggataacattggcgggaggggagttaactggcaggcatggcaaggttgcatatgtaataaagtacaagctgttaaaaaacctggagaaagctttttgactttgagcaggtggagaaccccacatccctggccagcagagccgatgagtaatgaaggaatgagggagtgggtctctgtcaggtcaatcccctgcccatccattgcccccaaaaaactaactgaaaatagagcagccatcttgactggctccacgggatataaaatggtagaatccatgagaaaatgggtgcttgccttataaataggagcctcacagccagtcccagccacacccacaccctaggctgagaaggcaagaaaactagcaggaagtatccttaccaggcctgtttccccactgtctcattggcctgactggggatggtgggaggtccaggtttaacttgaatgtggtggtcatggtagcttcttggcagaaggggtgcctgccattgaccacaggtgggaaattggaggacagtctgagagctgaatttctcccacgtggtgagaattgctttggcagctcaagggagttggatctgaggtttccaggacttttcttcatggccaccttatgatcccaagctgaccaccacagccttactgagtcaagaagaggagggatggggaagggccggggctgccccgttcttgttttgttttgttttttgagatggagtcttgctcttgtcacccaggctggagtgcagtggcacgatctcggctcattgcagcctctgcctcccaggttcaagtgattctccttcctcaacctcctgagtagctgggattacaggtgcctaccaccacacctggctaatttttgtatttttagtagagacggggttttgccatattgggcaggctggtctcaaactcctgacctggtgatccgctggccttggtctcccaaagtgctgggattatgggtgtgagccaccactcccgggccaggggctgccctgttttaagagccctctggatgccccacctctgctgccctctcattgatcaggactgtgcatgtggttgccatagctgcaagggagcctgggaaatgtgtagtttgacaggcagccgcctccaatcagggtctttcttccctgacagaatgacccctcctctgtcactgtcttttctccagagctaccaaaaaaccgagttgaggcagcacaggctctgtggcctgaaagagcttcccacaaaaccgttcccaaagtcaggccatcctggtcaaaatctaacacccaactctcccacacacacacaccaccaacaggaaagcaagggagaggcgccacaggggacacacggggaggtttggccgccgtccgtgcacccctagaggccgctgtggcacccacgtgcctgtgcgcaagccgcctgggggggcacgaccccttgctcccccggggcaatggcacgggcaggggcggggcagtggcaggggcaggggcgcggcgcaggggggtgggcggcctgaggagccgagggagggcggctgcgcatgtccactcccccaaccgccgccggggtgccccggggagcagcgtcgccccccgccaggcctgtcagagcgtcccagcgcgcccgcctccccacggacacaggtgagcgaggcgccggtgcccctggccctgccaggcctgggggtatccccgcgccggctttgggggatcgtcccccaagcgccaagccttctcccgggcgagcggcccctcactcgggccggccgggaggggtgtcggcgcttggctggaagcggggccgcctcacccggagtcgggatgggtcttgacaggatgcccgggcgacgctgctcacaccgagcccgaagtggagtcctggtttcggggacccttccgcactccgagctttgcacctcacccggcctcgtccgggaaagcacgacctggcgaggccgccctaaccccaggtcccggccccttagcgcgccagccttggtgagctgggcgaagccccccaacctggtcccagcggctctgagcgcgcggccacggggacccgccgggggctccgcgccacttgagaggaccgagcccccaatctccggcgcctcccgcgggctgaggccccgggccagtgccctcggcacgtgcctctgcgcctcgggctcctcccgggagcggagccttggggaccagggccgcggcctccctgcgcgtcgcggggactgggcgagtgtggccccgtcccgccaggcacctggggtggaagctgcgctccgccactcggccaggccccgggctttccttcctcaccgtcggcgcccccagactccagccgctcagaccccgacttaagaggcagcctcgaccccgcctctgccttctgacccatccctaaagatggccgggcacccctacaggacccccagaagccgacctctccctccacgtgcgccgccgcctcgcccctccccgcagtcctccaggtcttcttcctgtccccaaccgtcggggacccccaagctccgtcctccgcttcctgctctctttatcccgcccccgctccttctgggccaacgccgccagtgactattcccagggatccctcagagctgaggacgccgcggccgcatccccatttgggaccttgccccgactccgacctccggatctccagctccaccaaacctcgaagccaccatccgcccccaaactgccgctgcgccaggctttcggaggggagtcgtggcaacagccattaggatgcactaagcagggcacttcctgagcccaaggacaccgaggggcattcactgagtgaatggggatgtgctgctaataactaacactaattgaccacctgccgtgtgcccatcctcttcgaacatgcaacttccttgttccttatcttgttactgtctctttctctctgccagaatccaatcctcacaagggcagggactggggtctgttttgttaactgccatatcacaatgcctggcacgaaggaagattcttgaattaatgaatggagattaaattataatttaaaagcctggcatgaactgagcaccttctgcatgcttatcacccgctactgacatatagttcactttttttttttttttttttttgagacggagttttgctcttatctcccaggctggagtgcaagtggtgtgatctcagctcactgcaacctccgcctcccgggttcaagcgattcttctgcctcagcctcccgagtagctgggattacaggcgtccaccaccactcctggctaatttttttgtgtttttattagagacagggtttcgcaatgttgggcaggctggtctcgaactcctgacctcaggtgatccacccgactcggcctccaaagtgctgggattacaggcgtgagccattgtgccccgccccctttttaacctagtttgttgtctctcaccccgaccagaatataaccttcatgagggctacagtttgttgtctatttattgcccaactccatgtccttgccacacagtaggttcccaataaatgtatgttgaataattaataaagactacattctaatgataatggctaacagaccacgtgatttacatatttatttggtttattatattatctgcctctgccttttagaacataaaccttctgggggtgggaatgttgggtccctactgtctggcaggcactgtgctgggctagggttcaatggtgaccaaaaccggcaaaatcctgccctccctctgtcatggggaggaactgctaatgggcatggggattcttttctgggtgaggaaaatgttctaaaatttacttatggtgatagttgcacaacttcgtgaatatgctaaaacccgttaaattggacactagctggctgaacttgatgggatgtaaattacatctcaataaagctgtttgggaaatccagccttcacagttgttgattcgcgtgaggagggaaggagagatggggggacgtgggacagggagaaaacaacataaatcatatatatatagcatgcaaattggaaggtgatcagcacacaataggcattcaataaatgttgaaataatgacaccccactgtctccttgccctcaaatggtctcccctaacgtatcccctgttgtcttgcttcttctcttcccacttgcagagcctgctgcccacgtctcttccctgagctgcctgctggggtcatggagctgccaacaaagcctggcaccttcgacctgggcctggccacatggagcccttccttccagggggaaacccaccgggctcaggcacgccgcagggatgttggcaggcagctgcctgagtacaaggctgtggtggtgggcgccagtggcgtgggcaagagtgcgctgaccatccagctgaaccaccagtgcttcgtggaggaccacgaccccaccatccaggattcctactggaaggagttgaccctggacagtggggactgcattctgaatgtgctggacacagcagggcaggccatccatagggccctgcgtgaccagtgcctggctgtctgtgatggtgtgctgggcgtcttcgctctcgatgacccctcgtctctgatccagctgcagcagatatgggccacctggggccctcaccccgcccagccccttgtcctcgtgggcaacaagtgtgaccttgtgaccactgctggagatgctcatgccgctgctgcagccctcgcacacagctggggggcccacttcgtggagacctcggccaaaacacggcaaggcgtggaggaggccttttccctgctggtccatgagatccagagggtccaggaggccatggcgaaggagcccatggcaaggtcctgtagggagaagacccggcaccagaaggccacctgccactgtggctgctctgtggcctgaaggtcttggccaagaaatgtagacctttccccaggccagggtgattgttcatttgacatgagacccctgaggcaactagctttgagggacacatcaggtatactagggaaagatggacatctctcttgttttcacttggtgaggggctttttggtaacatgggagtgcctaatgttgcttttgttatgtcaagttgaaagattttgtgcaaaattaaataaatggtgttttgggtttcaaagctgcctccatgccgagtgttgtgtgggtgggagtgagactgggtagaatgttacttgagttgtgagaattctttcattcaagaaattcagggggagcccactgtgtgctaggctccgctttatatataagggaggtagaggcaaacaagacacttaaaaatccttgcccttatagatatggcatcaggctagatagtgataaaggctacgtgttaaaggcaggtgaaggaatagggtgacaggtccaggaaagccttcttgagagtaggtgacatctggacaaaaacctgaagatatccagaggcagagggactagccagtgcaaagaccatggccacaaatcagctgccaccacagcaaccctcagtatatccagggcctggagcaagagtacaggtaggcctctacactacataactaaatatgtaaacgttcagacattacgaatcaagctttacaaagtaaatgaaatacaccctatcctactttggcaaatacactttattagtgacctggatacccaggctccaatttctcagccttctcagagttccctgccagaatgtgcctgtctgccaaagagtgtgcctgtactggggcctcccgaccctcagtgccctctccctttctctccgctctctccttttctcttccccacatcaggaggtgttcatgtgtgcctgcgacatcccagccagcacctcaagctctactcacgtgccccacaaagccaccccttggccctcaggaggatggtcccttggaagatgatggtgcaggccctgaaagtggcctcaaagcctgggatccccatacccaagtgaggcctaaaagggggacacaagatccgcgattgtccatgtggatgtcttcccctccacccctaggagagacatagactgagcaggtgattgctctaaagtgcaggacccagggtagagtctcctctctcctggtctaagggcaaccaccaccgcggggaaccaccagcccctagaaactgccactcacacagacaagcacagagctgcttcagatcatgtttattgtggggccagggggtagggatcctcgggtgagagggctggctggccggggtaagttgctctggacgtgctggcggggagcagtcctggtggcgggatggcgggggcacttctgggtcccagggtgcacgggatccgggcagtgctcagggtggcaagaggcggcgtgcaggcacctggggcgccggggtctctaggcgtttcacacgcagcagcgcccccagcacgccctcagggggcagctcagagcccacatcgtggtcggcggcacggcggaggcggcgcggggctgccaccccctcggagtccgcgcttcccgcaagaatccgtcccagcaagtacctgcagggccgagcgcaaagcagtgaggcggtgtccgcggtggggcgttcccccgccccacgctcggggcccagaacgcaggatccacaaccacatactgcctggggacacggttccctccccaagaaggcgtcctcagcccactgctttcagtagacagccgtcatcgcctttcatcccagaaaactgtggcttccccgcctccctctccccttcccaggacctggggtccacttcccccactgagtcagccaggcatccttgcctggactccctggatccaggacctcactccctcttaggccccaggacttaggggttcgcactccacggggtaagcaggcttcccagttcctcgccctcgtcctctccggacgcaggcgcccgacccctccccaccccctgccgggcacctcaacagctcggggtccacgtcgggtgtctcgtcgcctgcctcctcagcatccgggcccgcggggccgtcgtcgtagaccgggggccggggtcggagcgccgcggcggggacgggcgcggggacaagctgggctgcgagggcggcagggtcaaggcgggcgcggagcagagcgcgagcgagctgcgctgcaggcgcgtcggggtcgtcgtccaggcccagagccggatcagagttgcggggggcgccccagacgcgcagcagctgcgccaggacgcgcgcctgctgatcctcagcctcctgcgcctcggcccgcgcccgctcctgacgttcggcctccagcagatgcgccagcgcccgcgccagctcctgcaccgcccccgccgcctcacctcggggcactgaccgccggaagcggcgaggagcgccagtctcagccaagggcggagacgctgcgcttaggccgcggggctcctgcgggaaaatgaggtgggggaaaagagtttgtcagcgtccgtcgagacagggacccccagcccgggaagcttcgtaggcctcaaacatcccagatgccaccaaaagcaccgtgaccatccaaatatacccggacacccctaaggccactggaaaccaccaaatatctccagacgcacttaagaccaccaaagatccccagacaccccccacccccaccccacagcgcgccagtgatcccttggtgactctcataattcctccctccccacccccactcctggagaccgagtttcttcataagagtagtgatggtagatatgacagttatagatttttccatatttaatattgtggacaataggaactatatgaataaacttgttcatatatcatttggcatgtgtacaagttcatctgtagaataaattacccaatgacaaattttcagttcaagcagttttcaaacaatttccacaagtttaaagaaataaaagagggtaccaataatctgagcaaggaataaaagatcataaaaatgactgtgaaggtttggaaaagaaacatacaggccacatataaatatgtttaaaaggagtgatgcctgcaacacaaatagtcaatgaaagagtagtacacagaagatacagagaattcctaaaaagtagtaagagaaaaacaaactcatacagaaatagaaaaaatacatgatcgcctatttcacaaaaatgattactaaacatatgaaaaattgggccaggtgtagtggttcatgcctgtaatcccagcactttgggaggccaaggcaggaagatcgcttgaggccaggagtttgagaccagcctggtcaaaatggcgagaccctgtctctacaaaaaataaaaccaaaaaaaatgagcggggcacaagcccatagtcccagctacttgggaagatgaggtgggaggatcacctgagtccagaaactcaaggttgcagtgagcccagatcgcaccactgcactccagcgtgcatgacagaggaagaccctgtctctaacaaacataaaataaaattaaaaacctcattagtaatcaggggaaagcaaattaaaatgccagggagatactatgcataatataaccaaaagattgacccaaatcaaaaagtctgataatatgaagtgttgatatgaatgcagaaaaatgggaactctcatactatgctggtgagaattaaactggcaaagtaattttgcagagcggtttgacaatatctaaaaagatgcacatatcctatgacccactcctgggatgtcactccccagagcagctttggcacatacgctactggtcacaagttcgtgaaagatgacagcagcactgttcgtaatagcataaaagggcgggggagaaagaaaagcctggaaacagtccaatgtccactgacaaattgagaatacatatataaatcatgatgtcctcataggatgtaatattatgcagcaataaaaataaatgaattacagccacatgcatcaacttggatgaatctcgtgaccagaatagagccaagggaaaaaaaaacgtcaagttccagaatttcactgcagactgcctgagactactagacaccctgaggacttcctagtgacccctagtgactacgaggaaccagtcacccagtatgattccgtttcaatgatgttcaaaagcaggaaaaactaaacaatggattttttttgagagctacacatatgtgataagctacaaacaaaagtaagggatcaatggacagaaaatacagaataaggactgtggggggacaggggctgccatggcgaggggcacgcaggggcttctaactcttggtcaggctctatttattaagctgagtgactgctacacgagagagttattttgtcatcattctttacattgtacatatatattaaacacattgttacacggatataaggtaacagttttttttaattcccatctttgatgcagacagtattgaagagctagaggaggatgcctctccaagtgcccttgctggcgcccaccactcctcagtcaccccggggtatcacactcaccagcaatcacagcctcacacacactcatgaggactgacaggcctggagatgtcacatatacagcccaacactgccacagccacatgcaaggacctgcacacgttcacatccgcagctgctcctgcagttacaatcgccaagccacccaggtgcaaggacatgcaccatccttaaagacacaatgcagcagagagacatcatggctcctctcctcaggatgacacagctccacaaagaaacggagagaaacagtctcaggaacacgcaaacgaaatcccaggcacttggtccaacagaaccactatggaatgtgcacacggagatgcgaagaccattccctctcaaacacaaacgaaatcacacacacacacacacacacacacacacacagagagagagagagacagagagagagagagagagacacgcccataggccaagccaacacacataataaggattcacaaatatccacacggtgtcactgagaaaacaatcggacgcacaaaagaatcgcgcacagaagtatcccggtatcacacacactacacacccagacgcaccacggcacctttctaggacacttggaagcgctcaaaccaaagaacacacactttcaaggacacgacacctccacaccgctctcctcacatcacacgcacacacactgatgcgcgcgcgccctttcttaaagcgccttagtgccgtggacagcgtcacaggcaccgggcacggagaggtgggcagggcacggttaccggcggcgccccggacaacgccacccgcacaggcagagaccaagtcaggtctcaggtgtgccggcgtggcctgggcgcggaccggcggccggagcccgggccaccctcgtcgatctctccgcacgtcccgggagccggctcgggcgggggtgaggcggcgcagccccaaccccaaccctcgccggtggcatcctcccccaacccccacccctcgccggactggggtcgcacctttaccggccgcgcgcagagcgcggggggcggccgaaacaggccgagcagcagcagcaccaaaaggccgacgcccccggcccgcggcccccagagcagcggcgaccccgccatgctgccccagcgagccgggctccggacgggcggactggctggcaagtgcgcagtgccggggcgagctggcgaggctgcggcgctctgcggctgcgcacgcccggaaccaggccccccctccccgcccccaccccacccacccgaccgacgcaggcgcagcctggggagctggcagccccaccagacctcccgtcgccatggagatgcccaaagggcaaggtggagagctggcggttgccatggcagtcggagggcagttgctggggcaaccgaccttactgttaccttagtagacaggaaaacaggtaagaaaaattgactcagtggagtggaatgggggtctggtcctcatctctcttcctgggggaggagatggactttagtttgttcattagataaatagttaatggatcacccgcagtgggcccggcccgcgccagggagatgggttcaatctaggtgatgtgaccatggacagctcagttggccattctaaggctcaggctctcagcggcgtaaaggggttactactgacagcctccctcaaagtgaccttggaggtttagaatgacattcagtaggagctccataaatgctcctttccatcctctccttgtctctttgtgtttttttttttctgacagtgtctcgctgtgtcctccaggctggaggacagtggccggatctcagctcactgcaatttccacctccagggttcaaccaattctcatgcctcagcctgccaagtagctgggactacaggtgcccaccaccacgcctggctaatttttgtatttttgtagagatggggtttcgtcatgttgccaggttggtctccaacttctgagctcaagcaatcggccctcctcggcctcccaaagtgctgggattacaggcgttgagccaccatgcctggccccagcccaatactttcatctctccatggctctctgtgtttatctttctgcccttatgtgcccacagctctctctgtgtcttcctctccccatatgtctctccttgtctatgactttctctcctttcatctctccaaccgctgtcttgtctctgtctttattttactgtctatatctacttgttttccatagatagatatatacatagatacatatatgcatagactttacccatatattgttccagaaataagttcaagccactaaaatgacatatcaaaggaaacaagatcttgaaaaaatgtatgtgtatccatagggggaaaaatgttggggaggaaatgtcatcaatggttatctctggggaggtaactaatggtttgttactttctcctttatacttttctgttgtctgaaaaaaaaaaattacaataggccaggcgcggtggctcatgctcgtaatcccagcactttgggaggccgaagtgggtgtatcacctgaggtcaggagtttgagaccagcctggccaacatggtgaaaccccatctctactgaaaatacaaaaattagccaggcatggtgacacgcgcctgtaatctcagctactcaggaggctgaggaggaggagaactgcttgaacctgagaggcagaggttgcagtgagctgagatggtgccactgcattccagcctgggcgacagagcaagactccgtctcaaaaacaaaaaaagatcatctgaataaatgaagacacaatacatgttcctggatgaggcaatttcattttataaagatgtcaagtctatccaaactaatatataatttctatgtaatttcaatttaaaccccagctgaatattttaaagaaaatcaattaaatgtactttttattttgttttatttttaatcctactccttctgtaataaaatgtgtaataaaatttgttttggtttgtttatttgtgttttgagacagggtctcactctgtcacccaggctggaatgcagtggcgaaatcacggctcactgcaacctccacttcccaggctcaagcaatcctcccacctcagccttccgacttgctgggactacaggtgttccccaccatgcccagctaatttttgcatttttctgtagagatgggtttcaccatgttgcccaggctgctcttgaactcctgggttcaagtgatccacccaccttggcctcccaaagtgctgggattacaggcatgagccaccacacctggccatatttttaaatgtatataagagtccatgcaaaaatttgtacacaaatgttcaaagcagcattatttataatagcaaaaagtggaaacaacccaaatgttcatcaatagatgaacagataagtaaaatgaggtttctccatatcattgaatattattcagccataaaaaggaatgaagtgaggccgggtgtggtgctgtaatcccagcactttgggaggccgaggcaggcggattacttgaggccagaagttcgagaccagcctagccaacatggcgaaactccatctctactaaaaatataaaaattagcggggcgtggtggtgcatgcctgtaatctcagctactcaggagaatcgctggaacctgggaggtatgggttgcagtgagcagagatcgcaccactgcactcctgagcaacagggagagactccgtctcaaaaaaaaaaaatctcatgtatcccataaatatacacaccatgtacttataaaaattaaagattaaggggccgggcatggtggctcacgcctgtaatcccaccactttgggaggctgaggcaggtggatcacgaggtcaagagatccagactatcctggccaacatggtgaaacctcgtctctactaaaaatacaaaaattagctggcatggcagcaggcgcctgtaatcccagctactcgggaggctgaagcaggagaatcgcttgagcccgggaggcggaggttgtagttagccgagatcgcgccactgcactccagccgggcgacagagcaagactctgtctcaaaaaaaggaattaaagattaaaaacatttgatatgcatggttgattatcctaggtaaaaagaattacagataaatacaaatatgtatacatgaaaatggatatgagttttatttgtttattgaaaagttataggggcgaggacaaaagactacaaaaattaagaaataaaaataaaaagttattacagcttattaatggtaatattataattaatacatacataattttatttatcatactaagttaattgtattttgaaactgtggaaaattttttaatttattgactatgtgtagattgactgacttcgagacagagtctcgctttgtcaccaaggctggagtgctgtggtgccatctcagctcactgcaacctactccccttgtgttcaagtgattttcatgcctcagcctcccgagcagctgggactacaggtgcacgccaccacatctggctaatttttgtattttttgtagagatggggtttttgccatgttgcccaggctggtctgaaactcctgacctcaagtgatctgcctgcctcagcctcccaaaatgctgggattacaggtgtgagtcaccatgccaggcctgtatctgtagatttatatttccatgtataactaactacatacatatacttatattaataaattctctactggaaattattacatgaataatgtacaaaagatgtaaaattagaatttgtgtccttttactatgaaataactaaattattgttttcctagttcagtggaggtttcttttgtcatcaaaaataatctatctctctgtgcttttcgacatattcttaaatcttttttttttgttgttgttgttgttgtttgagacagagtttcactctgttgcccagtatggagtgcagtggcatgatctcggctcaatgcaaactctgcctcccgggttcaagcgattctcctgcctcagcctcccgagtagctgggattacaggcgtgtgccaccatgaccagctaatgtctgtatttttagtagagatggggttttgctatgttggccaggctggtctccaactcctgacctcaagcgatccgcccgcctcagcctcccaaagtgctgggatcataagcgtgagccaccgcgcccggccacttaaaccattttttaaaagagtccttctttacctttttttttttttgagacggtctcactccgtcacccgggctggagtgcagtggcgcgatctgggctcaatgcaacctacgcctcctgggttcaagaaagtctcctgccccagcctccccagtagctgggactacaggcacgtgccaccacgcccagctaattttggtacttttagtagagatgaggtttcgtcatgttggccaggctggtctccaactcctgggctcaagtcatctatctgctggcctcagcctcctaaagtgctaagattacaggcgtgggccactacgcccagtaagtacttatttttgaaaaaagtttctaataaacgttgtttattgctttatgattctgcagtaattataaatatttcttgtgcttaggtatttatgaaatattttgactcctctaacaactctttgtaattctgattttcccaaattcagaataaaattggttagatgtcttttctatataaactattttggggcttattaaaatgattattagggctgggcatggtggctcacgcctgtaatctcagcactctgggagactaaggtgggagcattgtttgggccccagaggtcaaggctgcagtgagccataattacgccactgcaccccagcctgggagacagagcaagactgtctcaaaaacaaattaaattaaattaaattaaatggttattaggtaatctaaagatttctccttcaccttataaaaggaagggcaagagaagtaattaggtttatctagaatgcttcacatgtgaattaattcaaaattcttataagtgctctttggcttattaaacagatttttaaaaaactgacaaatcaaaaagaaaacttatctttctatgctaattctgcaaaagtaaaatatgttctcataagtgtattttaatgattatagactttttgtgtttaaaagaaccataattatgacacaatcaagcacaaatcctggtataagaactgtctacaaaaagatgtgtttccaggattctagatgcccgcttccctttttgttgatgatatgtctaaacaagtatcaggactattgcctcaattacctgggactctttggaggcctgttatttactttagttttcgattagatccaggagccaaggcgtagcctatgaaacattattgcttccccttcacacatcactagccattgctgcaacactctgcccctcctgaatgacctgggcgatgaaagccccttgttgcttacctctgctgggaaaccagccgcaccctgcgcacacttgctagagaccccctcagctctcctgatttaattgtgttgttggcagttcatactcaaaaagaaacactagttgggactcggtggctcatgtctgtaatctcagcgttttgggaggctaaagccagaggatcgcttgaggccagcagttcaagaccagcctgggcaacatggtgagactccatctccacaaaaaataaaagtgaaaactaatacgaactaaaggaattccactttttaaaaacttttattattattattattattattgagataatgtctggctgtgtcacccaggctggagtgcagtggcagtgatctctgctcactacaacctccgcctccagggttcaagtgattcttgtgactaagcctcccaagaagctgggaccacaggctcacgccaccatgcccagctaatttttgtatttttagtagagatggggtttcaccatgttgcccagactggtctcgaattcctaagctcgagcaatccacctgccttggcctcccaaagtgctgggattacaggagtgagccaccacacacagctctttttttttttttttttacttttatataccctaggagtaggtagaatttcacttctgagtatacagcaaaaagaattgaaagcaggaacacaaagagatatttatacacccatgttcagagcagcattattcacaatggccaaaatgtagaagcaactcatgttccttgatgaatgaatggataagcaaatgcgatatatacctacaataaaatgttattcagccttgaaaagaaggacattctgacacctgacaacatgaatgaagctcgaggacattatgctaagtgaaataagccagtcacaagacaaatgctgtatggtccaacttatatgaggtacttagagcagtcaaattcagagacagagtagaatggtggtttctagggtctcgggggaggagggaacggagtttatcacttaatgggtgtagagtttcagttgtggaaatgagaagagttctgcagatggatgatgactgtacttacacaacaatgcaaatatgccgggcgcggtggctcatgcctgtaatcccagcactttgggaggctgaggccgggagatctcttgagttcaggagttcgagaccagcctggccaacatggtgaaaccccatctccactaaaaatacaaaaaatagctgggcatggtggcgcatgcctgtaatcccagctactcgggagactgaggcaggagaatcacttgaacccgggagacagaggttgcagtaagccgagtgagactctgtctcaaaaaatacatatttacggccaggtgtggtggctcacacctataatcctagcactttgggaggccgaggcaggcgaatcacgaggtcaggagatagagaccatcctggctaacacagtgaaactccgtctctactaaacatagaaaaaaattagccaggcctgatggcacacacctgtactcccagctactcggaaggctgaggcaggagaatcgcttgaacccgggaggcagagcttgcagtaagctgagatcgtgccactgcactccagactggcaacagaacgagactctgtctcaaaaaaaaaaaatacatacacacacacacacacacacacacacacatatatatagaaagagagcgagagagagagagagagagagttatatataaattagttcatatggctaaattaattgcccttgcctagatctgccagctgacagaaaatagaaggtgcatttttttttttttttttgagacggagtctcgctctgtctcccaggctggagtgcagtggtgcgatctcagctcactgcaagctccgcctcccaggttcacgtcattctcctgcctcagcctcccgagtagctgggactacaggcacccgccaccacacccagctaatgttttgtatttttagtagagacagggttttactgtgttagccaggatggtctcgatctcctgacctcgtgatccgcccaccttggcctcccaaagtgctgggattacaggcgtgagccaccgcgcccggcctaggaggtgcatatattaatactgatataaacatatatgatttcgggtcagtccatgactttgaaatgttttatcaacaaaaggattcccagagcactacaggaacccttataagaatggacaacaaattaagaaaaatttgtatgccttattattactgagatagctactaatgaaatgagccaaggccaggtgcggtggctcacaactgtaatcccagcactggcccaggtgggcagatcacctgaggtcaggagttcgagaccagcctggccaacatggtgaaaccccatatctactttagaaaaaaaaattaggctggcagcagtagctatgcctgtaatcccagcactttgggaggcctaggtgggcagatcatctgaggacaggagttggagaccagcctggccaacatggtgaagccccgtctctactaaaaatacaaaaattaaccgggcgtggtggggggcacctgtagtcccagctaccagggaggctgaggcagaagaatcacttgaacccagaggcagaggttgcagtgagccaagattgtgccactgcactccagcctaggcaacagtgtgagaccctgtctcaaaaaaaaaaaaaaaaaaaaaagaagaagaagaagaaagaaaggaaggagccatgatctgagagctaaatggaccctgatactgaaccaacattgatggggtcactttaagggtattgccaggatggttcttccatgtcctacttcctccagtgacacagtcatggcaatgactataaaggtagaacatggataggaaccaaagacctgaggcccttttgaacacttccaagtgggctatgagtaagttctggtccttggttattttcagggtgaattgagcttttctttgctggagagccattgcaatacagggggaaactgtattccgacttagggaatcccaatttattctccaataaaagggacaccaattaaactggtattgaggacatcatgctaagtgaaataaaccagtcacagaaacacaaacactacatgattccacgtatctgaggtatctaaaatagtcaaattcatagacccaaagagtgtcatggagtcgttgccaggggccaggaggaagaggaaatggggagggctttttttttttttttttgagatggagtttcgctcttgttgcccaggctggagtgcaatggtacaatcttggctcaccgcaacctccgcctcccgtgttcaagcaattcttctgcctcagcctcccaagtagctgggattacaggcatgtgccaccatgcctggctaattttttttttttaagacaagagtcttgatctatctcccaggatggagtgcaatggcgcaattttggctcactgcaacctctgcctcccaggttcaagcaattctcctgcctcaacctcccgagtagtcgggattacaggcgcccgccaccacacccagctaattttgtatttttagtagagacggggtttcgccatgttagccaggctggtctcaaactcctgacctcaggtgatccactcacctcggtctcccaaagtgctgggattacaggagtgagccattgcacctggcccaaaatggggagttattaatgaacaggcataaaggttagtctcgggcaagatgaataagctcagccgggtgcggtggctcacacctgtaatcctagcactttgggaggctgaggtgggcagattgcctgagctcaggagttcaagaccagcctgggcaacatgatgaaaccctgtctctactaaaatacgaaaaaaaaaaaaaattagccgggcgtgacggcatgcgcctgtagttccagctacttgggaggccaaggcaggagaactgcttgaacccaggaggcggaggttacagtgaaccgagattgtgccactgcactccagcctggcaacagagcaagactctgtctcaaaaaaaaaaaaaaaaagaagaagaaaaagaaaaaaacaagatgaataagctctagagatttgttgtgcaacattgcatctagagtcaacaatactgtactgtgcacctaacattttgttaagagggtagatctcatgttgtattgtaccataataaaataaatttttaaataaaatcattggtaggctaggcgcgatggctcatgcctgtaatcccaacactgggcagctgaggtgggtggatcacttgagcccagaaggtcgagagaccagcctaggcaacatggtgaaaccccgtctctactaaaaattcaacaataaaaaaattagctgggcgtggtggcaaggacctgtggtcccagctactcttgggggctgaggcgggaggatcaattgagcctgggaggtcgaggctgtggtgagtggtgaccacaccacttcactccagccggggtgacagagcaggagaactgtcacctcctggggaccctgtttccctcgggtattcaaaaatctcccaaagggaggcaagcatgggctacgcagaagaactctcagtagggactgctgagtctcttcatatgagctgcagttcccacagtggcagtcacacaattggaaaaggtggtcccaaacttgtctctgaccttagcagatgacacaacttctactctagaaacccaacaaaccagtttaaatttaaattcatttgccatctcgacgtaacgagatgcgagataaggccaggcactgtggctcacacctgtaatcccagcactttgggaggccgatgcgggcgaatcacctgaggtcgggagttcgagaccagcctgaccagcatggagaaaccctgtgtctactaaaaatacaaaattaactgggcgtggtggcgcatgcctgtaatcccaactattcaggaggctgaggcaggagaatcacttgaacccgggaggcggaggttgaggtgagccgggatcgcgccattgcactccagcctgggcaacaagagcaaaactctgtctcaaaaaaaaaaaaataaataaataaaaataaaaaataaaaaagagatgcaggataacccccacaaaaatattcattagccagaattgtcatgaacataacccttgatttcctttggctagtcaagggggagtgtatgctttagtaaacacttctttttttttttcctcattgtcaagactcaacataaagcaaatactttttgatgcacctatatcaactctgcaagtcaagtagaacagtttctgatgaggttaaaagaaaaagttggccaggtgcagtggctcatgcctgtaatcctagcactttgggaggctgaggcaggaggatcaattgagctcaaaagtttgagaccagcctgggcaacatagcgagaatgtctcaaaaaaaaaagaaaagaaaaagttacctggttctctacaggagaccaactaggctttgggacatatttccctggtctggtttggccgtctaggctcctgtcttcggagtctagtttgtttggttgaagtttttttgagacaggctctcactcagtcacccaagctggagtgcagtggtgtgatcacagttcactgcaccttcgacctccccagctcaggcaatcctcccacctcagcctcctgactagctgggacgacaggtgaaagccatcatgcctggctaattgtttgtatttttgtagagacggggatcttgccatgttgcccaggctggtctcaaactcctgggctgaaccgatcctcccgcctcagcatctgaaagtgctgggattacaggtgtgagccacagctcccagccttcagtgtctattataaagactaaacctcagcttgtttctgtgattgcctgtgttgcatttggccaatgtatcctgtccagagtcttttttttaaaaaggttttcaaagtccagtgtcgtggttcacgtctgtaatcccagctactagggaggctgaggtggaaggatcacttgagcctgggaggttgaggctgcagtaagctgtgatcactgcactccagcctgggcaacagagagagaccctgtctcaaaaaaagaaaaagttttggccgggcacagtggctcacacctgtaatcccagcactttgggaggccaaggaaggcggatcacccaaggtcaggagttcgaggccagcctcaccaacatggcgaaacccggtctctactaaaaagaaaaaaaaaattatccaggcatggtggcgggcatctataatgccagctactcaggaggctgaggcaggagaatcacttgagcccaggaggtgggggctgttgtgagccaagatctcgccactgcactccaacctgggcaacagagtgagactctgtctcaaaaaaaaaaaagtttttaagatagtatttatttgtagttagagctgagttcttctgttagtttttaaatgtcttcctggggagtagcactttctaagggttccaagttcatccgttggctgtcatagccatccagcaatccaaggctgggctttggtgtcctgtagggaagctaggtccctcctgggtcgtggatcctggccttgcaggggcctggccaggcatagaggagagccttgtgcgagtgcctcacattctgcattgtggggaccccagtccatgtggtgtaggctgcagcgctgggaggagccagaacttgcgacctcgagagaggcggtagcagtagccccggctgggcctataacatctggaccttttcttagggctgaggccgcacctccgccagggcggcgggaagcatcgcggatggtggccaggtgggccatgcagctccccgttgctgcagcagtgctgggagcttgggagactgaggcaacccagcagccataatggtgagtatgaagccgacgctctccagagcatcaaaaatgcagaagggagtggctgggcatggtggctcatgcctgtaatcccagcactttgggaggccaaggtgggtggatcacctgaggtcaggagttcaagaccagcctggccaacatggtgaaaccctgtctctactaaaaatataaaaattagccaggcatggtggtctgtacctgtatttccagctactcaggaggctgaggcaggaggatagcttgagcacagcagtttgaagctatattgcactattattacgtctgtaaatagccactgtacttcatcctgggcaacatagccagaccccatctttattttattttatttttttgagacagagttttgctcttgttgcccacgctggagtgcaatggcgcgatctcagttcactgcaaactccacctcccgggttcaagcaattctcctcccaagagaagcctcagcctcccaagtagctgggattacagtcatgtgccaccatgcccggctaatttttgtatttttagtagagacagggtttcaccatggtggtcaggctggttttgaactcctgacctcaggtgatccaccctccttggcctcccaaagtgctgggattacaggcgtgagccactgtgcccggccaagagctcatctttaaataaataaatatatggtttttgttgttgttgttttgtttattttgttttgtttgtttgtttgtttttgacagacagtctcgctctaccgcccaggctggagtgcagtggtatgatcacagttcactgcaatctctgcctcccaggttcaagcaattctcgtgcctcagcctcccgagtagctgagattacaggcatggaccaccatgcctggctaattttttgtatttttattagggatagggtttcactatgttgcccaggctggtctcaaacttctgggctcaagtgacccacttgcctcggcctcccaaactgttgggattacaggtgtgagccaccatggctggccaaaaaatgtcttttcttaaaacaactttattgaggtatacttgtattgagatataactaatgttgtacacttacaacaaaaactacacatatctagtgtatacaatctgtgagtttgacttatgtatatgctcatgatactatcaccacaatcaagataataatcatatccatcacctccagcgtttccttgtgtccctttgtagtggtttgttttagctttggtttttttgtgtgtggcataacccttaacatgagatctaccctcttaacaaattttaaagtgcacaatgccatattgtaagctataattactatgttgtacagcagatctctagaactgattcttcatgcataactgaaactttatacccattgagaaacaagtctccctttcctctccccggagaccctggcaaccaccattctattctctgcctctatgagtttgactactttagatacctcatattagtggaatcctgcagtatttgtctttttttgtgactagctcatttcacttagcataacatccatgttgttgcaaatggtaagatttctttttcttttttttaattttatggagacagagtctcactctgttgtctaggctggagtgcagtggcacaatctcggctcactgcaacctctgcctcccgggttcaagtgattttcatacctcagcctcccaagcagtagctggactacaggcatgagccaccacacccagctggttttttgtatttttagtggagacggggtttcaccatgttggccaggctggtctctaactcctgacctcaagtgatctgcctgcctcagcctcccaaagtgctgggattacaggtgtgaaccactgtacccggccataagatttccttctttttgtggttgaataatatcccactgtatgtatataccacatttttgatatcctttcatgtgtcaatggactttcaggttgtttccataccttggctatggtaaataatgctatgatgaacatggaagtgtggatagctctttgagattcctgtaaaatcaacatacaaaaattaattgtgtttctatacactaacaactatctgaaaaggaaattaagaaaacaatcacatttgcaatagcatcacaaataattaaatacttaggaagaaacttaaccaagtaaatgaaatatctgtacaccaaaaactagaaaacattagtgaaagaaagtaatgaagacacaaataaatggaaagacatcctgttctcatgaattggaagacttaatagtgttaaaatatccataccattcaaagaagtctacaaggctggcgcagtagctcacacttgtaatctcagcactttgggaggccgacgtgtgtggatcacttgaaaccaggagttagagaccagcctgggcaacatggtgaaaccccatctcaactaaaaatacaaaattagccaggcatattggtgtacacctgtaatcccagcactttgggacgctgaggaaggcagattacttgaggccaagagttgaagaccagcatgggcaacatggtgaaaccctgtctctactaaaaatacaaaaaagttgtcgggtgtggcggcactcacctgtagttccagctactcgggaggctgaggtgggaggattgtttgggcctgggaaatgaaggttgcagggctgcagtgagccgagattgtgccactgccctccagtctgggcaacagagcaacattctgtctcaaaaacaacagcaacaacaacaaagtaatctgcagcctcaatcctagacccatcaaaatcccagtgacattttttacagcaatagagaaaacaattctaaaattcatatgtagccacaaaagacccagaatagccaaagcaatcttgagaaaaaagaacaaagctgtgaggtcagagccaccacagagaataggtctagtggagctttggaggtgggccccccccactccccaagaacccagaactgtagagctaccagcaagcaacagcagcttgggtgcctgcaacccctgagagattgctgtgtgggctgagcccagcaagcttgtgggggcggggctacctgaagccttgggggcccaatccctaccccagtgtgcccaaaggtggtgcataccgtcaaagataattgtggaggtttaagacaatgttgtttgccctgtgggcttttggatttgctgggaactgctattccttttttctttcctgttgctccctttaggaatgggaacattcatcttctgcctgtcccactgttgtattttggaagtagataacttgtgtttgtttttgagatggagtctcactctgtcactcaggctggagtgcaatggtgcaatcgcggctcactgcaacctccacttcctgggttcaagcgattcttgtgcctcaccctcctgagtagctgggactacaggtgcgtgccaccactcctggctaatttttgaatttttagtagagacggggtttcaccatgttggccaggctggttttgaactcctgacctcaagcgatccacccaccttggcctcccaaagtgctggggttgcaggcgtgagccaccgcatccagccgagataatttgttttgatttcacaggttcacagctggaggaatttgctttagaatgaactgtgcttacagtatcacccatatctggtttagacgagactctgggctttgaacttttgagttggtactggaacaaattaagactatgggtctattgagatggaatgaatgtattttacatgtgagaagggtatgaatttggtggaccagaggcagaaggctgtggtttgaatgtgtccccaaaaagcatgtgttaaaaacttaattcccaatgcaacagtgttgggaggtgaggcctaatgagaggtgattaggccatagggcagagtgaaggaattaatgctattatcacaagagtgggttcactataaaagggggagtttaaccccctgtattagtctgttttcatgctgttgataaggacatacccgagactgggcaatttacaaaagaaagaggttgaatggactcacagttacacgtggctgaggaggcctcacaatcatggtggaagatgaagggcacatctcacatggcggcagacaagagaggagagcttgtgcaggaaaactcccctttataaaaccatcagatctcatgagacttattcactatcgtgagaacagcatgggaaagacctgcccccatgattcaattacctcccaccaggtctctcccacaacaggtgggaattcaagataagatttgggtggcgacacagccaaactatatcattctgcccctggcccctccaaaatttcatgtcttcacatttcaaaaccaatcataccttcccaacagtcccccaaagtcttaactcattccagcattaactcagaagtccacagtccaaagtctgatctgagacaaggcaagtcccttccgcctatgagcctgtaaaatcaaaagcaagttagttacttcctagatatgatgggggtacaggcattggctaaatacaactgttccaagtgggagacattggccaaaacaagggggctacagaccccatggaagtcagaaatctagtggggcagtcaaatattaaagctccaaaatgatcttctttgactctatgtctcacatccaggtcacactgatgcaagaggtaggctcccatggtcttgggcagttccacccctgtggctttgcagggtacagactccttcccagcagctttcatgggcttgtgttgagtgtctgtggcttttccaggctcatggtgcaagctgttggtggatcgactattctggggtctggaggatagtggccctcttctcacagctccactaggcagtgctccagtggggactctgtgtgggggctccgaccccacatttcccttctgcactgccctagcagaggttctccatgaggactttgcccctgcagcaaacttctgcctggacagccaggcatttccatacatcctctgaaagctaggcagaggttcccaaacctcagttcttgttttctgtgcacctgcaggaccaacaccacatggaagctgccaaggcttggggtttgcaccctttgaagcaacggcctgagctgtaccttggctccttttagccacggctggaaaggctgggagtccctaggctgcacacaggagggggtgccctggacccagcccaggaaaccatttttcccttttaggcatccaggcctgtgatgggcgggcctgccccgaacgtctctgacatgccctggagacattttccccattgtcttggtgattaacattcggttcctcgttacttatgcaaatttctgaagtggcttgaatttctccccagaaaatgggggtttcttttctatcacatattcaggctgcaaatttttcaaacttttatgctctgtttgtttcctcttgaacacttagctgcttagaaatttcttccgccaggtatcctaaataatctctctcaagttcaaagttccacagatctccaaggcaggggcaaaaagccaccagtctctgctaaagcatacctttgctccagttcccaacaggttcctcatctccatctgaggccatatcagcctggaatttatttttcatatcactaccagcattttggtcaaagccattcaacaaatgtctaggaagttccaaacttccccacatcttcctgtctcctttagagccctccaaactgttccaacctctgcctgttacccagttccaaagttgcttccacatttttgggtatccttatagcagcacccaactcctggtaccaatttactgtattagcccctttataaaaccattagtctaagggaggagaccacccctcatattgtcttatgctcaatttctgcctccaaagaaagaagaagtaaaaactaaaaggcagaaatgaaatccataggctgccacaccctgggcctggttaaagattgacccctgacctaaccagttatgttatctatagattccagacattgtatggaaaagcattgtgaaaatccctgtcctattctgtcccgttccgattaccagtgcatgcagcccccagtcacgtaccccctgcttgctcaattgatcatgactctctcacgtggacccccttagagttgtaagcccttaaaagggatgggaattgctcactcggggagctcagtttttggagatgtgagtcttgctgaagctcccagctgaataaagcccttccttctttaactcggtgtctgagggattttgtctgaggcttgtcctgctacattacttggttccctgaccagttagaaaggtgattaatggatggtggaggcagccccttaggcagcttaggcctgccctgtggagcatccctgcaggggactccagccagcttgagtgacgcggatcctgagagtgccccggggtaggcaattaccccagtggaacgcctcaccagagcagcatgtggcaggcccctgtggaagatcaactcagtggctgaacaccgggaaggaactggcacttggagtctggacatctgaaacttggtaagactggtctttggaacttgcccactccatttcaatggaagcgtggcctgatcacccacgatgtgcctgtaccggcactttggtttttgtttttgacttgacttgggttgcttgatactttggttttggttttgacctggcttagatttctggatactctgattttggttttgattctggtttggtgtaaactgtaaaagtgtgtgtgtgccctttttacccgttctttgttttgtggtgtgtgtgtggtgtgagagtggtgttttgtcttgaggaagcatgggtcgggcacaaggtaagcccaccccactaggaactatgttgaaaattttcaagaaaggatttacgggagattacagtgttactatgacaccaggaaaacttagaactttgtgtgaaatagactggccagcattagaggtgggttggccatcagaaggaagcttggacaggtcccttgttttaaaggtatggcacaaggtaacctgtaagccagggaacccagaccagttcccgtagctagacacttggttacaggtggttttagacccccccacacacacagtggttgagagaacagcagcataagcggctggcagaggcaaggaaagaccagcagagggagagagaggaaagagacagagaggaaagaggcaaagagagagaggaagagacagagagacaaagagggagtcgaggagaaaaagagaggaagagacagaggcaaaaggaaagtcaaaaagagagacagaaagtcaaaaaaagaaagagagaaatatacaagtagttaaaaaaaaaaaaaacagcgtaccctatctattcctttaaaagcccgggtaaatttaaaacctataattgataattgaaggtcttctccgtgaccctacaacactccaatacaaccttgttgtaagtgtaaacaagggcgtagcctgaaagcattgaggccactgactacctgtagccttcctatcaaaaatccttaacccagtaacctgtggatggcccaaatgcattcaatctgtagtggcaactgctttgctaacagaataaagtagaaaaataacttttagaggaaatctcattatgagcacacctcactagttcagaagtatcctaagcgggggaaaaaaaaagatgatttaacattaaccactgaaaattcccttaacccagcaggtttcctaacaggggatctaaatcttaattaccatacaaaggtctgatcagacctaggaggaactcccttcaggacaggatgatagatgcttcctcccaggtaattgaagaaaaaaaagccatctataccaattctaagttaatttggactaaacaaggtcttattaatagcaaaggataattgaaatcccaaacttacaagattttcaacaaaagtaaagtttgctaaaagttaacaatgtaacatgtattataataacttctaatcttgtggccttagacaatctagcccacagacataaaggaagttcactttggaaaagaatggttatcttagaagaaaaaaaaaaaggggggaaaagatgggggcagagtttatgtaaaaagaatattatatggtaaattcttgtcctgaaataaattaactggttgtttaaagaaagaaatgtttgtaataagtctgaaagttgaggcaggtcaaagaattgtctgtgaaagtcatgaaagagaaaaaatatatattataaaaaaagaatttatgcaagaaatgttgtataatttaaaagtaactaagcctcctgaatgtaaaactattgaaaaaatagtttatgtgcaaggtgtataaggaaagtaaaatatacctttggtaaaaggattataaggtggcataagaatgtaaatttttacctacattaaaaggttaaaacaaatttgttttgaaggtttaagcaagttttaaaatgttaattgtaaaaaaaattctgcgtgtaaacatattagctaaagttaaaggggtatcatccagtttttctgtgaagtgaacattaaaataaaaacacaacgtgtttctcttaaagcactaacctgctctttaacacagattataaaaggttaaaaagagtctataaaaatcttaccttatggtctgacattaaaaactgaataaatatgtctgcaaagttttattaaaactaagtttaacattggccgggcgcagtggctcacgcctgtagtcccagcactttgggaggccgaggcgggcagatcccaaggtcaggagatcgagaccatcctggctaacacggtgaaaccccgtctctactaaaaatacaaaaaattagccgggcgtggtggcaggcgcctgtagtcccagctactcgggaggctgaggcaggagggaggcagagcttgcagtgagccgagatggagccaccacactccagcctgggtgacagagtgagactccatctcaaaaaaaaaaaaaaaactaagtttaacattaataacacactaatataaaggtgaaatttagcttatctggtataaaaatcatacaggaagcattatcaaatataaaatggtgtttgacttctttggtccaaaaactaataaaaataggtgctaaaggaaatttctcagtagaaagtcaccaaggactataatgtccactgctgatgtccccacatttaaaacaaaaggtcagtttcttaaaaattatatacttggttaatcctccacttccctttccctcaaaactaaaagtcttttagcacatgtaccacccctagaatttccagtaaaccagcaccagcaccagcctgaagatcacgttctcatcaaaggatgaaaaaaaaggaaactcgagccagcctaggaaggaccctatcttgtgctgctaaccaccgagactgctgttcgtacagcgaaaaaaggatggactcatcacacctgagtcaagaaagcgccaccccctccagaatcatgggccatagtcccaggggaaaaccctaccaaactaaagctaagaaaaatttaactctttcatctattctattactctttcttctttcctcgctctattgctgaccatctagttattaacataaccaagtcaattttacctcagactattgcatttaatgcttgtcttgttataccctgtggggacctgccaagtcaaagacagttctgtacttgagaaaaatacatctgtccctcctgactctcctcagactgggcattggtaaattaggaccatttaatcaggggaaatttcaataaagactccagtgtcaaccaggagtcttgctccccaatgtagagcttttatgctgtacttggtccaacattctgtggaccactaaagtgcaaggatggactgccccaactggtttttgtaatttcctaaaatcatacattcattttactagaggatcatagaagttaaagacttaaaacaaactttggcaattaagacaggataccaagatgcaaatgcctggttggaatggatcaaatattccgtctgcaccttaaacaaaagcaattcttatgcttgtgcatatggcaggccagagtcccagattgtcccctttccactaaggtggtcctccagtggaccaggcatgcgctgcatggtagctcttttccaggattctacagcctggagtgataagtcgtgccaagctctctctgctatatcccaaagtacggcaccctgtgggtcagcccccaagggccatccagcttccgtctcccaacactaacttcacttcttgtctctcacgacagggaggaaacttagcattccttggagacctgaagggatgcagtgagcttaataattttcaagagcttatcaatcagtcagcgcttgttcatccctgagtggatgtgtggtggtattggggtggacctttattgggcactctgccgaataactggagtggcacttgtactttagtccaattggctatccctttcaccctggcatttcatcaaccagagggaggaaaaataagacattgtaaagcgagagaagccccttataggtctttcgactctcatgtctatttagacgcaattggagtcccatggggaataccagatcaatttaaagcttgaaatcaaatagctgcaggatttgagtcaatattttggtcggtgacagttaataaaaatttagattggataaactacatctattacaaccaacagcaatgagcttttcatgagttaaaagaaaaactcatgtcggccccagccctggggctacctgacctgacaaaaccctttacactctatgtgtcagaaagagaaaaaatggcagttttggagttttaacccagactgtggggccctctctcaaaacaactagacggggtttccaaaggctggcccccatgtctaagggccctggcagcaatggccctgttagcacaagaagcagataaactaacccttgggcaaaacctgaatataaaggccccccatgctgtggtaactttgatgaataccaaaggacatcactggataacaaatgctagattaaccaagtaccaaagcttgctatgtgaaaatccccacataaccactgaagtttgcaacaccctaaacccagctaccttgctcccagtatcagagagcccagttgaacacaactgtgtagaggtattggactcagtttattctagtgggcccaacctttgagaccatccttgaacatcagtagactgtgagcggtatgtggacgggagcagcttcgccaacccctgcaaagtaactctgaagaagtcgacaagccctgctccagtcacacccggaagctgactggtccacgcacggctgaagcatgagaaaactcatcgcgggactcattttccttaacatttggacttgtacagtaaggacttcaactgaccttccttggactgaggactgttcctagtgtatacatcaagtcactgaggtaggacaaaaggttgctatggtcctattattttatggttattataagtgtactagaactctaaaaagaacttgcttgtataatgttattctatacaaggtacatagcccaggaaatgaccaacctaatgtgtgttatgacccatctgagcctcccatgaccacagtttttgaaataagattaagaactgaggactgatgggggctcataaacaatacgagtaaagtgttagccaaaacagaagaaaaaggggtgcccaaacaagtcaccttgaaatctgatgcctgtgctgtcattaatagtaataagttaggaatatgatgtggttcccttaattaagaaagaggctatatggcagaacgtaagtacacttgtcatgaattaagactgtgtggaaataaatgtggatagtggtcttgtgtcatttaggctacttggataaaaaataaaaaaaatcctgtccatcttcagaaagggaaaagtggcccttcctgtaccagtggtcagtgtaaccccttagaactggtaataaccaaatcccttgatccttgctggaaaaaaggggagcatgtaaccttaggaactgatggggctggactggatcctcgagtaaatattgtggtttgagtagaagtttataaacactctcctgagccagtatttcaaaccttctatgatgaactgaatgtgccagtaccagaaattccaggaaaaacaagaaatttgttttttcaattagccgagcatgtagcccagtctctcaatgtcacttcatgttatgtatgtggaggaacggtaatgggagaccaatggccatgggaagcccaaaaattagtacctacagacccagttcctgatgaattcctggctcaaaaaaattaccctgataatttctgggtcctaaaagcctcaatcattagataatactatatagcaagagtggggaaggacttcacccttcctgtgggaagactcagctgccttgggcaaaaactgtataatagtactacaaaaacagccacctagtggagttcaaaccacactaagaaaaatccatttagtaaattcccaaagttgcaaaacgtgtggacccacccagagtcccaccgggactggacagcccccactagattatactggatatgtgggcatagaccttatgtcaaattacccaaccagtgggcaggtagttgtattattggcactattaaaccatctttcttcctactgcccataaagacaggcgaactcctgggcttccctgtctatgcttcccacgcaaagagaagcatagctattggaaattggaaagataatgaatggccccctgagagaatcatacaatattatgagcctgctacttgggcacaagacggcttgtggggataccagatccccatttacatgctcaaccgaatcatatggttacaagctgtcttagaaataatcactaataagaccagcagagccttgactattctggcccggcaagaaacccaaatgagaaatgctatttatcaaaatagattggttctcgactacttgctagcagctgaaggaggggtctgtgggaaatttaaccttactaattgctgtctacacatagatgatcaagggcgagtagttgaagacatagttagaaatatgacaaaattggcacatgtgcccgtgcaaatgtggcatggatttgatcctggggccatgtttggaaaatggttcccagcactggaaagatttaaaactcttataatgggagttataatagtaatagaaacctgcttactgctcccttgtttactatctgtacttcttcaaacgataaggagcttcatcgctaccttagttcaccaaaatgcttcagcacaggtatgctatatgaatcactatcgatctatcttgcaagaaggcatgggtagtgagaatgaaagtgagaactcccactattgagtgagattctcaaagcggggaaataagggaggagactacccctcattttgtcttattcccaatttctgcctccaaagaaagaagaagtaaaaactaaaaggcagaaatgaaatccacaggcagacaacccagcgctgcaccctgggcctggttaaagatcgaccccaacctaacgggttatgttatctataaattccagacattgtatggaaaagcactgtgaaaatccctgtcctgttctgttccattctgattactggtgcatgcagcccccagtcacctacccctgcttgctcaattgatcatgaccctctcatgtggacccccttagagttgtaagcccctaaaagggacaggaattgctcactcagggagctcggtctttggagacatgagtcttgccgaagctcccggctgaataaagcccttccttctttaactcggtgcctgagggattttgtctgtggcttgtcctgctccaagtccctttataaaaccattagatctcatgggacttattcactatcatgagaacagcactggaaacacctgccctcatgattcaattacctcccaccaggtccctcccaaaacatgtgggaattcaagatgagatttgagtggggacatggccaaatcatatcacccccattctctctctctctctgtcacccttgctttgcccttctgccatggaatgatgcagcaagctttgcctagttgctggtcccttgatcttggactttccagcctccagaaccttgagccaatgaaattctgttcattataaactacccagtctggccaggtgtggtggttcacgcctgtaatcccagaactttgggaagccaaggcaggcgggtcacgaggtcaggagttcaagaccagcctggtcaacatggcaaaacctcgtctctactaaaaatacaaaaattagccaggcatggtggcatgtgcctgtaatcccagctactctggaggctgaggcaagagaattgcttgaacccagaaggcagaggttgcagtgagccaagattgcgccactgcactccagcccatgcaacagagcaagactctgtctcaaaaaaaaaaaaaaaaaaattacccagtctgtagtattctgttacagcagcacaaaacagactaagacatatggtcttagtctgatctttgagtagattgtcaatcagtagattgactgatctttgagtagagtgtcaagaatatacaatggaaaaatgatagtatcttcaacaaacattgttggaaaaaccagatatccacatgcagaagaatgaaattggacccctatcttacaccatacacaaaaatcaactcaaattagctgggcgtggtgactcacgcctgtaatcccagcactttgggaggctgaggcgggcagattgcctcaggtcaagagttagagacagtttggccaacatgctgaaactccatctctactaaaaattcaaaaattagccaggcatggtggtgcacgcctgtagtcccaggtactcgggaggctgaggcaggaggattgcttgaacctgggaggcaaaggttgcagtgagctgagatcgtgccactgcactccagcctggggaacagagcaagactccgtctcaaaaaaatcaactcaaaatggattaaagacttaaatgtaataccggaaactgtaaaactcctagaagaaaacacaggaggaaatcttcttgacattggtgttggcagtgatttattggatatgacacaaaaagcacaggcaacaaaagctaaaatagacaagtgggactacatcaatccgaaatattctgcacagcaaaggaaacaacacagagtgaaaagggatcatacagaatggaacaaaagatttgcaaaccatttctcgcttaaggggttgatatccaaagtacagaagaaactccaacagctcaatagcaaataacaaaaagaacaacaatttttttttttttgaaacagagtcttgctctgtttcccaggctggagtgaagtggcacaatctcggctcactgcaacctctgcctcctgggttcaagcgattctccttcctcagccccgcaagtaactgggattacaggcaccttccaccatacctggctaattttttgtatttttagtagagatggagtttcgacatgttggccaagctggtctcaaactcctgacctcaagtgatctgcccgcctcggcctcccaaagtgctgggattacaggtgtgaaccaccgtgcctgaccaaaaaaataataatttgattaaaaagtggacaaaagacttctccaaagaagacatacaaatgccaccaggggcagggtgcggtggctcacatctgtaatcctatcactttgagaggccaaggcaggaagattgcatgaggctaggagttcgagaccagcctgggcaacatggtgaaaccccgtctctacaaacacatacaaaaattagccaggtgtggtggtgcatgcctgtagtcccagctacttggaagggtgaggcgggaggatcactcaatcccaggaagtcgaggttgctgagctgtgattaaacaactgcactccagtgggtgacagagcgacactccgtctcaaaacaaaacaaaacaaacatcattttcagaccagcttgggagccagccctactctctctcaaaagcctcattgtgtgagtaataaatttttcataccttcttggtgtatgcgtggcatcagcaggcttgacatttgaaccaaatttgctgtgtgtgtgtattcatggatccacctcacctctgcagggtgatacagtaatgaccttgacaaaaggggtactgacaaaaagaaatgcagtccctgacatccaagaactggcctggttcatcacctaagccttggtgttgtgagcagctgacctgacactcccatcggtgtctcctgttgatcatgaacaattccacaaaatattaacatcagatgaagctgctctgcggtcatggtagatcaagacaaaaacaagaccagtctggaatcaagtctgagacacagaaaaaaacatggacgttgtccaaaccacaaaatggccaaacatccgtccatcctggctgatgtgagtggttcctgcttccttatcagttatagctttcatccacttcattccttttgccttgtagatataaatcaagatattacatcctagaattactcctactttctgacaggaggcaatccagagcaaagtcctgcttctttaaccctctctgaaatcacctaacacaaactccaacccagtaataccttttcttttcttgtcttgtcttttcttcttcttctttttttttttcccgagacggagtcttgctctgttgcctagaactggagtgcaatggtgtgatctcagctcactgcaacctccgcctcccaggttcaaacaattctcctgcctcagcctcctgagtagctgggattacaggtgcaccccaccatgcctggctaatttttttgtatttttagtagagacagggtttcaccatgttggccaggctggtctcaaactcctgacctcgtgatccgcctgcactggcctcccaaagtgctaggattacaggcatagccactgtgcccagcctctttttttctttttctttttttttttttttttgttgttgttttttttgagacgatcacagctcactgcagcctcgaactcttggggtcaagcgaccctccctcctcagtctcctgaatagctgagtctacaggtgcatgccaccatgcctatctacttttcaaattttttttagagatgagggtctcactaggttgcccaggttggtctcgaactcctgggctcaagtgaatctcccacctcagccttccaaaacgctgtgattacaggtgtgagccaccgtgtccggctcccttttctaacacccttttaatgagatgctccatggtttcccacgatgtggatgcttcatcattgcaatgagttaataaatccaacttccgggccaggcacagtggctcacgcctgtaatcccagcacttggggaggccaaggtgggtggatcacctgaggtcaggagttcgagaccagactggccaacatggcaaaacccccgtctctactaaaaatacaaaaaattagccaggtgtggtggtgcatgcttgtaatcccagctacttgggaggctgaggcaggagaattgcttgaacctgggaggtggcggtcacagtgagccaagattgcacagctgcactccagcctaggcaacaagagcgatactccacctcaaaacaaaacaaaaaaaaaattagccgggcatggtggcccatgcctgtagtcccagctactcaggaggctgaggcaggagaatcgcttaaacctgggaggtggaggttgcagtgagccaagatcgcagcactgcactccagcctgggcgacagagcgagactccgtctcaaaaaaaaaaaaaaaaaaatctaattttggtaaactaccactatgctcctggtggtctttggctggagggcattggtgttattcacttagaaaatccaagagaatcataaaaaaaaaaaaaaaaactcttagacttaataagagaagtcagcaaggtgaccaaaaccaaaaatgaatacaaaatacaaagatggggccgggcgcggtggctaatgcctgtaatcccagcactttgggaggccgaggcgggtggatcacgaggtcaggagattgagaacatcctggctaacatggtgaaaccccgtctctactaaaaaagtacaaaaaattagccgggcgtggtggtcggcgcctgtagtcccagctactcgggaggctgaggcaggagaatggtgtgaacccgggaggcggaggttgcagtgagccgagatagcaccactgcacttcagcctgggcgacagagcgagactccgtctcaaaaaaaaaaaaaaaaaaaacaagaaaaaaaaaaaacaaagatgggtatagccttccttgacagacacctgaaatcagaaaatgtaagagggcagggtaccgttgatcacagtaacaaaatttatcaacctcttgtaagcaagaaaagtgtgagctcggccaggcatggtggctcatgcctgtaatcccagcactttgggaggctgaggtgggcagattatgaggtcaggagatcgagaccatcctggccaacatggtgaaacctcgttcatactaaaatacaaaaaattagctgggtgtggtggtgcacgcctgtagtcccagctacttgggaggctgcagcaggggaatcgcttgaacctgggaggcggagattgcagtgagccgagatcgcgccactgcactccagcctggtgacacagcgagactccgtttcaaaaaaaaaaagaaaagaaaatatgagctctatacattttgacagaagaaaaaaatgaccagaataaatggaaaggtatatccgtatttcaggcaaaaagaatcaacactggaggccgagtgcgcctgtagtctcagctacctgggaggctaaggcagggggattgcttgagcccaggaggtcgaggtttcagtgagctaagatggcaccactgcactccagcctgggtgacagtgagagtctatctcaaaataaataaataaaaataaaagaaagaaagaaacaaaaaagccatgtcccgtagtacctcaggcacctccctgtgacttgaacagcatgatttcatgttgccaggttttttgttttttggcttttttttttcttgaggcagacttttgctcttgttgcccaggctggagtgcaatggtgtgatctcggctcactgtgacctccacctccaggattcaagagattctcctgcctcagcctcccaggtagctgggattgcagatgtgcaccatcatacccggctaattttgtacttttttttagtagagatggggtttcaccatgttggtcaggctggtcttgaacttctgatctcaagtgatccacccacctcggcctcccaaagtgctgggattacaggtatgagccaccatgcctggccatgaagccaggtttttgaactttgtataaagggaatcatatagtattatccttctgtgtcctgcagcttcttttgcccaacattgtttgtgaggtccatccctgttatgcacatggaattatcctttcttcagtttcattgtaagtcagaactgtgaagggtttgagtttaccctacttgcaagctaaaaagttagcctgccaaattttgcacagacacacatacatgcacatgtgcatacacacagatatataaaacacaagaccccagcctgggcaacatagctagactctgttgctacaaacaaattaaaaaaaattaggggcttgatggcacatgcttgtagtctcagctacttgggaggctgaggtgggaggattgcttgagtcctggaggtcgaggctgcagtcagctatgaacacgacactgcactccagcctgggtgacagagtgaaattttgtctcaaaacacacacacacacacacacacacacacacacacacacacgatcatgaatcagaaaaatggatcattgattaccacaaaatcagcagccagagctataccttgcatcaattcctcatgccccagctcacacgaagccagatatttcctgtgcgttcagtgggttgcatcatgcgggaagaaactaaaattaggagactaagctgttgtgaacttgctgacacacctgcctgtcctcccctccatagccagagattattcattaccctggaatgtcagcaatctcctggttgtggggaggggtggggcatttctatgtttcttacgctgaactgtctctaaatctctccagagggatgcactatctcaatatccaaggctgctgttcaaacattgttcagaaggcctagcccatgcaggaacatgagtgatctgtgcagatctgcctcccaacacattgctatatagtatttccttgcgtgaatataccatcatttttgtatccattctttggctgatgtgcatttgggtagtttttagtttggggctattatgaaaaaagttgctataaacattattttatgtctttggttaacatttatacacattctgttctcgcttcatttcattcgtttgatcttccatcactgataccatttcttccagttgattgaatcggctactgaggcttgtgcattcgtcacatagttctcgtgccttggttttcagctccaccaggtcctttaaggacttctctgcattggttattctagctagccattcgtctaattttttttcaaggtttttaacttctttgccatgggttcgaacttcctcctttagctcggagtagtttgatcgtctgaagccttcttctctcaactcatcaaagtcattctccgtccagctttgttccattgctggtgaggagctgtgttcctctggaggaggagaggcactctgatttttagagtttccagtttttctactctgttttttccccatctttgtggttttatctacctttggtctttgatgatggtgacgtacagatgggtttttggtgtggatggcctttctgtttgttagttttccttctaacagtcaggaccctcagctgcaggtctgttggagtttgctggaggtccactccagaccctgtttgcctgggtatcagcagcggagggtgcagaacagcggatattggtgaacagcaaatgtcgctgcctgatcgttcctctggaagttttgtctcagaggagtaacggcccgtgtgaggtgtcagtctgagaaaaaagaataaaaagaaacgaacaaagcctccaagaaatatgggactatgtgaaaagaccaaatctacgtctgattggtgtacctgaaagtgacggggagaatggaaccgagttggaaaacactctgcaggatattatacaggagaacttcctcaatctagcaaggcaggccaacattcaaattcaggaaatacagagaacaccacaaagatactcctcgagaagagcaactccaagacacataattgtcagattcaccaaagttgaaatgaaggaaaaaatgttaagggcagccagagagaaaggtcggcttacccacaaagggaagcccatcagactaacagctgatctctcggcggaaaccctacaagccagaagagtgggggggccaatattcaacattcttaaagaaaagaattttctgccgggtgcggtggctcacacctgtaatcccagcactttgggaggccaaggcgggagaatcatgaggtctggagtttgagaccagcttggccaacatgttgaaaccctgtctctactaaaaatacaaaaaaaaaaattacccgggcgtagtggcagacacctgtaatcccagctactcaggaggctgaggcaggagaatcgcttgaaaccagaaggcggaggttgcagtgagcccagatcacaccactgcactccagcctgggcaataagagcgaaactctgtctcaaaaaaaaaaaagaaaagaaaaagaaaagaattttcaacccagaatttcatatccagccaaactaagcttcataagtgaaggagaaataaaatactttacagacaagcaaatgctgagagattttgtcatcaccaggcctgccctaaaagagctcctgaaggaagcactaaacatggaaaggaacaaccggtaccagccactgcaaaaacatgccaaattttaaagaccattgaagctaggaagaaactgcatcaactaacgagcaaaataaccagctaacatcataatcacaggatcaaattcacacataactattaaccttaaatgtaaatggactaaatgctccaattaaaagacacagactggcaaattggataaagagtcaagacccatcagtgtgctatattcaggagacccatctcacgtgcagagacacacataggctcaaaataaagggatggaggaagatctaccaagcaaatggaaaacaaaaaaaggcaggggttgcaatcctagtctctcataaaacagactttaaaccaacaaagatcaaaagagacaaagaaggccattacataatggtaaagggatcaattcaacaagaacagctaactatcctaaacatatatgcacccaatacaggagcacccagattcataaagcaagtccttagtgacctacaaagagacttagactcccacacaataataatgggagactttaacaccccaccgtcaacattagatagatcaacgagacagaaagttaacaaggatatccaggaactgaactcagctctgcactaagtggatctaatagacatttacagaactctccaccccaaatcaacagaatatatgttcttctcagcaccacaccgcacttattccgaaactgaccacatagttggaagtaaagcacttctcagcaaatgtaaaagaatggaaattatgacaaactgtctctcagaccacagtgcaatcaaactagaactcaggattaagaaactcactcaaaactgctcaactacatggaaactgaacaacctgctcctgaatgactactgggtacataacgaaatgaaggcagaaataaagatattctttgaaaccaacgagaacaaagacacaacataccagaatctctgggacacattcaaagcagtgtgtagagggaaatttacagcactaaatgcccacaagagaaagcaggaaagatctaaaattgacaccctaacatcacaattaaaagaactagagaagcaagagcaaacacattcaaaagctagcagaaggcaagaaataactaagatcagagcagaactgaaggagatagagacacaaaaaacccttcaaaacatcaatgaatccaggagcttgttttttgaaaagatcaacaaaattgatagaccgctagcaagactaataaagaagaaaagagagaaggatcaaatagaagcaataaaaaatgataaaggggatatcaccaccgatcccacagaaatacaaactaccatcagagaatactataaacacctctacgcaaataaactagaaaatctagaggaaatggataaattcctcgacacatataccctcccaagactaaaccaggaagaagttgaatctctgaatagaccaataataggctctgaaattgaggcaataattaatagcttaccaaccaaaaaaagtccaggaccagatggattcacagccaaattctaccagaggtacaaggaagagctggtaccattccttctgaaactattccaatcaatagaaaaagagggaatcctccctaactcattttatcaggccagcatcatcctgataccaaagcctggcagagacacaacaaaaaaagagaattttagaccaatatccctgatgaacatcgatgcaaaaatcctcaataaaatactggcaaaccgaatccagtagcacatcaaaaagcttatccaccatgatcaagagggcttcatccctgggatgcaaggctggttcaacatacacaaatcaataaacataatccagcacataaacagaaccaacgacaaaaaccatatgattatctcaatagacgcagaaaaggcctttgacaaaattcaacaactaaaactctcaataaattaggtattgatgggacgtatctcaaaataataagagctatctatgacaaacccacagccaatatcatactgaatggacaaaaactggaagcattccctttgaaaaccggcacaagacagggatgccctctctcaccactcctattcaacatagtgttggaagttctggccagggcaatcaggcaggagaaggaaataaagggtattcaattaagaaaagaggaagtcgaattgtccctgtttgcagatgacatgatttatatatctagaaaaccccatcatctcagcccaaaatctccttaagctgataggcaacttcagcaaagtctcaggatacaaaatcaatgtgcaaaaatccaagcattcttaaacaccaataacagacaaacagccaaatcatgagtgaactcccattcacaattgcttcaaagagaataaaatacctaggaatccaatttacaagggacgtgaaggacctcttcaaggagaactacaaaccactgctcaatgaaacaaaagaggatacaaacaaatggaagaacattccatgctcatgggtaggaagaatcaatatcgtgaaaatggccatactgctcaaggtaatttatagattcaatgccatccccatcaagctaccaatgactttcttcacagaattggaaaaaacttctttaaagttcatatggaaccaaaaaagagcccgcatggccaagtcaatcctaagacaaaagaacaaagctggaggcatcacgctacctgacttcaaactataccataaggctacagtaaccaaaacagcatggtactggtaccaaaacagagatacagaccaatggaacagaacagagccctcagaaataatgccgcatatctacaaccatctgatctttcacaaacctgagaaaaacaagcaatggggaaatgattccctatttaataaatggtgctgggaaaactgactagccatatgtagaaagctgaaactggatcccttccttataccttatacaaaaattaattcaagatggattaaagacttaaatgttagacctaaaaccataaaaaccctagaagaaaacctaggcaataccattcaggacataggcatgggcaaggacttcatgtctaaaacaccaaaagtaatggcaacaaaagccaaaattgacaaatgggatctaattaaactaaagagcttctgcacagcaaaagaaactaccatcagagtgaacaggcaacctacagaatgggagaaaatttttgcaatctactcatctgacaaagggctaatacccagaatctacaatgaactctaacaaatttacaagaaaaaaacaaaaaaccccatcacaaaaagtgggcaaaggatatgaacacacacttctcaaaagaagacatttatgtagccaaaagacacatgaaaaaatgctcatcatcactggccatcagagaaatgcaaatcaaaaccacaatgaaataccatctcacaccagtcagaatggtgatcattaaaaagtcaggaaacaacaggtgctggagaggatgtggagaaataggaacacttttacactgttggtgggactgtaaactagttcaacccttgtggaagtcagtgtggcgcttcctcagggatctagaactagaaataccatttgacccagccatcccattactgggtatatacccaaaggattataaatcatgttgctataaagacacatgcacatgtatgtttattgtgacactattcacaatagcaaagaattggaaccaacccaaatgtccaaaaatgatagactggattaagaaaatgtggcacatatacaccatagaatactatgcagccataaaaaatgatgagttcatgtcctttgtagggacatggatgaagctggaaaccatcattctcagcaaactattgcaaggacaaaaaaccaaacaccacatgttctcactcataggtgggaattgaacagtgagaacacatggacacaggaaggggaacatcacacaccagggactgttgtgggatggggggcgggggaggaatagcctttggagatatacctaatgttaaatgacgagttactgggtgcagcacaccaacatggcacatgtatacatatgtaactaacctgcacgttgtgcacatgtaccctaaaacttaaagtataataataaaaaaaaggataaaacaaaacaaaacaaaaaaacatttatacacattctgtttagtatatacccagaagtggcatcactgagtgatgggtgtgcacatatacagctctagtagaaactgccggctgggcatggagacttatgcctgtaatcccagcactttgggaggcgaaggcgggtggatcacctgaggtcaggagttcgagaccagcctggccaacatggtaaaatcccatctgtactaaaaatacaaacattagctgggcgttgtggcgagcgcctgtaattccagctacttgggagcctgaggcaggagaatcacttgaacccaggagacagaggtttcagtgagccaagatcttgccactgcactccagcctgggtgacaagagtgaaactctgtctcaaaaaaaaaaaaaagaaagaaagaaaaaaggaactataaaacggttttccaaaataattgttgtatccattatgctcccatcagctgtgaatgagacattctgtctctggaaatgcttaccaacagttggtattatcagattttaaattttttctctatctggggctgggtagcggtggctcacacctataatcccagcacttagggaggcgaaggcaggcagatcacctgaggtcaggagttcgagaccagcctggccaacatagtgaaacctcgtctctacttaaaaagtacaaaaattagccggacatggtggcacatgcctgtagtcccaggtactcaggaggctgaggcaggagaattgcttgaaccccggaggcagagattgcagtgagccgagatagtgccactgcactccagcctgggcaacagagcaagactccatctcaaaaaaaaaaatctttttgcctatctgatagacaggaaataacattttgttcctttaatatacagctctctgatttagtgtgagcatatttctatatatttattggccatttgggtttcctcttatgcaaaatgtttgttcataacctttgcatactttttgattgggcgtcttgtctttcccttaaaattttttaggagttctttttatatgaggggtcatctaaaagtacacggaaaatgcatttggtgaaaaaaactatatgcatggatttcaaatgttttatagttttttgttgtttttctgttttgcttttttccttcctatttttgttttgcttttatttatttatttttgttttttcttttttgaatttcaatttttttttacaccaaaataaatctgtactaacttgttataacatgtctgaacaggatctggtttgaggggttaagaaggataagacatcaatttgaaaagagcctctaccagagccacatgaattctgctaatactgaagcaagaacaaaatcaaatttatggtgatggttgggtggaagaatggtgaaaaatcattgatgctttctgaaaagtttatggggacaatgcccccaaataaatcagcagtttacaaatagataactcagcttaagaatgggccaggtgtggcggctcatgcctgtaatcccagaactttgggaggccaaggcaggccaaccgcttgagcccaggagtttaagaccagcctgagcaacatggcgaaacctcatctctacaaaaaaatggaaaaattagccaggcgtggtggcacgtgcctgtagtcccagctactactcgggaggctgagctgggagaatcacctgagccagggtaagttgaggctgcagtgagccatgatcatgccactgtactccagcctgggtgacagagtaagagtctgtctcaaaacaaaacaaaacaaaacaaaaaacagaagccaatagcaagatgaatcacatgctggaattatctgacaaggattttagagtagtcaccataaaaatgagtcaataaggaattacaaataaactggaaacaaaagaagaaatagaaattctttggccaggtgcgatggctcacaactgtaatcccagtactttgggaggccaaggcggttaggacgtttgagtccaggagctcaagaccagcctgggcaatatggtgaagccccacctctacagaaaatacaaaaagtagccagttatggtggtgtgcacttgtggttccagctacttgggaggctgagcttaggaggatcgattcagcctaggaggttgaggctgcagtgagctgtgattgcaccactgcactccagcctgggcaacagagtgagaccccatctcaaaaaaaaattatcaacatatagatgatatagaaaaagaaccaaatagaaatgatagaactaaaaattataaatgaaaattaaaactggcctggcgcggtggctcatgcctgtaatcccagcactttgggaggccaaggtgggtggatcacctgaggtcaggggtttgagaccagcctggccaacatggtgaaaccctgtctctactaaatatacaaaaattagccgggcgtggtggcgggcacctgtaatcccatctactggggaggctgaggcaggagaatggcttgaaccaaggaggcggaggctgcagtgagccactgcacttcactccagcctgggcaaaagagcaaaactccatccaaaaaaaagaaaaaaagaaaaagaaaacagaaaattaaagctaatgcaaaaggttcaatggcagaatgaatatgacagagaagtgatctggcagacagaacagtagaaagtgtccaatctcaacaacagagagaaaatacactgaaaaaaagatggacagagtctcagagacctatagggcaacaacaaagatctaagatttatgtcactggacttctgcaagaagaggagaaatagtagtgaagaaaacatatttaaagaaataatggctgaaagcttcccaaattgggcaaaggacataaacctacggattgaagttgtgcaaaccccagtaggataaaccaaacgaaacccacgcccatatgtcatcatttaacctctaaacactaaaaacaaaggaaaacccttgaaagcagctagagagaaatgacacatgaggcataggggacactgattagaatgacagtggtgttttcatctgaaactagggaaactaaaaggaagtggcatgatattcttcaagtactgaaagaactgtcaactgagagtcctacattggggaaagtctctttcaggaatgagagggaaataaagacattctcaggcgaaggaaaactaaaacaagtctgtgttaatcagttcaggctaccatgatgaaataccatagactgggtggcttgaacaacatgaattcatttctcacagttcgggaggctgggaagtcctcagtcaagatgctggctgatctggtttccagaaagggctctcttagcagcttgcagagggctgcctcctggctgtgtccttccatggtgggaggagagagaagggtaggggaaacaagctctctggtgtctcttataagggcacttgtcccatcacaagggcccctgatgacctcatctaaacccaattacttccccaaaatcccacatccaaatactgtcacatggggggtgaaggcttcaacacatgaattttgggggagacaaaattcagtccatagcaaatttgtttccaggacatctgctgttaaagaaaggtgaaaggaagctcttcaaacagaagtgaaataacagacgaaggtgtggaacttcagaaaggaaaagagaacaacaaaatgggttaaaataggagtaaatactcttctcctcatgagctttttcattttctcatgaggtttttaaaccatatttgatggttgaagcaaaacattgtaacaacatttgatacggttttcaatgtatatagagagaacacttaggacaattacattttgaaaataggataggtaaagggatctaaagggaagtaaattcctccacgtcaattacagtagtaaaacattgacattggtggactgtgataagttacacgtgcaggttgtaatacctagagcaatcactaagaagaccatacaaagtgattgtcgtagtacattctgtgctgctgtaacagaatacctgagactggataatttataaaacacatttatttcacacagttctggaggctgggaagtccaagatcaagtcaccaacaggtttggcatctgggaagggctgctctctgcttctaagacagtgccttgaatgctgcatcctctggagcgggggaacactgtgtcctcacgtggcaaaaaaggtgaaagggcaaaaagggaggcattccctccttcaagccctattctaacagcattaatctgttcataagggcagagtcctcttgacctaaacacatcccaaaagaccccacctcccaacactgctgcattggggatcaagtttagacatgaatttttggaagggacaaaaacattcaaatcataacggtgatatgctcaaaaattatataaataagtcaaaatggaattctaaaaacaatggtcatgtacccaccccaaggaaggcaaagggagagaaacaaaggaatgagaatcagagggaacaaacagaaaacaatagtaaaatatactaatttaaaccacaatgagggccaggcgctgtggcttacacctgtaatcccagcactttgggagactgaggtggggagatcacgaggtcaggagttagagaccagcctggccaacatggtgaaaccccatctcgactaaaaatagaaaaattagctaggcgtggtggcacactcctgtaatcccagctactcaagaggctgaggcaggagaattgctcgaacccgggaggcagaggttgcagtgagccaagattgcgtcactgcactccagcctgggtgacagagcaagattccatctcaaataaaaagatgaagaggctgggtgtggtggctcacatctgtaatcccagcactttgggaggccgaggcgggcagatcacttgaggtcaggagtttgagactggccaacatggtgaaaccctgtctctactaaaaatacaaaaattagccaggcatggtgatgtgtgcttgtagtcccagctactagggaggctgagacaggagaatcgcttgaacccaggaggcagaggctgcagtgagccaagatcgcgccgctatgctccagcctgggcaacagagcaagaccctgtctcaaaaataaaataaaataaataaaaataaattaaaaccaaaagacaaagttgggcacagcagtggatgcctttagtatcagctactagggaggctgagttgggaggatgacttgagcccaagagttctatgccagcctgggcaacacagtgagacacctgtctctaaaataaaaataaaatacatttttttaaaagatgaaagataatcctagcactttgggagtccgaggcgggcagatcacctgaggtcaggagttcgagaccagcctgaccaacatggagaaaccccatctctactaaaaatacaaaaaaaattagccaggcttagtggcacatgcctgtaatcccagctactcgggaggctgaggcaggagaatagcttgaacccgggaggcagagggtgcagtgggctgaaatcacatcgttgcactgaagcctgggcaacatgagtgaaactctgtctcaaaaaaaagaaaaaagaaatcaatatgttaaaataatatctgcactcttatgttcatgatatcattattcacaatagccaagataggaaatcaacctctatccaacaatgtgtgaataaagaaaacgtgggccgggtgtggtggctcacgtctgtaatcccagcactttgggaggccaaggctggtggatcacgaggtcaggagatcgagaccatcctggtcaacatggtgaaacccccctctactaaaaatacaaaaaattagccgggcgtagtggcatgcgcctgtagtcccagctactcaagaggctgaggcaggagaatcgcttgaacccaggaggtggaggttgtagtgaacggagatcgtgccactgcattccagtctgggcaacagtgcgaggctctgtctcaaaaaaaacacattaatccaccaaagagatatagcaatcctaaatgtgcatgcactaaacaagatcatttcaaattacacgaagaaaaaatgatcaggctgaaaggagaaatggacaaatccacaattataattgaggatatcaacaccacccctgcaacaaatggaattactagagagaaattcaagcaatgataaagaagaactaaacaacaccatcaatcaacagtaacaaggccaggcttggtggctcacgctcgtaatcccagcactttgagaggccaaggtgggtgggtcatctgaggtcaggagttcgagaccagcctggccaacatggcaaaaccctgtctctactaaaaatacaaaaattagccaggtttggtggcacacacctgtagtcccagctacttgggaggctggggcaggagaatcgcttgaactcaggaggcagaggttgcagtgaaccaagatcacatcactgtactccagcctgggcgacagagcaagattctgtgtcaaaaaataaaaaacaaaaaaacagtattgaaatgacattatagaacattcaacccaacaacagaatacatgttgtttttgagtgcctgtggaacgttcagcaagatagaacattacctgggccataaaacaaacctcaacaaatttaaaaaaactaaaatcagagggagtatcttctctgattatatagaatcaaattagaaatcataacagaaagacaacaggaaaaccccctaaacacttatttaaaaacatgcttctcaataacccatgggtcacaaagtaagtcaaaaggaaattttataaatacacagaactggaaaaaatgaaaatacacctgtcaaaatatgtgcaatgcatgagtgtagtgttgagatggaaatttatagaactaggtacttacattagaaaagaggaaaggtctcaaatcaataatctaagttcctacttcaagaaactagaaaaagaagagcaaaggaacctcaaggaagcagaaggcaggaaataataaagataagaacagaaatcaatacaattaaaaacagaaaaacagcagagaaaacaatcaatgaaacaaaaacttggatctttgaaaagatcaatacaattgaaaaacttgtagcaagactggcaaagataaagagagaagatacaaatcatcaatattaggaatgaaagaggggatgtcactacagattttgcagtcactgaaaggatactgcaagttccatgaagaagaactctattctcataaattcaacaacttagaagaaatggaccaattactccaaaagcacaaacgaccaaactcaagcaatataaaataggcgatctgaataattctacaaccattaaaaatttaaatttattatttagccctcagaaaagaaatcttgaggcccagatgttttcactggagaattcctcctaacacttaaagcgaaattagtgtcaattttgtagactgtcttccggataatagaagcaaagggaacacctcccaactcattgtatgaggccagttttaccttgctaccaaaaccagggaaaaaagcatacacacaaaaggaaagctacaaactgatatctcttgtgaatttaggcacaaaaaccctcaacaaaatattaggaaatcaaatccaggaatgttttaaaggaattatacaccatgaccaagtaggatttgttccaggtatgaaaggctggttcagtttttgatactcatcaatgtcatccaccacgacaggttaaaaaaaaaaagcatatgatcatatcaattgatgagaaaacaaaaacaacccagtggccaggtgtggtggctcacgcctgtaatcccagcactttgggaggccgaggcaggtggatcacttgaggacaggagtttgagaccagcctggccaacatggtgaaaccccgcctctactaaacatacaaaaaaattagccgggcgtggtagcgggcacctgcaatcccagctactcaggaggctgaggcaggagaatcgcttgaacccaggaggcagaggttgcagtgaaccaagatcacgccattgcaatccagcttgggcaacaagcgcaaaactccatctaaaaaacaaacaaacaaaaccagttttttattttttgttttcttttttttttgagacagagtctctctctgtcgcccaggctggagtgcagtggcgcaatctgggctcactgcagcttccacttcccaagttcaagcaattctcctgcctcagactcccaagtagctgtaactacaggcgtgcaccaccatgcccagctaatttttgtatttttagtagagacggtttcaccatggtggttaggctggtcttgaactcctgactttaagtgatctgcccgccttggtctcccaaagtggtgggattacaggcgtgaccactgtacccggcccaccccagtatttgataaacgccaatacccagtcttctggttctgttcccagatggacctgcttgttcttgtggtccaataataagaagcagtcagactagaagagaagggagtttttttctgcagctggctacagagagaaggtcggagtaactcaccagacccacccaaagttaggtgttttgttagcttatgtatacaattcaaactctatgcctatgtgcaggagtgtttcttaatctaatggtttttttgttttttgtcttttttttttttgagacagggtcttgttctgtcgcctaggctggactgcagtggtatgatctcagctcagtgcagtctagacctccccggttcaagcattcctcccacctcatcctcctgagtagctgggactacagaacagcgccactatgcccaattgatttttaaattttttgtagagatgcagtctcccaatgttgccgagggtggtctcgaactcctcctaggctcaagtgatccacccacctcagcctcccaaagagttgggattacaggcgtgagccacctcacctggccatctaatcctcttaactaggggtctgaaggtaggaaactttatttctttttctttttctttttttttttttttgagacggagtctcgctctctcacccaggctggagtgcaatggcgtgatctcggctcactacaacctctgcctcccgggttcaagagattcttctgcctcagcctcctgagtagctaggactacaggcacatgccaccacgcctggctaatttttgtattttttggtagagatggggtttcaccatgttggtcaggctggtctcgaactcctgacctcgtgatccgcccaccttggcctcccaaagtgctgggattacagacatgagccatcgtggctggccaagtttcttaatcttaatcctaaatgggttttggtaggggtcgcatgtgtaggaatgcttttattactctatcaggttttgagattgagaaatccaggaggggttttcatggtttgtttttgcatttcagctctggcactcaggcaccagttttcccaggtcagtattcattttttgctcctgctttaatgtttgacttatacactcatcattacaacaaagggcttatggagacctgacctgccacagttcctggaaaagacggagtggatacactcctccctgtttcgcctacaaagtacagctgaaaccaatggatgttacatagaaaacaagcttgagaagactgcaaggtacagaagagccagcagatggctagggattcggaatcgagaaatgacatggtgctgagccccgtgggttttcttatgcattcaagaccaggtgctggagaaagcagcaacgcagaacaccaagcggtgcagaaaaaaaagactcaggaaagcctggcgggcacagtggtgcgtgcttgtagtcccagctatccaggaggctgaggcaggaggatcgcttgagcccaagagtttaaatctaacctgggcaacatagtgagaccctcatctctaaacaaagaaataaaagacccagagacctggggaaacctcttccccttagccaaaggaccaggtaaggggcagcctcctaagagggtgtgaaccaaaaagtatcccagacaggtctcaatcagttttgaagtttactttgccaaggttggccgggtgaggtggctcacgcctgtaatcccagtactttgggaggccgagctaggcggatcacttgaggacaggagttcgagaccagcctggccaatatagtgaaactgcatgtctactaacaacaacgaaaaaactagccaggtgtggtggcacatgcctgtaatcccagctactcgggaggctgaggcacgagaattacttgaacccaggaggtggaggtcacagtgagccgagatggtgccactgtactccagcctgggcaataaaagcgacactccatctgaaaaaaaaaaaaaaagggccgggcgcagtggctcacacctgtaatcccagcattttgggaggccaaggcgagcagatcacgaggtcaggagatcgagaccatcctggctaacatggtgaaaccctgtctctactaaaaatacaaaaaaattagccgggcgtggtggcaggcacctgtagtcccagctactcaggaggctgaggcaagagaatggcatgaactcgggaggtggagcttgcagtgagcagagatcacgccattgcactccagcctgggcaacagagcaagactccgtctccaaaaaaaaagggccgggcgcggtggctcacgcctgtaatcccagcactttgggaggccaaggcaagcggatcacgaggtcaggagatcgagaccatcctggctaacatggtgaaaccccatctctaccaaaaatacaaaaaattagccaggcgtggtggcgggtgcctgtagtcccagctacttgggaggctaaggcaggagaatggcgtgaacctgggaggtagaggttacagtgagccgagatcgagccactgcacttgagcctgggcgacagagcgagactctgtctcaaaaaaaaaaaaaaaaaagttatgtattctgagtgttttgagaaaaccaaagctttagcagaaaaacacctgggaaagcttcaccagaaaatctttctccaccacaacaatgctcctgcctactcctctcatcaaacaaaggcaattgtcatttcatttttccacactttttgaagtccccttgtattgtggctattcatcctttgtcaaccatatgtgtttgaagctgactatgtctttttgggtagacatatctgtatgtcggtctaggcagatgggccccacaaaaccactgcactcccgttatggctgggaagagcaagcaaatatttcctatgcctctaggggatacagatttaaccgagagttagacctggaagtaccccatagtcagtttgagggataaagcaggagcatcatacatgagtcaacatccaaggaccacatagtatctggcacatctcagaagatgcctgtgttggccgggcacagtggctcatgcctgtaaccccagcactttgggaggccaaggcaggcagatcattcgagccccagagttcaagaccagcctgggcaacatggcaaaaccccatctctacaaaaaagtataaaaattagctggatgtggtggctcacgcctgtggtcccagttactcgggaggctgaggcaggagaatcacttgagcccaggaggttgaggctgcagtgagctgagatggcaccactacacttcagcctgggtgacagaatgagaccttgtctcaaaaagaacgaaagaaggaaagcctgtttgaactgaaagggggctaagtgggggacagatcctaaaggaatcctttgattttgtagatggaaaacataacatgctcattatttcactgaaatttaaagaaaattgactatcctttgtattttgcaataaaaagttagctccataggcctaaatgtattttctttttaatgttcacctaattaaattccagatccagacactagccttaataatgattgtctttataattaactaaaggaatctaagtttccttttggctgtggggggagagagtccaatctccatcataaagtttgtttacaccatctgatttggtgaagtgttgaattgagaaactttgacaagaatgtctgtcttgagtccctgtacaactacagaaccctctgaaatgcccaggatcgttaccaacgccatctccattaagtcaagtctgtccacagtggggagagcaaaaggttggttaacaaatacaaaagtacagctataggccaggccaggctgctcttgcctgtaatcccagcgctttgggaggatcacttgagcccaggagttcaagagcagcccgtgaaacatggtgagatcttgtcttcaataaaaaataaaggccgggcgtggtggctcacgcctgtaatcccagcactttgggaggccgaggcgggcggatcacgaggtcaggagattgagaccatcctgggtaacacagtgaaaccccgtctctaataaaaatacaaaaaaattagctgggcgtggtgccgggcgcctgtagtcccagctactcgggaggctgaggcaggagaaaggcgtgaacccgggaggcggagcttgcagtgagctgagattgcgccactgcactccagcctgggtgacagagcaagactccatctcaaataaaataaaataacataaaataaaataaaataaataaaaaattatccaggcatggtggtgcatgcctgtagtaccacctacttgggaggctgaggcaggaggatcgcttgaacccaggaggttgagggtgcagtgagctatgatggtgccactgcactccagcccaggcgacaaagtgagatcctgcctcaaaatgaaaaagtcacactgtaccccataaatatttacaattattatgtgtctattaaaaataataggctggggccaggcacagtggctcacatctgcaatcccatcactttgggaggccgaggcaggtggatcacctgaggtcaggagttttagaccagcctggccaacatggtgaaaccccatctctactaaaaaaaaaaataatacaaaaattagctgggcatggtggtgtgtgcctgtaagcccagctacctgggaggctgaggcaggagaattgcttgaacccaggaggtggagtttgcagtgagctgagatcacgccactgtactccagcctgggtgacagagcaagactctgtctcgaaaataataaaataataataataataataataataggccaggtgtagtggctcacacttgtaatcccagcactttgggagaccaaggcgggcggatcacttgaggtcatgagttcgagaccagcctggccaacatggtgaaaccccatctctaccaaaaatacaaaaattagctgggcatggtgggatgtgcctgtaatctcagctactcgtgaggctgaggcacgagaatcgcttgaacccaggaggcagaggttgcagtgagccgagattgtgccactgcactccagcccagggaacagagagaaaaactgtcttaaataaataaaataataaaagcaaaaagaggaatgtttgtccttgaaattattactttagcaaagaaggctcataaaaccttcaaatgacacctgtagttataattgagaatatgttgtctatgttgtaaatgacatctctgaaactctaagtgctgtaaataaggattttgaactcctggcctcaagcgatcctcccgtcttggcctcccaaagtgctgggattacaggtgcgagccactgcgcccggccgtggattttagtcccagccttgcccctctgaggcagtgtagtcatgggaagttgcttcgcctttttgtgtttcagtttcctcaagtgcaaatgaggacaacaaaaggcagttttgtgtcacctcagacgtggtcctaaatgggcccaccgggatggttcgcattttttaacgtcagagcatcaatctctaaaggtctgcccctaggttggggtcaggggtgtcagagctgccctgcctgtcaagccctgttctccaactgccactaagagagcagcggaaataggaacactgagaccagcagcccgactcaaggtgaagtgcgtgcacctctcttccgtctcccttttgctcctcctgcctctgcattgactccatctcttgctcctctgtatccgttttaccttctcaatctcattctctctctgctcctgtttttcttttttccctgttacctctgccttgtgtctttgccaatgtgtctttctccttctcacttttttttttggacggattctcactctggctcccaggctgaagtgcagtggcgcgatctcggctcactataacctccgcctcccgggttcaagcaattctcctgcctcaaccgtgcaagtagctgggattacaggcgcccgtcaccgtgcttggctaatttttgtatttttagtagagacggggtttcaccatgttggccaggctggtctcaaactcctgacctcaagtgacctgcccacttcggcctccacaagttctgggattacaggcataagccactgcacctggcccctccttctcactttttttttttctttttaagacagggtctcgttcagtcacccaggctggagtgcagttatctgcaacctctgtctcccgggttcaagcaattctcctgtctcagcctcccgagtatctgggactacaggcatgtgccaccatgcccagctaacttttgtatttttagtagagacggggtttcaccttgttggtcaggctggtctcgaactcctgacctcaggtgatccacccacctcggcctcccaaagcgctgggattacaggcatgagccaccacgcccggcctcttggtatctttttctgcatctctctctcctttgatctctccgtaaactctggcttctctttctatgtctttctccctattctctttctgtccctttgattcccccatgtctgtctctttctccctgacctgtcggggtctgtccctgaggaagtgagtaaagtgatcccacacctgtcagggctggacccccttgctcttctctgatcccacccacctccttaacccctcttgcccacagactatttcccttctccccatgcagacaggtgggtggcaaactcaagggccaccggggtcacactgtgaaagcaccagccagggagaccaaagcaaaaaaaatgaggatgcggagctgagagatcaagacagatagaggcagagactaagggcttaggcagggaggaagcaggaagaaacaggaggaggaacctgagacagagccgctgaagtccttgctggaagcagatgggattaaatgagcgacgagactgggagagtgccagagagagacaccaagaggatgcaggtaaggcatctgtcccctgaggccccgcagctagggtgtgggtgggcggcagccggaggaggcccggcctgaagccagctcacagctcacccgctcctcactatgtctcctgtgtttgcctgcatctgacgtggtattcccctctacctgcctgcgtttctgaccctcacgcagcttcttctatttcttagcgtctctcctcctctctgtctcttttcattgatctcttgcgtgtctctctgcctccatctctttccacctctctgtcggtctctacctccctacgtgcatgtctgtttctatttctctccctctctttatctctccatcccccgtcttcccttggtctctgtagtctcttctcgtcgaaacaaccaagggtctcaccccgtatttccttcttataggaacagaggccgccggccccgggcctaggtcagtcagagggcggggcctcagggctcgccccagccgcgcgccccagctcgcgagccgcggacgacccagggcgccccagccccagctccgggcctggtgagcctgggtgatgccgttgacgcgaggcctccacggagtcccccctcccccggcaccgtccccagcctccctgcaactctcacgcgaggcccctagcctcggtttcccagcccgctccctcgcttctaaacgtggtgctgctcccgccccactccaggtgactccggccccccagccccgccccagccagcggccggaggaggccccgaacgtcgccgcaagcggtcaagccacccgggccgagggcacgcagaaggaccgctcctaggccccgcgggtgggtccggccgcccgcagcctggagactgcgcagctggacccgcgcgcgggagaggggcggggcctggcggtgggaggaggtgggtccagaggctgccgagggcgggagcctgcgggtctcggggagcgtggagaggcgcagcctcggaggagccgggtggttgtaggaaggaggtggggcccgccgcgggctcaggggacggtgttgagcgaaacgaccagggcgggtccgaggggcagggccggagaccaagggagcgtggagcctccaggactctcggaagggaagggcctccaggagctactctccaggggcggcgctagatccacgcaagtgaaggcctgcagggggcagggccggcccaaagatccagaaggggcgggactaaaggaggtattggccccaggacacaaggaacaccctgggtctgactggcgctccgatctcaaagatgcatgcctggtgctgccgccgcggtacttgtggagatgcgggttcgaggcctaagcccgggccccgcgctgccctccctggtccctcagtggcgtggctgcgccctgcccggcattgagtcgctcaaacaggtatcacagctgtcaccgctgaggactctttacattcccacggaccagttttgtaagggactggcttgcaagaaagggacgtttttcatgtctctcgaggtattcgccactggagcagtttgtgcagaggaaacccttaactcctcaggaagcttttgagcctccccgtggcttctgcaccccagtgtaggcaatgtttgccccacccaggtagagcttttcgcagaagtcacagcttgggggcgggggtatgtccacccagaaaaatctcctagctcccccatcccaaaatgaaaactcatttctggttattttgtggttaccctttaaaaacactagacctggccgggtgcggtggctcacgcctgtaatcccagcactttgggaggccgaggcgggcagatcacctgaggtcaggagtttgagaccagcctggccaacatggtaaaaccccgtctctactgaaaatacaaaaattggccgagcgtggtggctcacgcctgtaatcctagcactttgagaggccgaggtgggcggatcacttgagatcaggagttcgaaaccagcctggctaacatggtgaaacctcgtctctactaaaaatacaaaaagttagctgggtgtggtggtggacgcctgtaatcccaactactcaggaggctgaagcaggagatcacttgaacccgggaggtggaggttgcagtgagccgagatcacgccactgcactccagcctgggtgacagagcaagactccgtctcaaaacaacaaataaaaacacttgaccacactgagcagaggaaagcagaaaagcagctctgtgacagaaggggaggctgatccagggcaccttctttgaaggagctaggtctcctggcccccttcttccatcccagatccaccctgaggccacatggagggaggggaatcaccttcacaaatgccgtgctgagtgtccagaaagaagggactcctgtgaggccacatttcccagcctcggtgacgggggcttgtggaccaggagtcagggatattggagtgtgtggggggggatggggtcaagggtgcaacgtccagaaccacccccatccccagcaatcctggtgttcattcacttctttcccaagcttgttcctctgacagctaggacccatcaccaggccccagacaaccttattcatgtccctaattcacatcttcattctcccttcctgctcatccatcccatagacatttactagagcccacttgctgtgggcctccaagtcctagggcttccaagtccctgaagcaggctctgcccctcatcctaaggaggggccccataggcagttcaaggagtccacacataggcatttcaaaacgggctttaaatactcatcagggtgccacacaaaggagctggggtgagaacttcgtacatgtgagtgtggggctggggtgccctgagagagaaaaaggggacccatctgtcagggcagctggggtgccccacccccaccctgggactagggagcagagtagaaaccctctctggagggtcccagggctaactgggagccagccctcccttcgaggtagaccatcggggagggaaccgagaagtagctcccatggtggcagtggcttcctcagtggtactgctgatagctggggtagcctggggccggggtgccatccttagggggcagctggctggggtcctccaggaatgggggcgctggagaagggagacttgggtaaggatgagtggaagaggccaggtggagtatttcccactcccccgaccaccagttactcaccatttcggaactgctgggctgtgtagcgagtgaggaggatgccaacgccctcaatgagggccaacaggatgccccccatcattgctgagcccaccatggccagtgggccacctgggggagttggaggcagagaaacagaggtgagagcaggcagaacagggtggaaggggctggggccagggccaggggtcactcactgcgggcagccagcacagccccggtcaatgctccactggtgatagagttccagggatcctccttgccccgaagccgcaccaggccacagtcaatggtggagaacaggcccccccacactgcgaagctacctgtagtggaaccgaggcctaattagttcctgggaaatcctgagaattcacatctcaggggacttccaaggcctgaatgctttggccaagaacagggagaaaaacccagacacaaaggcagatagcaaacccacacagagtatttcctatctgtccccatcctgtggtagctcccacttcaagccgtctataatcaccatcaacattcccttcatctttatggggagttgacaaatgtttacaagcagatttatcttcatatggcttttaacagagcaactttgagcttcataatcaccacacagagttggaattctgatttgggtttcagtgagaaggaaataggttaggaaacccagttaatatgatagttaaaatgtttactgagggcttactgtgtgccaggacctgttcgaggtgctctgttatttgacttctgcaattttaaattagttaatgttattaaagtgtttagcatagcaaccagcacttagtagtatgtaaattacataaactataaaactaccgatgaaatggttactgttatcaccacccccacggtacaagtgaggttcagagaggttaagccactagcccaaggtcacatggcagggaacagtcaggacctagatttaaactccagaacccactttcttcccctccatattcaattgttgggaaacatcacccccctagaaagtctctggcaggggctagaatctgaacccctaacttgcagcctagacccaaaggatcaaccactcccacctttgccaagacatctcctatatctatctccccaagtccctcacctccaatctggggggctcggatcctcacagcattggcactacctctcaaccggtgccgaattccctggggaaaggaaggaagggcgttagggcagggctgaagccactggcagacacgtttccaacttttaagagagggaagaagatgggagacctgttagaggtatgagctgtagagatgtggagaagtggccaagaactagtggcctggagagcgccccaacatgggtgttctcagagctaggttgagaagtgctaattcattcatacatttgttcattcattcattcagtgaatgattaacaagtacctactatatgtgccaagcaccatgccatatgcagggatacagccatgaacaaggtaggtctgctctctgccctctcagagctcacattaacggtgggagacacagatc

SEQ ID NO: 23292 - DNA, 122568 bp, Homo Sapiens
gatcccaggttatcacagatagaattgcttgagcacctttcatgtcatcaggccttctagattacatttaatgtctccaaacaatttatgaactatgattctttatttccatcttatggactaggaacctggagctgaggaaatttggaagactttccccacgtcacgtggttttttttatatggatgacaactccagtctgtgtctctggaagtcatgtctaacatctcatctggagctaggcgagctcctcagcccagcctggaccctggcttgtctggggtccatgccacacacccagtccacgcacctgaacacagccagggaagccagaggggttgttcccgaattctttcctcttaccagatgtcttgttaatcttctccaaggtacttggatttcccggggggcacagctgtttcccatcattttgtgggccagatgcctctggcacttccttcaaaccattttcttcctctgctggcttcttgggcatgatctttacaatgtgaaggtcgcagataaacagtatcagtgacatttctacagtgctttagagcttacaaagggtcttcacgtgcattagcttattcaatgctctcaacaagactgggagagttacacaggcctaaattaggagaaacctgggaggttagaagggaaaggaatggcctaaacgaatgggctttccagggctagaatgcttatcttcacactcttttaagactcacattcttgcaaacagcaaaaatctccatttaattgagagtttggtatacagaagatttggagaatagcattctaagaattcacaaggtctagaaaagaaagagcttctataaaatacaagggatcccatataagcttgtagacagctgctgggagagtaaatgtaaaaacatagagaggcgataaaacactgctgggaaagatggtgtggggagatgaatacagggacaggagaggtaaagaaatggtttgctgaaattaaactaggcagcaaagaaagcagtaccagacatggcatactaccctaccgaggcgccaacattgaatgtggaattaagtgaggtggtacccataccaactctggttgcattgggatgtgtcactgaccaacgaccttaagctacttctttttcctttttttttttttttttttgacacggagtcttgctctgttgccaggcttgagtgcagtggcgcgatctcagctcactgtaacctccatctcccaggttcaaccattctcctgcctcagcctccagagtagctgggactacaggtaggctctaacacgcaccgttaagttttctatttttagtagagacaaagtttcaccatgttgggcaggatggtctccatctcttcacctcgtgatccacccacctcagcctcccaaagtgctgggattacagtcgtgagacactgcgcccagcccttaagctactttttattcagcttcctcacttacgaaatagtcaacagtacatgtaaaataggctacaagaaagtgctctctgagcttgtaaacactctttaaatgtagtaataataaaaaactaatacttttcatgatccttctttgaatttggtctccacactggcaacccaactcccagatccctttaccctccaaaccagagttggatctgcagttgtgggatcactcattcaggggccttcgagggatcccctgggctgggacgggggcttcccggatgccccaggtgcacacaaggccatcaaggagctcacagtagggaggggccaacagtcaaagcgattcctaagccatgtgagtggccccggtaacagagcagaggccagctggtccttcctgttgcgagagtgggtgtctcaatggaagcaccaggaggccctatggggtgaagccctagtgagcaacatctgaacttcataaacaaatgcaaacgtgaatgagctttaaatggcttggagctctggattagactaccactgccactgtgcctcaggaaaattctttaacatctctgtaccccgatagcctcattttattattatgttgctgataactacgatctaaaacatgaactatgattctttacttccatttcatggaccaggagtctggatctcagagaacttagaagatttgcaccaagttacatgtcttttatatgggtgacaattgaagtgtgtggctcgatagtatttggagatagtaatagaaacatcgtcatagaggtcttcttaaggattaaataaattaacccatgtgaactgcttaaaatagtaatctggcatcactatgaaaaccaaagaagtattaaggatcacaactgttaatattagcaagccgtcggtgccacataagttgttgtgatagacatggggagaaggaggcagtgagggcatgtttgatattctcccactcttatcagtgttcgcatccgtgcagggacaaacgttctctggtcctttagatttgagagacactcaccttcgggaagattctctggaggctgccgaaagtcatctgaggacgttcaactgaaagagaatacatcagaatttttctttgttggtaaagatttccaaactctagagagacttctgtcgcatgagggcattctgcagcagaggttgtgagtccactcattgttgaggagttatttgagatttgcttctgaattatgtttagtcatggttggtgcatttatctgtggcatcaattcagaattttccatctcgtggtttatcacatgggtattaaaccccatcacagtctcatctttttccattacatatcttttactttttcccaaatagttaaattgattggttgggaatctaaactgtaatcactcaagatgtgcaacaactaaaaatcactgtacacttcaaatgggtgaatcttatggtatgtcaattaagctgttaactgtgtgatgaaccatcgatgatttagtccagtggctctgaaatattttcagtataaatatttggcactcatttaatgtcaaaaacttggcagatactcaagcactggattttcagacctcttatagtgactgtgggagatcgtagaatctggcctgtttagttgggaagtaataggtctatgggagacagtctggacattctgaccttgtcttgtaactgtgttctcagagcagaagagcaagtaaacacatatgtcccctttatattcctgaaatgcacaaagatctctacgcgaaacttgtctttttttcaccctatgttatctctgctcactgagaagtgggaaagctctctgtgtgctggatgagggatcactctttcaaactctcttccaagctcatcacggagaattggggttgttggggaatgtgaggactatttggttttgataaaatacagagaaacagcgacgcttattacataatgtgttcatcaccctcactcctaagatacttatccaatacctacatgctgttaatgaaacaaactctggaagtttttggcggatctacagttttaacattttcttttttttttattttttcacttttcacattttcttaaatgtcctttgattcattaacagtgcttaggaagaacaacatgtcatttaaaaaagaaatatttcaaaaacacagaaaagtatggggaacaaaactgagtacagtcgggtctcaacattaccccacagttatcttagatctgatttatttattcagaatattagcaatagtataaacagtccaggagtggtagctcacgcctgtaatcccagcattttgggaggctgaggcgagtggatcacctgaggtcaggtagtttgaggccagactggccaacatggtgaaaccccgtctctaccaaaaatacaaaaattacctgggtgtggaggcgagcgcctgtaatcccagctactcgggaggctgaggcaggagaatcgcttgaacctgggaggtgcaagttgcagtgagctcagattttgctattgcactccaggctgggtgacaagagtgaaattctgtctcaaaaaaaaataacaataacaaaaaacacaaaacacactatcagcaagtcacagctgaagctgtctgtgccgcactcagcaatccctgccctccctccctcctccacttacagccagtcaccttaatttgatggcgttttattcacattcatgtttgtatacatttaccatttacttattatccataaaaatatattttcttgttttgcatgttttagaattttatgtgattggcctctgtagttaactttctgcatgcaattttttttttcactcagccccgatgtgtatgagggaacaaatgcctgaggatctttcccaggtagctgagctgaaaagcaactgggcttgaggagaccctttccagccccttccagtctactcaccctgattcctgtggtttcgatcgttaccaaaatcattcccgtggaagtctgcagcccgtttactacgcatgaaaggtgggagggtgaccttgaaacctagaaaggagcaaaatgtttatttcttaagaggcaagcttgggcctggcacggtggctcatgtctgtagtaccagccctttgggaggctgaggctggaggattgcttgaggtgaggcgctcaacactagcctgggcaacatagagagacccacatatctacaaaatataaaataaaattagttgggcatagtggcacgtgcctgtagcctcagctactccataggctgggcaggaggattgctagagcccaggagttcgaggctgcagtgagctatgcttgcactactgcactcttccctaggtgacagagtgagactctgacttaaaaaaaaaaaaagagagagagagagagagagacaagccaagagaaggaagggagggtgtgcgtgttgggtgtgggggtgccgggatgccacagagacagttgggctcatcagaaaagacgcctatgggagagaaacgtgcaggatccaggtatgagctccactgtggccagtccctgccctcagccctgacaggatacagaagaggagaacacccagaagctgccttgtgatttttccctgcacaaaaggaaaatgtggggtactttctgcagcctaagaagtagccaaaacaggaaaagggatgctcatgtgtccccagacttgtctgcttctagaactttctgttacctagtttagtcatgacctcatagtttagcttcatatacacatagacgattttctccgaggatttcatcttttcccactctttcttagagaagtatttggcaatatcatcgaaggcctggaaaaaaaaaaaaaaggaattatggcagggactcagctaggcatgtctgccattcagctggagccgcttcctgtgtgtgggatctgagaagtggggatgatagtctgtcctggttgatgccatggctaactgacagaacatgagggaacttccctagcttcgcccctgccacacagtagggctttaatgctgctggctggctctcttcccaccttccagaatggagtgggagtcaccaaatgaagtgcaaggtcagagacttgtctccagggatgctaggtgatgacagagcgagggtgggaggctcccaagggtccaaatctcccccgagaccctgctccttgtccctagtacctctgtcctcccctcctcagaaacctggtcaccccacactgtcccctgggccactactctgccccctccaggtcacctcacctttcgtaacttctctgatatttgagcatcatccctgggtctccttgcaaaggcgtcgtctccgttcatggcactgggagcagtctcacctgcgagagaaacagcctgagtctttccagcctcaggacctttggtgctctgggcggggtggtgcacgcctgtagtcccggggccgaggcgagaggatcgcttgagcccaggagttttttttttttttttttttttttgagacagggtctcgctctgttgcccaggctgtgttgcagtggcgcgatcgtggctcactgcaacctccgcctcccgggttcaagcgatccaccacctgtgggcctccaaagtgctgggattacaagcgtgagccaccacgcccagcccagattttttaagttactacagagctcctaggaaaaatcccatacctgaaaaagttagaaactgacaggaagaatttgagatggcgacctgcctcacataaatacattattaaaattagataagaagtgcaccacggcggaggggaggggtaggaagaatggaaagagaaaatcagcgcatgcttaccctgattgtggaagaatcaaaagggcaaatcggcgtgtgcgtactctgaatttaaagtagccaatccaaggggacgctttcggcgggaaaatcagagtctcccctcccccccgccttgggaaggttctgtccctagagcctggactgacagacgccacatcagcttcccttgttccgcctactgttctgacttctaattggccagatggagttcactaactgccctgattggtccatcatccttgggcagtgacattgcagaatgttgtcgcctcctccagccacactttgtgcgacaaagtgggtggtcctcaggcgccatcaggagattttgaactctctgaagaccgtccctggatcttgggttaaacatctggattctagtctgaaccgtgggaagaaaaaatagtcgatctgtgatttttctatttgaaagacacaatgttttccaaactagcacatttgcggaggtttgctgtacttagtcgtggagttcattcttcagtggcttctacatctgttggaactaaaaaaacagtccaaggccctccaacctcttttattcttatttttttttcttttttttttttttttgtagttttcttttttttttcttttattattatactttaagttttagggtacatgtgcacattgtgcaggttagttacatatgtatacatgtgccacgctggtgcgctgcacccactaactcgtcatctagcattgggtatatctcccaatgctatccctcccccctccccccaccccacaacagtccccagagtgtgatgttccccttcctgtgtccatgtgatctcattgttcaattcccacctatgagtgagaatattcggtgtttggttttttgttcttgcgatagtttactgagaatgatgatttccaatttcatccatgtccctacaaaggacatgaactcatcaatttttatggctgcatagtattccatggtgtatatgtgccacattttcttaatccagtctatcattgttggacatttgggttggttccaagtctttgctattgtgaatagtgccgcatttttggaagggaatgtaagtgtggtgcgcacaattaccatcctttacctgtagccctggagagaggaaaatgtatttacttatgggatgtgattgtggtattggttacatccgccttggtcaatcctcccatctcattctcgggactacaggcatgcaccaccctgcccaggtttgtttttgttattattattattattttttagttgaaactgggtttctctatgtaggccaggctggcctcaacctccagggctcaagggatcctcccgcctcctcagcctggggaccacaggcatgcaccaccctgcccacggtattttttttgtttttcagtagaaaccgggttttgctatgttgcacagactggcctcaacctcctgggctcaagcaatgcttccacctcagcctcgggaccataggcgtgtgccattctgccctgataattttttttaggagagacaggctttcgctatgttgaccaggctggtatcgaccttctgggctcaagcaatcctcccacctcagcctgggaactacaggggtgagccaccccgcccatgctatttttggttgttcttcttattagtagaaatggggtttcactatgttggccaggctggccttgacctcctgggctcaagcaatcctcctgcctcagcctcgggaccactggcacacaccacccagcccccactaatatctttaatttttctagtagagacagtttcgctatgttgtccaggctggtctctacctcctgggttcaagtgatcctcctgcctcggcctcgggactgcaggcctgcaccaccctgccttttgctatgtttcccaggctggtctcaacctcctgggttcactcaatgatttgaacccgggaaggggaggttgcattgagctgagatcccaccactgcactccagcctgggtgacagagaaaaactgtcgaaaagaaaaggaagggaagggagaagggatgggagaagggaagggagaagggaagggaaaggagaagggaagggaagggaagggaagggaagggaagggaagggaagggaagggaagggaagggaaaggagaagggaagggaagggaagggaagggaaaggaagggaagggaagggaagggaagggaagggagaagggaagcgaaaggagaaggaaaaggaagggaagggagaacggaagggaagaaggaagggaagaaagggaagggaagatgggaagggaagacaggaagggaagatgggaagggaagaagggaagagaagaaggaagggaaggaaagggaagaaggaagggaagggaagaagggagggagggaggaaggaaggaaggaaagaaggaaggaaggaaggaaggaaggaaagaaagaaagaaagaaagaaagaaagaaagaaagaaagaaagaaagaaagaaagaaagaaagaaagaaagaaaagaaccagctgagtctccgtaagaacagtaagctttgtggtattttaacttaccctcgtcccatctcgtgctcccagcttggttctgtttattgttgatgaaatacagacaggagtggccagaactggtagatggctggctgttgatcatgaaaatgttaggcctgatatagtcctccttggaaaggccctttctgggggctgatactctgtgtctgcggtgctgtggaatgataacataatgctgaccattaagccaggggaacgtgggtccacatacggtggcaatccactaggctgccaagtggccatcgcagcccttgaagttttagaagaagaaaaccttgctgaaaatgcagaaacaatgggtattctcctgagaaatgaacccatgaagctaccttctgatgttgtaactgttgtaagaagaaaataattattttatttatgtatttatttgcttaagtcacaggttcactctggttgcccaggctggattgcaatggtgcgatcttggctcactgcaacctctgcctcctgggttcaagtgattctcctgcctcagcctcccgagtagctgggattacaggcacgcaccactatgcccagctaacttttgtatttttagtagagacggggtttcaccacgttggccaggccggtctcgaactgctgacctcaggtgatccacccaccttggccccccaaagtgttgggattacaggtgtgagccaccacacccggtgtggaaaagaattattaaatgctattgttattaaagaaaccaaagattgtgctgcttggaaagtgtgtgtctaagacttcgagataatggacttctggccaagccaacccatggcgacatcatcaggtttcacctctgctggtggtcaaggaggatgagattccagggtcaattgttatcattaacaagaccatcttgtcgttctgagtgtagcagccgttttcagtggtccctgggagccggctggagacaggtggtcctgtaaaagctctgctctaaatgtgggcacattccactcccatgtgtcttcaaaaccttttcgtggaatatatgttttttgcagttgatacatactagaacaacgtttatgaacctgcccgttgctttgtaacgtaagtaagagaatttaatggcatctatattcaatgaatgttttgatgtgcatgtgtactttctaaggtaaaatgcatctatgtgtattgacagcctttaaatcacatccttcagtataatttatatatgtttttataatttccatgctagtataaatgttttgtatttgaaaatgttatctctggggtattacataaatggcttcaccttataaagtcaaatcattgttatcattgaattttaggaaggatgaatggttaagcatatataaaatactaatattaagtaaacttcatgttggctaacaccaggatgtattctatggatgtcattattttcaattaagaattagtgtttaacattcctgaattgctttgagtgcttgattaaaatttgtagaaaaatgtttgtttattttttatttttatttttatttttttatttatttttagcagagacggggtttcaccgtggtctcgatctcctgacctcgtgatccgcccgcctcggcctcccaaagtgttgggattacatgcgtgagccactgcgcccggccaattgttcatttttattacggagtagtattccatggtatggatgtaccacagttcaaccattcgcttattgcaggacatattgattatttccagcttttggctattacaagtaaagctgctatgaacaattgtgtacaagtttctggatgggcatacattttaacttctctgaagtgtaattgttgaattgtatggtcactgcatgtttagttttataagaaactaccaaactgcttttaccttcccagcagcacttaatgaggtgtccattttctctgcatccttgtcaccatttggtgttgtcactatgtcttttattttagctattgtaataagtgtgtagtgatacctcatcgtggtgttattctgcatctagtgaagcaaatgagtgttgaacatcttttcatgtgcttatttgcttatttcctcttcagtgaaatgtatgctcatatcttttcataattttctaattggattatttggtttttttttacctttgagttattattattattattattattattattattattattattttttaaggcagagtctctctctgttacccaggctggagtgcagtggcatgatcttggctcactccaacctctgccttccaggttcaagcgattcttgtgcctcagcctcccgcgtagctgggattacaggcatgcatcaacatgcctgtctaatttttgtatttttagtagacatgggtttttgccatgttgcccaggctggtctcaaactcctggcctcaagggatctgccttccatccacctcgacctttcaaagtgctgggattacacgactgagccaccacacccggcctacggttgagttttgagagtactatacatatccattatatattctggatgtgagtcctttcttggatatgtggtttgcaaacattttctcccagtccatactttgttttttcatccttttaacagggtttcttgcagagcaaaagttttaaattggatgaaatctaatttactttttttccttatggattatgctttttgaactgttcaccatgccctagatctcagacgtttctcctatgttttcttgtaaaagcttttttttttagttttatatttcagatttaaatatatgatccatttgagttacttttttgtataaagttatgaagattaggtcttattttttttttttttttttttttgcctatggatatgcaactgctccagcaccatttgttaagcagacgatccttccttctttctgtctctttgtaaaaaatcagtgtgtggctatttctaggttctctattttgctccagtgatctatgtgtctattcttctgccaatactacacagtcttgattcctgtagctatataagaagtattgaaatatggtagagccattcctcctaccttattcttctttttcaaaaattgtcttagctatataatttttttttgatatggagtctcactcgtgtcacccaagctggagggcagtggggtgatctcggctcactgcaaactctgcctcccgggttcaagggattctcctgtctcagcttcccgaatagctggcattacaggcgtgcacctccacacccggctaatttttgtatttttagtagagacggggtttcgccatgttggcaaggttggtctcgaactcctgacttcaagcgatccgcccgtctcggcctcccaaagtgctgggattacaggcgtgagccaccgtgcccagcccagcgttgtcttagctattgacaatttgttacagcaacaataaaaaatgaatacatatagaaacagattagtgaaaaaaaaaaatagaaagtcaagaaacagactaagttatgtgcaaaattcagcatgcatttccaaacactgggcaaaagatgggttgtataataaacgattgcttgacaagtgtctatccatttgaaaaaataaatattaaaatacttactttaaaccacataaaataataaattctaaaaattcactgacttaaatgtgaaaacgtgaagtcataaagaactagacgaaaatttaggaaaatattacagtgtaagacattttgagttggcataggcacttcctgacattacaccaaggctatgaacaatgaatctgacatacttaaagatgtaaaaattaaagtatcatctaagtcaaaagacaccataaacaactgtgtaaagaggcaaattttggagaaaatggtgaagcatccgcagtaaaagtaaccatctctaatatacgacaaagcttttgcatatcataagagaaattggaacaacccaatgaaaaacttcaggcacggcactacttcactgtatagtagaaaacgattacgaaatagaaagtatgaaagtaaaataataaaggaaatggagaatagatcccagaagtttcaccgttcatctagtagaagttccagacatacagaatagaaagactgggccgggcgcagtggcttacgcctgtaatcccagcactctgggaggctgaggcaggcagatcacctgaggtcaggagttcgagaccagcctgtccaacatggcaaaaccctgtgtctactaaaaatacaaaaattagcccggtgtggtggcgggcgtctgaaatcccagctacttgggaagctgaggcaggagaatcagttgaacctgggaagcggaggttgcagtgagctgaggtcttgccactgcactacaccctgggtgacagagcaaaactacgtcacaaaagtgaaaaaaataaaaaaaagaatattaagactggggagaaggcagtacttgaagaaataatgttctagaattttctgaactgaacaaagacactttgggaggccgagatgggtggatcgcttgaggtcaggagtttgagaccagcctggctaacatggagaaacaccgtctctactaaaaatacaaaaattagctgggtgtggtgacgggtacctgaaattccagctacttgggaagctgagacaggagaatcgcttgaacacgggaggcagagacagcagtgagccgagatcaccccactgccctccagcttgggcgacaaaagtgagactccttctcaaaaaatgtatatgtaactaagacaatttttgaaaaagaagaataaggtgggaggaatggctctaccatatttcaatacttcttatatagctacaggaatcaagactgtgtagtattgggagaagaatagacacatagatcactggaacaaaacagagaacctggaaattgccccacactgattttccccaagagacaaaaagaaggatcgtctgcttaacaaatggtgctggagcagttgcatatccatagacaaaacaacaacaacaacaacaacaacaaacaaacaaacaacaacaagaaaacacctaatcttcatatatatatacatatatatatacatatatatacacatatatatatacatatatatacacatatatatacacatatatatacatatatatacacatatatatatacatatatatacacatatatatatacatatatatatacatatattaaaaactcaagtggctcatagatttaaatctaaaatataacactaaaaaaacttttacaagaaagagtaggagaaacgtctgagatctaggcatagtgaacggttcaaaaagcataatccataaggaaaaaaataaattagatttcatccaatttaacttttgctctgtagaaaccgtgttaaaaggatgaaaaaacagggtgtaaagtgggagaaaatgtttgcaaaccatgtatccaagaaaggactcacatccagaatatataacggatacgtatagtactctcaaaactcaacggtatgccaggcgtggtggctcacgcttgtaatcccagcactttgggaggtcgaggtggacggagggtagatcccttgaggccaggagttcgagaccagcctgggcaacatggcaaaacccatctctactaaacattcaaaaattagacaggcatgatggttcgcacctgtaatcccagctacgcgggaggctgaggcatgagaatcgcttgaacctaggaggcagaggttggagtgagccaagatcatgccactgcattccagcctcggtagcagagcgagactctgtctcaaaaacaaaacaacggtaaaaacaaacaaacaaataattcaattagaaaattatgaagatatatgaacatacatttcactgaagaggaaataagcaaataagcacatgaaaggctgttcaacacttacttgcttcactagatgcaaattaagaccacgatgaggcatcactacacacttattacaacagctaaaatgaaagacatagtgacaatacgaaatgctggaaaggatgcacagaaactggacatctagtaaaatgctgctgagagggtaaaatcttacagccactctggaaagcagtttggtagtttcttataaaactaaacatgcagtgaccatacaattcatcaattaccacttcatagaaattaaaatttatccccatccagaaacttgtacataattgttcatagcagctttatttgtaatagccaaatagccggatataatcaatatgtccaacaataggtgaatggtgaaactgtggtacatccataccatgtaatactactcagtaataaaaatgaaccattggccgtgcgcggtggctcacacttgtaatcccggtattttgggaagccgaggcaggcagatcatgaggtcaggaggcaagtagatcatgaggtcaggagttcgagaccagcctggctaatatggtgaaaccctgtctctactaataatacaaaaatcaactgggcatggtggcgtgcacctgtagtcccagctacttgggaggctgaggcacgagaatcgcttaaacccgggaggcagaggttgcagtgagccaaaaccacgccactgcgctccagcctgggcgacatagtgagactccatctcaacaacaacaacaacaaaaatatgaactattgatacacaaatattaatatcttggatgaatctccagggaattatgctgagtgaaacaagcctctaaaatgttatatactatgagatttcatttgtacagcattgtagaaaagataaaattgtagaaatgaaaaatagattagtggttgtcaggggttagggatggtggataggaggagagtgagtattactaaaaatgagtagcacaagggatggcattgtggtgatggcaatggtctataccttttttttttttttttattccaagactgagtctcactttgtcacccaggctggaatgcagtggcaggctctcggctcactgcaacctctgcctcccaggtttgagccattcacctgtctcagactcccatgtagctgggtatacaggcacgtgccaccacgcctggctaacttttgtatttttagtagagacgaggtttcaccatcttgtcaggctggtctcgaactcctgacctcaagtgatctgcctaccttggcctaccaatgtgctgggattacaggcgtgaaccactgcacctggccatgttctgtatctttttttttttttctgaaatataagctttattttaaatttaaagaaatattaaaaataaacgttttttacaaattataatcaagcactcaaaacaatttaggaattttaaacactaattcttaattcaaaataatgacaaccatagaatacattctggtgttcgccaatatgaagtttacttaatattagtattttacatatgactaaccattcatccttcctaaaattcaatgataacagtgatttgactttacaaggtgaagtcttttatgtaatactccatagataactttttcaaatacaaaacatttataccagcaaggaaattataaaaacatatataaagtatactgaaggacgtgatttaaaggctgttctgtatacatagatacgttttaccttagaaagtacagatgcacatcaaaacaccttcactgaatatagatgccattacattctcttacttacgttaggaagcaaaaggcaggttcataaacgttgttctattgtgtatcaactgaaaaaaatggatattccacacaaaggctttgaagacacatgggagtggaatgtgcctacatttagagcagagcttttacaagaccacctgtctccagccggctcccagggaccactgaaaacagctgctaccctcagaaagacaagatggtcttgttaatgatttcactggactctcgaatctcatcctccttgatcaccagtggaggcacaaacctgatgatgtcaccatgggttggcttggccagaagtccattatctcgagtctttgaatcaccttccaggcatcacgatctttggtttctttaataacaatagcgtttaatacttcttttcctcactgggcatggtggctcacgcctctaatcccagcattttgggaggcctaggcaggtggatccattgttttcttagttggaaatgatcccagcatttagtgagtacctattacttaatctaacataacacaactttaatatttcatctccatatggtaagagcaagagaaaaaacatttcaaattacatgaaaagttcacttataaacatgtatctcacagttacctcatttattcattttaacagttatacctagattacttatgaaaactgacatattaaacaaagccagtcggccggggtcggtggctcacgcctgtaatcccagcacttagggaggccaagaagggcagatcacttgaggtcaggagttgaagaacagcctggccaacaaggtgaaaccccaactctactaaaatacaaaaaattaggtgggcgtggtggcgggcgcctgtagtcccagctactcgggaggccgaggcaggagaatggtgtgaacccaggaggcggagtttgcagtgagccgagatagggccaccgcagtctggcctgggcgaaagagcgagactccgtctcaaaaaaaaaaaaaaaaaaaaatacaaaaattatccaggcatgggggcgcacgcctagagtcccagctacttgggaggctgagacaggacaatctcttgaccctgggaggcagaggttgcagcgagccgagatagcaccactgcactccagcctgggcaacagagggagactctgctctaaaaaaaattttaaaaataaataaataaataaataaagctagtcatttggagttattctcctattaaaacattattatagcctgtaaatgtcaggtatccacccgagcaaaaaccttaaatatatgagtattttgccaataactcagaaaatacagctgttttattacactcacaatattaaattagtcttacttatcaaagaattgcacataaaagaccattctgtttttaggttaggtttatgtttcataaccttaacacatccaacagagacaaatatagaaccagtaaacccagccaaaaaggtgtggtcacaattttgaaaacatttctcattttattttaccaacaattttaaaaccagcttatttttcaactacttaattaagttgcatgaactaaatgcgttttagttaattactgtgtatttatatgagtacctatttaagccaatctgaataggattctttaaataattgtttgccaacgattccggattttaccatgtagacacatttaacataacacatgtacatacgcaggaatacgcccaaacacagatacgtacataaacaaagataactttcattttagaattttgattatgggacagtaaaccatacaaactcaccgatttataaaagacgttggatctaaattatatttctgacaaaatggaagaaggctaaactttatttaagatttttctcctcaataggtaatcttatgaaggtggtgacccaaattttgggtaaagcagtttgagtcagttaccaacatgttgaattagacaaagaattgttaactgtaaaaatgtgactgaattatgtgaggaggcccaaaagataagaggtattccaataagctttgtataatgttctcttggtctcaattcctcatccttgaagataagagtgttgtctttccttttagtataggaaggagatcttttacatgggaatttcatcttttgcttttaagaaacactacaaaggtcagtgattttattttatttgtatctgatgtctttcaactgtctttattttaatagtcagtatgccagagtagctgaggagttttggaaaaagagttttgcttaaagaaggataaagaggaagaggtaaacgaaggagaggggaaggtgttggagaagaaaatctcagctagctttagacaatatcttgcagtgaggcagcctttgagtcttgaatgtgttctggagcctcaagataccaactgagataggagtcccatttggactgtattattttagttcagtttgaggaaaacagactgcgtgaatgatccccgtaatgttggcacatattaccagctggcgtcccagaaagagggaactatgttggcatgcctttgaactttgagagcctgtgtgtaaataaattaatctaggtgattcggtttaatgcctaatacacaaaagccaaattaaactctaagcatgcaaacgactcagaaaataaagtacaaacttaccaggaagcatgagaagccttctctaacagaaaaatctctgtaacccggcctcataaccaggagggagaaaatccctcttaaacaggccgtctctggctgggtgtagtggctcacgcctgtaatcccagcactttgggaggccgaggcgggcagatcacttgagctcaggacttcaagaccagcctggctaacagggtgaaaccacatgtctactaaaaaacacaaaaattatccaggcgtagtggcgcacacctgtaatcccagttactcgggaggacgatgcacgagaatcacttgagcctgggaggtgaaggttgcagtgagcccagatcacaccactgcactgcagcctgtgcgacagagcaaaacactgtctcaaaaaaaaaaaaaaaaaaagaaagaaaagagaaagacaagataaaaaagacaagacaagaaaagaaaggaaaagaaaagaggaggtttcataaccaggagacagagaaagacccttcctaacaaattcccaaataaaactgaactcaactccccgacaaatggcagtttgatccaagaaagtctcaccggggggaaagaggcaaccagaaaagcaaaagctcaaggggaccaagtgtgcagacctcacgccatagttccagaggtcattgatatctccaaggtgagtcagcttcggacccgatttctgacaccacaaatatcaaagtcaaaacctatggagatgaatctcttttttaaatcgcaatattaaggatgttatattatggtttttgtttttgttttttaagacagggtctcactctgtcgcccaccccggagtgcagtggcacaatctcggctcactgcaacctctgcctccccgactcagcctctggaataactgggattacaggcatgcaccaccacatccagctaattttttgtaatttttgtagagacaggatttcaccatgttgcccaggcaggtcacgaacccctgggctgaagtgatccgccggcctcagcctcccaaacggctgggattacaggcgtgatccaccacgcccatgaatctctaaacattttatttgagaatcatagaattgtaatctgaagcatacacacaaactggctggtctttggtatgtccaaagaacaacgagaaagttgagagttttattagaaacagaaatgttacctatagtttttaaagcaagtcccttggcaccagagaagctttcaggagctggaagctctgattggtgagtgtggacaataggtaaaacaagccttagagtcattgcaggttgtttcagcagttactaggtaaaagtgctcttagggtggcagcaggccatttcagccaccagctttgtggaaaattcaattcttggagcaggtgcaatgtgccctgattggtttctcccctggccactcaactctgacctagttgtgtatgtggaaaatgactcaattcaggtgggtttcagtggcacacgcctgaaatctcagcactttgggaggccaaggcgggcagatggcttgaggtcaggagttcgagaccagcctggtcgacatggtaaaaccctgtctctagtaaaaatacaaaattagtccggtgtgaggcacgtggctgtagtcccagctgctcgggaggctgaagcaggagaatcgcttcaacccaggaagctgaggtttcagtgagccgagatcacgcactgcactccagcctgggtgacacagcgagacttcatctaaaaaaaaaaaagaatgactcacttctttcacaatggttaaagcagagccctgcttagcaatgcacaaaaattctcctttgtgacccattcattttactgctgttggctttcttgcttatgctttcagacagagacactctcctttgaccaaacttgaatcgggctcctctgagtcctgtttctgactaggtctcaacctcaggctctgtccttcatccagggactctgcccatttagcctttttcagcaaaaaacctgtcaagtcggtttagccagaatccccctgcacctgaggcttcctccaagtaatttcccatcttctgacccccggctcctactccctgactacaaatccccacttgtccttgtggagttgaagtcgatcccaatatcactctcccactgcaagaccccattgcagtggtccctgtacctatcacagtagtcccccctctgagtaaaatcgtccttacgatctttttttttttttattttcagagacaaagtctcactctgtaactcaggctggagggcagtgacccaatcctagctcactgcagcctgaaattccagggcccaagcaatcttcctgccccagcctcccaagtagctggaactacaggtacgcaccaccacacccaggtatttttttttttcagttctctacagacgcaggaacttgatgtgcccggcggatttttctattttttgtagagacagggtttcaccatgttgcccaagctggtcttgaactcctgggctcaaccaatcctcttgcctcgggcacccaaagttctgggattacaggcatgagccactgcagctgacccttccttacagtctttaataagtgcaataaatacttgtttgctttaacatttccctgtgtcttcaatctcctgaagtcttacatgcttgacattgtattttcctctgtaagtaacctgctatttctctccgatcattttaaaatattttttccttgtctttcacaattttacatttcactgttcctgtgtgtgtactataatacctttaaatcttaagtcatttttttaaatctgaggaattctcattgattacttatttaagtacactctcctttttaatgactatattctcttcttataaggctactattagatgtgttttgacatttattcttctatcctccctattaattaacttttctttcatttacttcttctctatccattaccgattactttcatgaattctttagacgcatttcctcagctcagtaattgctttttcaactctatcagttttaatatccaatctattccaccaaataatttatttgagcagttaatgttttcatatccaatctatccaatagtttttctttttatttatttatttatttattcatttattcgtttgagatagagtcttgctctgtcacccaggctggagtgcagtggcaccatcttggctcactgaacctctgcctcccgagtccaagcaattctcctgcctcagcctcttgagtagctggaaccacaggcatgtgacactatgccaggttaatttttgtatttttagtacagacggggttgcaccttgttggccaggctgatctcgaactcctgacctcaggtgatccacccgcctcagcctcccaaagtgctgggattacaggcgtgagccaccgcacctggcctttttttctttatttatttttacacagagtttcactcttgttggctaggctggagtgcaatggtgtgatctcggctcactgcaacctccgcctcccaggttcaagtgattctcctgccccagcctcctgagtagctggagttacaggtgtgcaccaccacgcccaactacttttatatttttagtagagatggggtttcaccatgttggccaggctggtcttaaactgctgacctcaggtgatcctcccaccacagccttccaaaatgctgggattataggtgtgagccaccctgcctgggctgtcagatagtttttctatataaccctttcttcctgggaagatgtgtaagcccagacactccatgtgagttttagggtttctggattgataggtcgtaggatagggagcctctagagctgagctgagccaattctttccagtccctagcctatgagcccccagagacccttacaggatttctgccttacagcgtggagggggtctacgggtgagtgataccggttgtaattgcgtagctcagagggcagagggagaagtaggaaaggaatgctcagttactgaccagctttgatgagtctgcactttttctaggagctttccaagccccttattctttaatgttatcaggccactttgggctagcactgggccagccctgccaagtttctgctctgtatgtttacagaacaggtaataagccttctagaaaataaggagaaaaaaagaatgcaacttagaaagctccgcctgggctgattctccatctgtggcctctgacctttcccactctaagccatctcatcccccagtggggctaaaccatcaagggttttgttactgggaactgttctgaactccaaccacttcccacctcttctgtggcatctgcagggttgggtttgggaaagaagccagcagctattcctggttcaccatcttcttcttgaaccagatatgcctttacattttaaaagtaatttgaagtcattactaacaacacctaaaagatatatactaacttaaccacatgacaggcgctattctaagtgctttacacgtacttacccatttaatcatagcaatcaagtgagttagatagtgtggttatccccagtttactcttgagtagcctgaaacacggaaaggttatatgagttacacaaggtcacataccttaataagttgagaagccagaaactgaacccaagctgtctggctccagagtttgcactctaaaatactagcgttaagtgggcacagtgactcactcctataatcccaccactttgagaggctgaggtgggaggattgcttgaggataagagttcaagatcatcctgggcaacataggaaaacactctctctaccaaaaaaacaaatttttaattagccagccttggtggtgcacgcctgtagtcccagctacatgggaggttgagacaggaggatcacttgagctgaagaggctggggctacagtgagccatgattgtgctatggaactctagcctgggcaacagagtgaggccgtctctaaaataaaacaaaataaaatgctaatgcttttagccactctaccattctatcattcattagtgtcggtatccattccttgaacaacaaaagaacttctctttttttttcctgtccctcgtcccatcttccatgtttataatactgggaattttatttcaagactataattttttaagtttacaatcaaaagtttacactgtttaataaattttactatttttcttctaacaattgcttattgaaatcaccttcctcttaaatttacttttcttttctcatagggctgtataccaataattatttctgaagggtatatgtgtcattaattttctgaactattttttccctcattgtggattatcctggctgtatacagatatctaggttcaactttttttgtttgtttgtttttgttttgttttgttgttctgagacagtgcctggctctgtcacccaggctggaatgcagtggcaccatctcagctcatggcaatctccacctcctggactcagagattctcctgcctcagccttccaagtagctgggactgcaggcacgtggcaccacacctagctacttgttgtattttttgtacagatgggtttcgccgtgttggccaggctggtctcaaactcctgagctcaagcaatcctcccgtctcagcttcccaaagtgctgagactacaggcgtgagctactgcacctggcccaaacttatttttaatcagctccttgaaaaacttctccattgcattctctcttctctctttctctctgggacctttcaggattttatctctatcctagaaattttactccaagggtgtgtgtgtgtgtgcgtgcacgcaggtgtgtgtgcacatgtgtgttaggctcagaactagatggctcttttcagtttgaagattcatgtctttgttcagttcagaaaattctagaatgttatttctttaagtagtgccttctctccagtctttctattgttttgttgttgttgttgttactttttttttcatttttgacggagttttgctgtgacacccaggttgaagtacagcggcaggacctcagctcactgcaacctccgcttcctgggttcaagtgattcttctgcctcagcctcccacatggctgagatttcaggcacctaccaccacacctggctaatttttgtatttttagtagagacagggtttcaccatgttggacatgttttagatcatagttatcagcagcataataataaaatgaggctatcattgtacagagatgttaaagaattttcctggggcacagtggcagtggtagtctaatccagagctccaagccatttaaagctcattcacgtttgcatttgtttatgaagttcagatgttgctcactagggcttcaccccatagggcctcctggtgcttccgttgagacacccactctcgcaacaggaaggaccagctggcctctgctctgttaccggggccactcacatggcttaggaatcgctttgactgttggcccctccctactgtgagctccttgatggccttgtgtgcacctggggcatctgagaagccccagtcccagcccaggggatcctcggaggcccctgaatgagtgaccccacaagtgcagattcaactctggtttagagggtaaagggatctgggattgggttgccagtatggaggccaaattcaaagaaggatcatgaaaggtattaattgttattattactacacataaacagtgtttacaagctcagagaggactttcccttagcctattttacatgtattattcactatttcataagtgaggaagctgaataaaaagtagcttaagggccgggcgcggtgtctcacaactgtaatcccagcactttgggaggctgaggtgggcagatcacgaggtcaagagatcgagaccatcctgcccaacatggtgaaacctcgtctctactaaaaatacaaaacttagcctggcgtggcagcacctgcctgtagtcccaggtactctggagactgaggcagaagaatcacttaaatacaggagtcggatgttgcagtgagccaagatcgtgccactgcactccagcctggcgacagagcaagactccatctcaaaaaagaagaaaaaaaaaaaaaaactagcttaagattgttggtcagtgacatatcccaatgcaaccagaattggtatgggtaccatctcacttaattccacattcaatgttgatgcctcggtagggtggtatgccagatctggtactgctttctttgctgcctagtttaatttcagcaaaccatttctttacctctcccatccctgtattcatctccccacaccatctttccccacagtgttttctcccctccctatgtttttacatttattctcccagcagctgtctacaagcttatatgggatcccacaaaacgatgggaaacagctgtgcccccaggaaaaccaagtacccctgagaagattaacaagacatctggtaagagcaaacagtttgggaacaacccctctggcttccctggctatgttcaggtgtgtggactgggtgtgtggcatggaccccagacaagcctgggtccagcctgggctgaggagcttgctcagctccagatgagatgttagacttgacttccagagacacagggtggagttgtcatccatataaaaaaccacgtgacaggggagaggttccaagatggccaaataggaacagctccagtctagagctcccagcatgaatgacgcatttctgcatttccaacagaggtaccgggttcatctcattgggaatggttggaccgtgggtgcagcccatggagtatgacccgaagcagggcggggtatcgcctcaccggggaagtgcaaggggttggggaattccctttcctagccaagggaagccgtgacagatggcacctggaaaatcgggacactcccgccctaatactgtgcttttccagtggtcttagcaaacggcacaccaggagagtatatcctgcgcctggctcggagtgacccatgcccacggagcctcactcactgctagcacagcagtctgagatcgaactgcaaggcggcagtgaagctgggggaggggcgcccgccattgctgaggcttgagtaggtaaacaaagtggccaggaagcttgaactgggtggagcccaccgcagctcaaggaagcctgcctgcctctgtagactccacctctgggggcagggcatagcggaacaaaaggcagcagaaacttctgcagacttaagcgtccctgtctgacagctttgaagagagtagtggttctcctagcacagagtttgagatctgagaacagtcagactgcctcctcaagtgggtctttgatccccgagtagcctaactgggagacacctcccagtaggggccaactgacacctcatacagctgggtgcccctctgagacgaagcttccagaggaaggatcaggctgcaacatttgctgttctgcaatatttgctgttctgcagcctctgctggtgatacccaggaaaacagggtctggagtggacctccagcaaactccaacagacctgcagctgagggtcctgactgttagaatgaaaactaacaaacagaaaggacaaccacaccaaaaccccatctgtacatcaccatcaaaaaagaccaaaggtagataaaaccacaaagatgggaagaaaccagagcagaaaaactgaaaattctaaaaaccagagtgcctcttctcctccaaaggaacgcagctccttgccagcaacggaacaaagctggatggagactttgatgagttgagagaagaaggcttcagacaatcggtaataacaaacctctctgagctaaaggaggatgttcaaactcatcgcaaagaagctaaaaaccttgaaaaaacattagacgaatggctaactagaataaacagcatagagaagaccttaaatgatatgatggagctgtaaaccacagcacgagaactacgtgatgcatgcagaagcctcaggagccaattcgatcaagtggaagaaagggtatcagtgattgaagatcaaatgaatgaaatgaagtgagaagagaaggttagagaaaaaagagtaaaaagaaatgaacaaagcctccaagaaatatgggactatgtgaaaagaccaaatctatgtctgattggtatacctgaaagtgacagggagaatggaaccaagttggaaaacactctgcaggatattatccaggagaacttctccaacctagcaaggcaggccagcattcaaattcagaaaacacagagaacaccacaaagatactcctcgagaagagcaactccaagacacataattgtcagattcaccaaagttgaaatgaaagaaaaaatgttaagggcagccagagagaaaggtcaggttacccacaaagggaagcccatcagactaacagcggatctctcggcagaaactctacaagccagaagagagtgggggccaatattcaacattcttaaagaaaagaattttcaacccagaatttcatatccagccaaactaaccttcataagcaaaaggagaaataaaatcctttacagacaaacaaatgctgagagattttgtcaccaccaggcctgccttataagaactcctgaaggaagcactaaacatggaaaggaacaaccagtaccagccactgcaaaaacatgccaaagtgtaaagaccatcgatgctaggaagaaactgcatcaactaacgagcaaaataaccagctaacatcataatgacaggatcgaattcacacataacaatattaaccttaaatgtaaatgggctaaatgctccaattaaaagacacagactggcaaattggataaagagtcaagacccatcagtgtgctgtattcaggagacccatttcacttgcagagacacacataggctcaaaataaagggatggaggaagatctaccaagcaaatggaaaacaaaaaaaggcaggggttgcaatcctagtctctgataaaaaagactttaaaccaacaaagatcaaaagagacaaagaaggctattacataatggtaaagggatcaattcaacaagaagagctaactatcctaaatatatatgcatccaatacaggagcacccagattcataaagcaagtccttagagacctacgaagagacttagactcccacacaataataatgggagactttaacaccccactgtcaacattagacagatcaatgagacggaaagttaacaaggatatccagaaattgaactcagctctgcaccaagtggacctaatagacatctacagaactctccaccccacatcaacagaatatacattcttctccgcaccacattgaacttttgccgaaattgaccacatagttggaagtaaagcactcctcagcaaatgtaaaagaacagaaattataacaaactgtctctcagaccacactgcaatcaaactagaactcaggattaagaaactcactcaaaaccgctcaattacatggaaactgaacaacctgctcctgaatgactactgggtacataacgaaatgaaggcagaaataaagatgttctttgaaaccaatgagaacaaagatacaacataccagaatctctggaacacatataaagcagtgtgtaaagggaaatttatagcactaaatgctcacaagagaaagcaggaaagatctaaaattgacaccctaacatcacaattaaaagaactagagaagcaagagcaaacacattcaaaagctagcagaaggcaagaaataactaagatcagagcagaactgaaggagttagagacacaaaaaagccttcaaaaaatcaatgaacccaggagcttgttttttgaaaagatcaacaaaattgatagaccgctagcaagactaataaagaagaaaagagagaagaatcaaacagacgcaataaaaaatgagaaaggggatatcaccaccgatcccacagaaatacaaactaccatcagagaatactataaacacctctatgcaaataaactagaaaatctagaagaaatggataaattcctggacacatacaccctcccaaggctaaaccaggaagaagttgaatccctgaatagaccaataacaggctctgaaattcaggcaataattaatagcctagcaaccaaaaaaagtccaggaccagatggattcacagccaaattctaccagaggtacaaagaggagctggtaccattccttctgaaactattccaatcaatagaaaaagagggaatcctccctaacttattttatgaggccagcatcatcctgataccaaagcctggcagagacacaacaaaaaaagaacattttagacccatagccctgatgaacatcgatgcaaaaatcctcaataacatactggcaaaccgaatccagcagcacatcaaaaagcttatccaccatgctcaaattggcttcatccctgggatgcaaggctggttcaacatatgcaaatcaataaacgtaatccatcacataaacagaaccaaagacaaaaaccaaataattatctcactagatgtagaaaaggccttcaacaaaattcaacagcctttcatgctaaaaactctcaataaactaggtattgatgggatgtatctcaaaataataagagctatttatgacaaacccacagccaatatcatactgaatgggcaaaaactggaagcattccctttgaaaactggcacaaaacacggatgctctctctcaccactcctattcaacatagtattggaagttctggccagggcaatcaggcaagagaaagaaataaagggtattcaattaggaaaagaggaagtcaaattgtccctgtttgcagatgacatgattgtatatctagaaaaccccatcatctcagcccaaaatctccttaagctgataagcaacttcagcaaagtctcaggatacaaaatcaatgtgcaaaaatcacaagcattcttatacaccaataacagacaaacagagagccaaatcatgagtgaactcccattcacaattgcttcaaagagaataaaatacctaggaatccaacttacaaggaatgtgaaggacctcttcaaggagaactacaaaccactgctcaatgaaataaaagaggacacaaacaaatggaagaacattccatgctaatggataggaagaatcaatatcgtgaaaatggccatactgcccaaggtaatttatagattcaatgccatccttatcaagctaccaatgactttcctcacagaattggaaaaaactactttaaagttcatgtggaaccaaaaaatagcctgcattgccaagacaatcctaagccaaaagaacaaagctggagacatcatgctacctaacttcaaactatactacaaggctatagtaaccaaaacagcatggtactggtaccaaaacagagatatagaccaatggaacagaacagagtcctcagaaataatgccacatatctacaaccatctgatctttgacaaacctgacaaaaacaaacaatggggaaaggattccctatttaataaatggtgctgggaaaactggctagccatatgtagaaagctgaaactggatcccttccttacaccttatacaaaaattaattcaagatggattaaagacttcaacgttagacctaaaaccataaaaaccctagaagaaaacctaggcaataccattcaggacacaggcattggcaaggacttcaagactaaaacaccaaaagcaatggcaacaaaagccaaaattgacaaatgggatctaattaaactaaagagcttctgcacagcaaaagaaactgccatcagagtgaataggcaacctacagattaggagaaaatttttgcaatctacccatctgacacttttacactgttggtgggactgtaaactagttcaaccattgtggaagccagtgtggggattcctcaaggatctagaactagaaacatcatttgacccagccatcccattactgggtatatacccaaaggactataaatcatgctgctataaagacacatgcacacatatgtttgttgcggcactattcacaatagcaaagacttggaaccaacccaaatgtccatcaatgatagactggattaagaaaatgtggcacatctacaccatggaatactatgcagccataagaaaggatgagttcatgtcctttgtagggacatggatgaagctggaaaccatcattctgagcaaactatcgcaaggacagaaaaccaaacacctcatattctcactcataggtgggaattgaacaatgagaacacttggacacagggtggggaacatcacacactggtgcctgtcatggggtcgggggaggggggagggatagcattaggagatatacctaatgtaaatgacgagttaatgggtgcagcacaccaacatggcacatgtatatatatgtaacaaacctgcacgttgtgaccatgtaccctagaacttaaagtgtaatttaaaaaaaaaacatgtgacttggggcaagtctcccaaatttcctcagctgcagattcctagtccataagatggaaataaagaatcatagttcataaattgtttggaagcattaaatttaatctagaaggcctgatgacatgaaaggtgctcaagcaattctatctgtgataacctgggatcatatcttactcagctcaatgcctgatacccaatacacgtgtacttcagagatattgcaggttcagttccagaccactgcaataaagtgagtcacacacattgttttttgtttgacagtgcataaaacattatgtttacgctacagtgtagtctactaagtgtgcaatagtgttatgtctaaaaatatatataccttaattttaaaataattcattgtcaataatgctaacaatcttctgagccttcagtgagtcacactctttttgctggtggaggatcttgccttggtgttgatggctgctggcttatcaaggtggtggttgctgaagggtggagtggctgtggcagtttcataaaagaagacaacaatgaaatttgccacatcaattagctctccctttcatgaaggatttctctgtagtatgtgatgctattggatagcattttacccacagtagaacttctttcaaagttggagtcaatcctctctagctatgaaagtcctagatggcatctccttccaatagaaggttattttatctacattgaaaatctgttgtttcgtgtagccaccttcatcagtgaccttagctagatcttctggataacttgctgcagcttctccatcagggtttgctgcttcgccttgcatttttatgttatagagacggcttctttccttaaacctcacgaaccaacctctactagcttcacacgtttcttctgcagcttcttcaactctctcagctttcatggacttgaagagagttctggtcttgctctgaattagactttggcttaagggaatgttgtggctggtgtcatgttttatcctgaccactcaaactttctctatttgagcagtaaggcagttttgctttcttattcgtgtgttcactggagtattagtattattatttccttcaagaacttttcctttacattatatactattatttccttcaagaacttttcctttgcattcacagcttggctgtttggtgcaagcggcctagctttcatcctgtcttggctttcagcatgcttcctcactaagcttagccatttctagcttctgatttaaagtgagagacatgtgactcctcctttcatttgaacacttagcggccattgtagggttcttaatcgtcctaatttcagtgttgctgtgtctcaggaaatagggaggcccaagaaaaggaggagagatggggaagagctcatcggtggagcagtcagaacacacacaacattaatcgattaagtttgtcatcttctatgggtgcagttcatggtacccccaaaacaattacacataacagggtgattatagtcaataataacttaattgtgtgtttaaaaagaactgatagaatgtaattggattgtttgtaacacaaggataaatggctgaggggatggataccctattttccacgatgtgattactacgcatttgcatgcctgtatcaaaacatctcacgtaccccataagaatatacacctactgcgtacccacaaaataaagaacaaaaattattttaaaagactaaaaaacaacaaaaacaattgcagtaataatgtcaaagctcactgatcacagatcaccataacagacataataataatggaaaagtataaaattggtgagaatttccaaaaaaaattgcagcatctgtgaagcactgtaaaaatgaggagcaataaaacaaagtgtgcctgtgtgcccttaacaaatgcttgctgaatgaaaggaggtatcggtgaatgttcccgtaagtgaagaggttgggaatctaaacctcacaatggaaggagccagaagctaaaattttagtttgcatttggcctgtattggtgtggatctaaggtctcagcctctctaagccagagaatgtgaaaaactggataaagaaggcccatgggcacttgggagggggtaggcatctccttttttggagaaaacagagcctaacactctccaacctacccaaccctcatcttccaactattcatcataggacccaaaaggcggaaacatgactggacccacagactgcgtgagagaaagcagctggtgatttatgaagagatcagcgaccctgaggaagatgacgagtaactccataagtgaatcttcggctcacccctcacatccctgcagatgtgctattctgttatgatactggtatcccatcttctcacttgttccccaaaccattcccttctcataattttctagggtacagcattgaggctgaatgatgagatttcccatgctctttcgtattttttttttttttgagatggagtctctctttgtcacccaggtgcgatctcggctcactgcaagctccacctcctgggttcacgccattctgcctcagcctccccagtagctgggactacaggggcctgccactacgcccagctaatttttttgtatttttagtagagacggggtttccccatgttagccaggatggtctcgatctcctgacctcgtgatcggcccacctcggccacccaaagtgctgggattacaggcatgagccactgcgcccggccgatttcgcattctctttttactccctggcctgtaggtccagggatgctccctacccaggatgctgtgggctcccaaaccccaggtcagccctgatatgcaggccgcaccttcctctagcctaggaattgatagcctaggcgaggaagtcactgtggcatgaacagatggttcacttcgaggaaccgtggaaggtgtgtgcaggtcctgagatagggcagaatcggagtgggcagggtctgcaggtcaggaggagttgagattgagttgtcacgtggtgggaactcactgccacttactttccttccctcttcttgcctcagcctcagggaatatgacacatgcccatgatgagaagcagaacgtggtgacctttcacgaacatgggcatggctgcggacccctcgtcatcaggtgcatagcaagtgaaagcaagtgttcacaacagtgaaaagttgagcatcatttttcttagtgtgccaagagttcgatattggcgtttccgttgtattttcttgcagtgtgccattctgttagacattagcgttttcttttgatgagcaagacatgcttaatgcatatttcggcttgtgtatccatgcacctacctcagaaaacaagtattgtcaggtattctctccatagaacagcactaccctcctctctccccagatgtgactactgagatcaggtctgagtgtttaatttctgattttttcctctgcatttacacacacacctcacatgcacacacacacaccgagtaccagtataagtatctcccatctgcttttctccattgccacgtgtcctggtcaagcccccctcactctgtttcctgttcagcatgtactcccctcatccaattcccctgtatcagtcactgccagttaataaacctttgcaaacgttccccagttgtttgctcctctcattattgtccacacagctctgtgcacgtgtgtgaatatttctttaggaaagattcttagaagtggaattgatgtgtcaaaggagtcatttattcaacaaaaccctaatgagtgtgtcctcgtgctgagcgctattctaggtgctggagagacatcagggaacaaggcagacagatgttcctgaccaccattctagaggaggatgtttccagttgctgggtgtttgtttgtttcttctagagattgggtcgtgctctgtccaggctggagtgcagtggcatgatcatagctcaatgcagccttgaactcctgggctcaagcgatcctccctcttcagcctccggagtagctgtgactacaggcatgcaccatcacaccccactaacttttttaggtttgtcaagaaagtctcgctatgttacccaggctggtctcaaactcctgggctcaagcgatcctcccgccttggcctcctaaaatgcagggattacaggggtgagctgctgtgcctggcctccagtttttattttgatagagactatacacttcagtcctggagcaggattctgcagcatgtggttgggcatcttggccttcgctctctgaaccatttttgggttcaaggtctgggatggtccatttgggagtatgtgggaggagacacagatgaaatcgtcatctgggtaacgtggaggaatcaggcagatgtgtgcactgtagactctgtgatggccagggaatagaagagtccacttagtctccatgcaggggagcaacggtgggaaagtcccctggacagaagcatgagactgcccatcaagggtctcaccaaccaagggcctgggggctggggtggggacagtgatttgggaatgggacagttctttctcataggtaccattgcacggtgcagaggggaacatttctggggaagggaaaggcagaggggagtctattttaaaatcattgtgtgtgaatggagaccattaagactcacacctataatcccagcactttgggaggccaagactagcagatcacttgaggtcaggagttcaagaccagtctggccaacatggagaaaccacgtctccactaaaaatataaaaattagccgggtgtggtggctcacgcctgaaattccaggtactcaggaggctgaggcaggagaatcgcttgaatccaggaggcagaggttgcagtgaggcgagattaccccagtgcactccagcttgggcgacacaagtgagactccatctcaaaaatatatatacatatgcatatatatatatagctaagacactttttgaaaaagaagaataaggtgggaggaatggctctaccatatttcaatacttcttatatagctacaggaatcaagactgtgtcgtatggggcgaagaatagacacacagatcactggaacaaaatagagaacctagaaatagccccacactgactttttacaaagcgacaaaaagaaggaaggattgtctgctcaacaaatggtgctggagaagttgcagagccataagctaataaaaaaaagacctaatcttcatacctttatacaaaaaaaaaaaaactcaagtggatcatagatttaaatctaaaatataaaactaaaacagaaacttttacaagaaaacataggagaaacatctgagatctagggcatagtaaacagttcaaaaagcataatccataaggaaaaaaaattagatttcatccaatttaaaacttttgccctgcaagaaaccctgttaaaaggatgaaaaaacagggtatggaatgggagagaatgtttgcaaaccacatatccaagaaaggactcacatccagaatgtataatggatatgtatagtactctcaaaactcaacagtaggccatggctcacgcttgtaatcccagcactttgaaaggttgaggtggatggagggcagatcccttgagggcaggagtttgagatcagcctgagcaacatggcaaaaacccatctctactaaaaatacaaaaattgacaggcatgatggttcacgcctgtaatcccagctacttgggaggctgaggcatgagaatcgcttgaacctgggaggcggaggttggagtgagccaagatcatgccactgcactccagcctgagtaacagagcgagaggctctctcaaaaacaaacaacaacaacaaaaaactcaacggcaaaaaacaaacaaataatccaattagaaaatgatcaaaatatatgaacatacatttcactgaagaggaaataagcaaataagctcatgaaaagatgttcaacactaatttgcttcactagatgcaaattaagaccatgatgaggtatcactacacacttattacaacagctaaaataaaagacatagtgacaacacgaaatggtgacaaagatgcagagaaattggacaccttgtaaaatgctgctgggaaggtaaaatcttacagccactatggaaaactgtttgatagtgtcttataaaactaaacatgcaatgagcacacaattcaacaattacacttcagagaaattaaaatttatgcccatccagaaacttatacataattgttcatagcagctttacttgtaatcgccagaagctcgaaataatcaatatgtccaacaataagtgaatggtcaaactgtggtacatccataccacgaattactactcaccaataaaaatgaactattgatacataaatattaatgccttgaatgaatctccagggaattatgctgagtgaaataagcccctaaaatgttatatactataagatttcatttgcacagcattgtagaaaagacaaaattgtagaaatgaaaaacagatttgtggttgccagggattagggatggtggatgggaggacagtattaccaaaaatgagtagcacaagggatagcattgtggtgatgaaaatggtttgtaacttttttttgagacagagtcttgctctgtctcccaggctggagtgcagtggcatgacctctgctcactgcaacctctgcctctcgggttcaagtggttctcttgtctcagcctcccatgtagctgggattataagcacgtgccaccatgcctggctaatttttgtatttttagtagagacagggtttctccatgttggcccggctggtcccaaactcctgatctcaagtgatctgcctgcctcagcctcccaacgtgctgggattacagagatgaaccactgcacccagccatgttctgtatcttttttttttctgaaatataagctttattttaaattcaaagaaatattaaactttcttttacaaattataatcaaacactcaaacaatttaggaattttaaacactaattcttaattgaaaataatgacatccatagaatacatcctgatgttggccaacatgaagtttacttaatattagtattttatatatgcttaaccattcatccttcctaaaattcaatgataacaaagatttgactttataaggtgaagccttttatgtaatatgctagagataactttttcaaatacaaaacatttataccagcaaggaaattatgaaagcatatataaattatactgaaggatgtgatttaaaggctgtctgtatacatagatgcatttcaccttagaaagtacatatgcacatcaaaacactttcattgaatatagatgccactacattctcttacttatattacaaaagcaaacggcaggttcataaacgttcttctattatgtatcaactgaaaaaaacatatatacacaaaaagattttgacggcacatgggagtggaatgtgcctacatttagagcagagcttttacaggaccacctgtctccagccggctcccagggaccattgaaaacagctgctaccctcagaatgataagatggccttgttaatgagttcactggactctcgaatctcatcctccttgaccaccagcagaggtgaaacctgatgatgtcgccacaggttggcttggccagaagtccataatcttgaagtcgtagacacaccttccaagcatcacaatctttggtttctttaataacaatagcgtttaataattcctttcctcgccgggcgcagtggctcatgcctgtaatcccaacactttgggaggccaaggcagctggatcacctgaggtcaggagttcgagaccagcttgaccaacatggcaaaactccatctctactaaaaatacaaaaattcgctgggcatagcagtgcgtgcctgtaatcccagctactcaggaggctgaggtaggagaatcacttgaacctgtgaggtggaggttgcattgagccgagattgcgccattacactccatcctgggcaaccagagtgaacctctgactcaaataaataaataaataaataaataaataaataaataattattttcctcttacggcagttacaacatcagaaggtagcttcatgggttcatttctcaagataatacccattttttttctgtattttcagcaaggttttcttcttctaaaacctcaagggctgcaattgtcacttggcagcctagtggattgccaccgtatgtggacccacattcccctggcttaatggtcagcattatgtcatcgtcccacagcactgcagacacagagtatcagcccccagaaagggcctttccaaggaggactatatcaggtctgacattttcatgatcaacagccagccatctaccagttctggcctatcctgactgtatttcatcagcaatatacagatcctggtgcctggtgcagagctctcgcactcccattaagtaacctggatctggaacaacacctgcttcaccctgaattggttctaccatgaatgcagccacatttggattctgaaaagcactctccagtgcaggcagatcattgcagggaatgacgtcgaagccaggcataaacggtccaaaaccatcataactcgtcaggtctgtggaactggagatagcagaaaacgtcctaccccaaaagtttccagctgcggaaataacctttgctttgtatttctgaatgcccttcacagtatagccccacttatgagctagtttacaggcagtctctccagcttccattcctgtattcataggaagaactttgtggtagttgaaaagtttagtaatatactcctcatattcaccaagtacgttattatagaaagctctagaggttaaggtcaatttcttcccttgactctttagtgcattcacaatcttggggtgacaatgcccttggttgacagcactgtaagaactcagaaagtcaaaatattttctgccttctacatcccataagtaaatacattttcctctctccagggctacaggtaaaggatggtaattgtgcgcaccacacttagattccctttcaaaaatgtagtcagaggttggagggccttggactgttttcttcgggttttttttgtttgtttgttttttgttttgagatggagttttgctcttgttgcccaggctggagtgcagtggcacaatctcggctcactgcaacctctgcctcccggtttcaagcaattctcctgcctcagcctcccaagtagctgggattacaggcatgcaccactgtgccgggctaattttgtatttttagtagagatggggtttctccatgttggccaggctggtctcgaactcccaacctcaggtgatccaccagccttggcctcccaaattgctgggattacaggcgtgagccaccacacccggtctggattttttttttttagttgcaacagatgtagcagaagccactgaagaatgagctccacgactaagtacagcaaacctctgcaaaggtgctagtttggaaaacattgtgtccttcaagtagaaaaaccacagatcgactatttttttcttcccatggttcagactagaatacagatttttaacccaagatccaaggatgatcttcagagagtccaaaatctcctgacagtgcctgaggaccacccgggacacacactgtctacaaagcacagccatgttctgtatcttgattacggtgttggttacaggagtctacacatgggataaaaaggcatacacactattgctccaatgtcaatttcctgattttgatattgtactatagtatttttacactactataatatagaggaaactcagtaaagggtatatgggacatatctgtactatttttgcaatttcccataaatctatattattcccaagtaaaaagggaaaaacatacaattttttttgagacagggtctcgccctgtcatccaggctggagtgcagtggggcaattatagctcactgcagcctcaaactcctgggctcaagcaatcctcctgcctcagcctcccaagtagctaggactacaggcacatgccaccatacccacctatttttttttttttagagatggggtcttactatattgcccaagctaaaaatacatttcttaatgaaagatcaggatgagaaacaacaggcttatctgaacacctgcacaataaccaaatacaacttctagaagtgaaaatggtgatttaaataattaataaacttattaaactgcagattagacacaaacgaagaaataattagcgaacgaaaatatagctctgaggaaaacacaacattagagataaagaaacagaaaataggccaggcatggtggctcaagcctgtaatcccagcactttgggaggctgaggcgggtggatcacctgaggtcaggcattcgagaccagcctgaccaacatggtgaaaccccatctctactaaaaatacaaaacttagccaggcatggtgatgcatgcctgtaatcccagttactcaggaggctgaggcacgagaattgtttgaacctgggaggtggaggttgcagtgagccgagattgtgtcattgcactccagcctggacaagagtgaaactccgtgtcaaaaaaaaaaaaaacaaaaaagaaatggaaaatataaagatatggaggatagaatgaaaagagctcacatacattgaacacaaattctagaaagggagaatagaaagatttatggagaacaatgttcaaaggaataatggctgagaattttccagctttggtaaaaagcatcaatgctccttatgtgagctcacccagacctattactttattatttaaggaattattcactaaaacacatgctgctttaatgtagtttaattataatccagtgttcataaagatgatgtcatttggaaaaatattgattgggagcatttggggatcataaatttgaagtggtactaaaatactaggccacattagaacatgtggaaaaagaaagaaaaagcaacaaaaataaagttctaggccacaacaacacaaacactgaaagagaaggagattagagttaaagtaatcaaaggacatgtgaaaatggaaactaaagttatcatcaaatttaaaccttttaatgtcaagtaatgatgtttaaaatgtttaatgttgctaacacaaagtaaatggtggaatagagaactccaaaaatctatgcctctataaaaatcagtgaaaaaactggcaaaaactgtcaggatcaactttttcagaactttgaaaactaaccgaaagcttgtaacaagcagaggaatgtttaatcaagaaaaaccagctgagtggctcacgcctgtaatccagcacttcgggaggccaaggcaggcagatcacctgaggtcaggagttcgagaccagcctggccaacatggtgaaaccccgtctctactaaaaatacaaaaattagccaggcgtggtggcacgtgcctgtaatctcagctactcaggaggctgagacacgagaattgcttgaacctgggaagtggaggttgcagtgagctgagatggcaccactgcactccagcctgggcaacagagcaagactgtcaaaaaagaaaaaggaagaaaaagaaggaaggaaggaaggaaggaaggaaggaaggaaggaaggaaggaaggaaggaaggaaggaaagaaggaaggaaggaaggaaagaaggaaggaaggaagaaagaaaggaaggaaggaaggagaaaaaccagctgaatctccataagaacagtaagctttgtggtattttaacttacccttgtcccatctcctgctcccagcttggtggtagccctgaagataatgatctgcattcccagtacaggtaccagtaccagagagaaaagaatggaccttattcacaaagaattacagttgtttgttttgacttgtctggtggttccctggaagaacccacttgaaaggcttgtcttcatttgacctcactcaaactgatgctacaacctggggtagtgaatagcagttgaggcaaacaatacatcaaccagcaagcttaaaaggaaaggctggaggccaggcatggtggctcatgcctgtaatcccagcactttgggaggctgaggcaggtggatcacgaggtcaagggatcgagaccatcctggccaacatggtctctactagacaccccatctctactaaaaatacaaaaattagctaggtgtggtggtgtgcacctgtaatcttagctactcaggaggctgaggcaggagaattgcttgaatccaggaggcagaggttgcagtgagccgagatcgcgtcactgcactccagcctggcaacagagcaagactctatctcaaaaaaaaaaaaaaaagaagaagaagaagaagaaggaaaggctggaaaatggggcttgaataactccaacacatgcctgggaatctagaaggccacacacatacgccctgggctgcagctaggcgaatgcccacagaagaactaagtaggctttaatctctcacctctgcagacctcgaggctctgagcaagcaggaagagaaagataaggcaacgttgtaaactgccaggctgagtgcagaaggtatgtcccaacacatacacaaatccccttggcaaagactgggagacatactggttccaggcatttaaagaaatttctgttcaatcattagtggccactaagctaaccaagagacttcagtggccacagaggacaaggaatagagactacagaatttgttcaggaaaaaaactagacaaacttgtgttttgagacagggtcttgctctgtctctcaggctggagtacagtggcactaacacggctcactgcagccttgatctcccaggctcaagcaatcctccagcatcagcctctgagtagctgggactataggcatgcgccaccacaccaagctaatttaatttatttatttatttatttattttttgagatggagtctcactctgtcgcccaggctggagtgcagtggtgcgatctcagctcactgcaagctccgcctcccgggttcacaccattctcctgtctcagcctcccgagtagctgggactgcaggggcccgccaccacgcctggctaatttttttgtatttttagtagagacggggtttcaccgtgttagccaggatggtctcaatctcctgacctcacgatccacctgcctcggcctcccaaaagtgctggggattacaggcgtgagccaccgcgctcggccaatttttttttcttttttaagagacggggtctcactatgttgcccgagctggtctcaaactcctaggctcaaatgatcctcctgccttggcctcccaaagtgcttggattacaggcatgagccaccgagctcagcctaaacaaacattgaaaacaaacaaacaaaacagcaacaagaaaccccagggaagggacagaatctggtttccagagttgccacattatattatttgaaatgtccagttttcaataaaaaattatgacacctgcaaagaaagaagaaaatacgacccatccacagaataaagaaaaaagaccacctatagaaaccatccctgagaaagcccagatgttgggttttccttttttcttaatgtattttattttatttatttatttattttgagacagagttttgctctgtcgccccggctggggtgcagtggtgcaatctcggctcactgcaacctctgcctcccagactcaagcaattctactgcctcagcctcccaagtagttgggactacaggcacccactaccacacctggctactttttgtatttttagtagagacagggtttcaccatattggccaggctggtcttgaactcctgacctcaagtgatccacctgccttgtcctcccaaagtgctgggattacaggtgtgagccaccacgcccagccagatgctgggttttctaataaaaagactttaaatgagctatttaaaatacgtccaaaaacctcaaagaaactatgtctaaagaactaaagtatagaaacaatatctcaccaaatagagagtatcaatacagacatagaaatataaaaaatgaaccatatagaaatttctggagtttaaaagtgtaataatcaaaatgaaaaattcatcttctgctgatgctaggagtagggacattgccctcatctctttttggggttctttctgttaaatatgaagacttgcttttttttctttttgagacaaggtctcactctgttgcccaggctggagtgagtggtgcaatcacagctcactgcagccctgaactcctaggttcaaacaactctcccacctcagcctccctgagtagctgggactgcaggtgcaaaccaccatgcccgactaattaaaaaaaaaaaattggggctgggcgcggtggctcacacctgtaatctcagcactttgggaggccaaggcaggcggatcacctgaggtcaggagtttgaaaccagcctggccaacatggtgaaaccctgtctctactaaaaatacaaaaattagctgggcacggtggcgcatgcctgtagtcccagctactcaggaggctgaaacaggaaaatcgcttgaacccgggaggcagaggttgcagtgtgccaaaatcgcgccattgcactccagcctgagcaacaaagcaagactctgtctctaaataaatagataaataaataaataaataataaataaataaataaatattgtgtagacacaggatctcactatgttgcccaggttggtctcaaattcctggcctcaagtcatcctccttagcctcccaaagtgcccagattataggcatgagtcaagacttgcagttttaaggccaggtgctggaatttcaggttaccattattatcaaaaagaatggtttgttgagcttaagtttagtggcagtaaagggagtggacaaagctatataagagcaatgttttgtatagtattgaaattaagttggtatcaatctgaactagattgctaaaaattaagatgttatttttaatccctagtatggtctgaatgtgtcccctccaaaactcaggtgttgtcaatgtgacagtattaagagatagggtctttaagaagtgactaggccatgaggggttctccctaatgagattaggtgtccttataaatgagatggagggagttgcttctctcatgtccttctgccttctgccatatgagaatgcagcaaaaagcgctgaccagatgctggtgccttgatcttggactttccagcctccagaactgtgagaaaataaatgtctgttctatacaaattacccagtctgaggtattctatcatagcggcaccaaaagactactaaaatcccctaagtaggacttgcatcccaaggaagtgtaagacttctgcactgaaaactacaaaacattgctgaaggaaattaaagacctaaataaatggaaagatagcccatttttcatggatcggaagatttaatgaagtactgatacatgctgtggcatgcataaaccttgaaaatatgctaagtgaaagaagccagacacaaaagaccacagtgtatgattccacttatatgaatgccaagaataggcaaatccgtagggacagaaagtagattcatggttcccaaaggctgggcggagtggggagttactattaatgggtatgaggtttctggtgggggggggttgttgttgttgttgtttgttttgtttttttgttttttttttttgtttttgaaacaaggtctcactctgttgcccaggctggagtgcaatggtccaatccagctcactgcagccttgaactccttagttcaagcaattctcccaccccagcctccctgagtagctgagactgcaggtgcacaccaccatgcccagctaattaaaaaaaaaacttagggacaggatctcattatgttgcccaggttggtctcaaattcctggcctcaagtcatcctcttgccttggcctcccaaagtgctgggattacaagcatgagtcatcgtgcccagccaagacttgcagtttgaaggccaggtgctggaatttcaggctaccgttattctcaaaaagaatggcttgttgagcttaagtttagtggcagtaagggataaagaacagtgaaacaaggagcatatagtattaatcaactacagacaactgccctatttgtaaatagaagcagggaaataatatatatgtgtagtagcttataaatgcgtaaaaattatctgggaggataagcaaatgtctctcaaacatctaaaagcttccttcaggctgggtgcggtgcttcatgcctataatctcagcaatttgggaggccgagatgggtggatcacttgagcccaggaattcgagaccagcttgggcaacatggtgagaccccgtctctacaaaaaaatacaaaaaaggccgggcgcagtggctcacacctgtaatcctagcactttgggaggctgaggcaggcggatcacgaggtcgggaggtggatcacgaggtcgggagatcgagaccatcctgactaacatggtgaaaccccgtttctactaaaaatacaaaaaattagccaggtgtggtggcacacatctgtagtcccagctactcgggaggctgaggcaagagaatcacttgaacccggggaacagaggttgcactgatccgagatcgtgccattgcactccagcctgggagacaagagcaagacttcatctaaaaaataaaataaaataaaataaaataaaataaaataagccgggtgtggtggcatatgcctgtggtcccagctacttgggaggctgaggtaagagaatcacttgaacccgggaagttgaggttgcagtgagctgtgatctcactactgtactccaggctggatgacagtgaaaccctgccaaaaaaaaaaaaaaaaaaaaccttatttcataaatacggctcatgcctgtaatccgagcactttgggaggccaaggtgggaggatcacttgagcccaagagtttgagaccagcctaggcaacatagagagatctcatttctactgaaaattttaaaaattatccaggcatagtggcgcatgcctgtagtcccagctactcagaaggctgaggcaggaggatagcttgagcctgggaggctaaagcttcagtgagccgtgatggcaccactgcactccagcctggatgacagagcaagaccctgtctcaaaaacagttaaaaattaaaaattaaagaattagaaatacacacacacacacacacacacacacacacacacgtatgtgaagtgtaatggcaataccattttttctatgaggttgacaaaaatctgttgcattgctcaggctgttgacaaggctgtggtgaaaatggcactcacatactcatgctagcttctccttgctcttgcttggaccagccatgctcgttcctacctcggggcccttgcacctgttgctccctctgcctggaacaccctttgccaaaataaccatgaggcttgctcctttcagccaacctaggaccaaattcattgccccctccttagtgaagtctcgctgaatgcctcctcacccaccacctccccacaccactctcacatcgctcattttcttcattgcaccatctttatgaggaatgatttctcttttattctctttgttaggtcagaggtcagctaacattttctgaaaagggccagagagttaatagctcaggctttgcaggccatatggtctctgttgcaaatcctcagctctgcacgagaaagccacaaacaatatgtaaatgaagaagacactgtaaatgatatgtaaataatttagacactgaaattgatatgtaaatgatttagacactgaaatttgaatttcacataatttccaagtgtcacagaatattatttcttttaataatattttttcattttcttttcttttttttgagacagaggctggagtgcagtggtgagatcttggctcactgcaacctctgactcccaagttcaagcgattctcctgcctcagcctcctgagtagctgggattacaggcgcgtgccaccatgcctggctgatttttgtatttttagtagaaacggggtttcaccacgttggccaggctggtctagaactccttacctcaggtgatctgcccgcgtcggcctcccaaagtgctaggattacaggcatgagccaccacacccagccccttttctttttgagacagggtctcactctgtcactcaggctagagtgcagtggcgtgatcatagctcactgcaccctcaatctcccgggctgaagcgatcctcccacctcagtctcccaagtagctgggactataggcttgcactatcacacccggctatttcttttaatattttttgtagagatggggtcttgccgtgttgcccaggctgctctcaaatgatcctcctgcctcagactcccaaagtgctggtgattacaggcataagccaccatgctggatccaccttttttcaatcatttagaaatatgaaagccagtcttagttcaagggccataccaaaataggcagcaggatggatttgcccactcgtgtgtcagaacatcaactccagggcactattgtctgcttggttcactgctatatccccagcacctagaatagtgcctggcacccagtaggctttcaggagatgtttaccgagtgaatgagtgaagtctttttctgtgtgtgagatggagtctcactctgtcgcccaggctggagtacagtggcacaatctcggctcactgcaacctccgcctcctgggttcaagcgattctcccgccttagcctcccaagtagctgggactatagcgtgcaccaccacacccagttaattttagtattttttagtagagacggggttttgccatggtggccaggctggtctcaaacttgtgatttcaagtgatccgccggcctcaacctcccaaagtgctgggattacaggcgtgagtcactgctcctggccaagtgggtgaaatattaagttgagtagcaagttactgaaagagtgaagtgaatgaatgcatgatcaggcacagtcccactcgcagggcttcagtttgctccagcctggactccggcaggctcccccagcaagactaagagaaagatcagaaggctgagtccagagtggtagctcaacatctttatttttcctctttagcccgagggtaatcctgacaaacagcttcagccaggaggaggcagagaggactgggctgggcaaaggctccaccaggacctggcctcctcctcctcctcctcctcctcctcctcctcctcctcttcttcctcctcctcctcctcccatggggttggggttgggattagggccatgatccaagcttggcatccctggggaggagggaagtgggccagtctgcagcctctgctgtcccccgcctctgacaaccacgttcatgggaaccagccacctccacatgttgggcaggagggaccctagggagcggccctgacccctccatgtgcatgcgcacagggacctgggccagcagggcctgatcagtgtccagacatgcggctctggcctgtggcccagttggcaaacataaagcctagactgacggccatgaagaggactcccaggactccaaagcacagggcctgtgggccagagagacaagatggggctggttgggactcctcacccagttgccttctgagaatgttcctcaagtcttccacctccttcagagagtgctccatccattcctgaccctcctctgtatgccctctccttccttacagccagcccctttctgcgagtccttccaccttcccaggacccatgacagaatacgttcctccatcctccttcttcaaagtgcttccagctctcttcccaatagtgctctttccatctgtctggagaatgctccctctatgccagcctctgtttgagtgctccctgtcttcctggaccctgctggtgctctgtctcctctgccccttcctagacaatcaccttcattcttccagaccattctttcagatgctctcccagccccctcctatgcatgtccctttcacctccagccatcctggagtgagcactccctccttggagtgctccctctctccctagctctgccctggaatgcttacctggatcttgggccaggataagaaaggctccacctcagagggtacaatgcggaggtagaagatgctggggaggatgaagatgaggctgggggctgaggtggaccctggagaacaagaagaagggacaggagtcaacctgacttggggacaaggcccatattagatggggtatgggactggggtgaggtttactgaccgataactccaaagatatcccggatggttggcacacagatgacaaggacattgaccaaaacaagcaggatcagagctatggccacatgtcgtggccagctgaaggccttgcctgggaaaagcagctgctgcagggcccggcggatctgtggccagagtagggtgggacagaagtcaggacccaagtgctgccccccttccacgtgatcatctgtctttagctccaccctctggctgagatccctgatttcccctccctctgactatctatggctccaccctgcctaacccaacatctgtgtctctatgttctgaacaggcttcctgcctccatcctctgacaatccacgtctcttccttctgtctgaacacccatcggcacctgcacccactgtctgaaatccttgcctcctcctctagctgaccatctttgccttctccttctgtctgaccatccaccgatccttccaccctgtgtgagctccctgcctctctccatctgacctctacctccctcctctgtctaattagttctgcctccccatctgggagacttgaccctcctacatcccatcacttcagcctccaccctttttctgtccatccctgtttcttaattctaccctccaactgacccttcctgcctccctcttctttctagccatccatctgtgcctcctccctccaactgactaccctgtcccctgaccctctctctcctgctatctatgtcctccccacttctgtttatcgatttttgccatctctgtccatctgaaaacactgccctttcctgtctgtccatccttgcctccttcatccatccatccactcctgtttccagccttgacccacacatccatgcctatgccctctacccatccatccatgtccctctcagccgtgggccccacgcacagggaacagcacgactggcacagtgagggtcaccgcgagcagcacggccaggcgcacacagaggatgagcgggtccttctggctgtacatgtgcagcatctccgccttcacactgcctgggccatgagacagagggtacgggatgcaggatgtggagagagcaccaggaccaatgccccagaaacccatacatacatgcacagtgacaaaatccacacaagtgaggcacaccttctgtttggaaactgacaggtccgtggtcacagaaggaaagagctcagaggctcctgccccaggccttccccctccccccagccctagccccagccccactcactgtagaaggtgaggtatccaaaggttgctgtgagcccatacatgcagaacatggccccaatggacacgttggccacggcctgcatcctgcgcttggagggcctgaggtgtagaggtcgtggaactgtcatgcccagaccctgagacttgccccaggtccctcaaagccagcctccaccctccagagtccccttctcccagactgccattcagctggcacacatggggacacccgtctctgcctcccctgtgactagccaaaatcccctctctgaccatccatatctcccccgatatgactgtctccctctcccctgcgtttgactgccactgcctcttccatctgaccatccatgctgtccctctgtctgatcatccacacatctcccatcatatcatccctgcctccgcctctgtctgtccgtacctccctatccccatatcaccagccatgcatatcaccccctccatctgatcatctgatctctgcttcccaactctgtccatccacatttgtgctggatattaaaataggagaatacttaagccccaatcagcaaacagtcactaccctgagtgccccaagacctcctggccaccccaaacccctcccatgacacaacctagcttccaccaagtgacagtcccaggactgctgtagggagtgtcagacattctggttaccaccccacttgctggcccatcattcaggcccacttgcctgcccactcaccggcagagctccgtatagatgggcagcacctcagggtggcagacaaaagcaaaagccataatgggcactgtgtaggacatctaggggaatgcccgagtacatgggattagagccaacaggggtccatccccttcttcccatccccctcccgccccgtaatcgccctccatatcagacacatagaagctcccaatgtccaatatccagctccactctgagcaggatgcaccatatgacagaaccagagggcctgagtgtgatgcaatctcctacatgcctgcacacacacctgtgagtcaactgtgaacatctgggcctcacagctgctgttgagtccttggctggggagtcccacgagagcttcactctccattgctgtttcattgtggcctatagcacagccaagttggaacttcttgtagatgacctgaggatgggggcagcagggaagccaggtcatggaggaagctatgtcccaatgtcccaaactctctccccgcttctctgtgactcaccgaaacaaggaaaaacagcatgcaggtcagagagagaccactggtgtaccccaggtagcctaagaggggcaaaacacagagtctcagaaatcagccaggcgtggtggctcacacctataatcctagcgctttgggaggcctaagcgggtggatcacctgaggtcaggagttcgagaccagcctggccaacatggcaaagccccatctctactaaaaatacaaaaattagctgggtgtggtggcgcatacacctgtaatcccagctactcgggaggctgaggcaggagaatcgcttgaaccgggaggcagaggttgcagtgagccaagaccacgccattgcaccactccagcctgggtgacagagtgagactcggtctcaaaaaaacaaaacaaaacaaaaaatcaatggacccccggaacagtgaactccaaacacctagtctagccttcaaggtctacccaccccagttacctttgcataagcttctacttccacccagaaaaacctcccctccatagcaaactcctactaatctgttcaagcccacatcaaataagctctctcctagtgtgctgcagcccttgaaaatgaatgggggttttctcagtctggcttcttctgtctaatcccactacccaatggccaacccagggagcctcttacccaagtgtttcatgagggcgaggggcaggatgattaacacactgacgatgatgatgaggaggtttcccttcaagaaccagtccctagagagacaggaagacacagtgcctagctgccagccaaaggaaactgtcaggcagacactcacagaagacagctggacaggcagctttctgccctaagtcaggagagttaagctgacaacctcagcttgagaagtcattcaggtggtcacagtgacaaacggcacaatagggttgacaaaaacagtcaagctgattatgagattgtcagatactatcagtgggacacagctaacacatacacagctggacaaaacttgccatcagacttcgcaagtggttgcacaaccagaaggtcaaacaccccaaatcagtcagactcaatgtaaaaatcagtccaggccaggtgtggtggctcacgcctgtaatcccagcactttgggaggctgaggcgggtggatcacctaaggtcaggagtttgagaccagcctggccaacatggtgaaaccctgtctctactaaaaatacaaaacaaattagccaggcgtggtggggagtgcctgtagtcccagctactcaggaggctaaggcaggagaatggcatgaacccgggaggtggagcttgcagtgagccgagatcacgccactgcactccagcctgggcgacaaagggagactctgtctcaaaaaaataaataaatagataaatagccaggtatggtggcgcgtgcctgtaatcccagctactcgcgaggctgaggcaggagaatcacttgaacccaggaggcagaggttgcagtgagccaagatcgcgccattgcactccagcctgggtgacagatcaagacactcaaaaaaaaaaaaaaaaaggaagaaagaaagaaaaaaaagaaggaagggaggaaagaaagagaaaggaagaaagaaagagagagaaagaaagaaagaaagaaagaaagaaagaaagaaagaaagaaagaaagaaagaaagagaaagaaagaaaggagaaaatcagtgcaacacaaggtgccagacacaaagagagtgagtcacgatcgtggtatgtctgacaggtagagcaacagtctgatgatccagtagacaagccacgatgcagagtccatcaaaaagtcagaaacacacatgcatgcttgtttgaacagctcaaggtttgttggatgcctgaaagtatgcctgtggactgatttggctgcacagccaaagaaagactgaaatagaaacgaaatcatccagctggccacactgttggaaccaagctctgagaaaaggtgggatctgtacagatattggaggaaggtgaccaggcaagacagtcagttaagacagaatcagctgaacaactgctcatgcattcaaaacaacttgattgaatgcctatgttctagacattcacatggtctctttctatctcatatacagttacacagaaataaaccaatgggagctaactataataatgagacatctctggtcacactatcagctatctagtgttctcagaatcaaaccaaaaatctaaaaggatacacacagagagtaaagatcaagcactcagttaaaattgtcagactggccgggtgtggtggctcatgcctataatcccagcactttgggaggccaaggcaagcagatcacctgaggtcaggagttcaagaccagcctggccaacatggcaaaaccccgtctctactaaaaatacaaaaattagccgagcatgggggctgaggcagaaggatggcttgaacctgggaggtggaggttgcagtgagccaagatggcgccactgcactccagcctgggcaacagagtaagactctgtctcaaaaaaataaaattaaaaaattaaccgagcatggtggtgcatgcctgtaatcccacctactcaggaggctgaggaaggagaatcgcttgaacctgggaggcagaggttacagtgagctgagatcgtgtcactgcactccagcctgggcgacagaatgagactctgtcaaaaaaaaaaaaaaactgtcacacagaccagagtcagactgacaaaaccagagacacatctacacaccatgcaaagcccatgggaccagaggcagagttagcccatgggaccagaggcagagttagccactggacacacagagctgttcatgaaacacacagaggcagctacacacgtgcagctggagcacaagcactgcaacacactgtgcatacacactagccctgctggagtcccatcgtgcacatgccccccacacataccaagccagcacagcggatccggactcacacacagtcagccagatgcataatcagaacagtccagcatatatggttgcaaccataatacagaggacacatagccacattcagggatcacacacacacacacacacacacacaccagagagaatttgccagaacagccaccaaatcaaacacagagatggagttggctggacacgtacagtcagagtgagtcacacatagttggtaccacagcatactacgtgcacacagacacactgctggagtcagcgatcacacactcacagctagacggagtcagtgatcacacactcacagctagacagattcagccagatgaacctagaatcaagctcaaacaatcagctggacaggggaagtcagagtgaccgagggtaagacacatatggttggaatcccagtatacgggacacagctgtagtcaatcacagagctagcccaagagaatcagccaggacagcagacgcagagtcaaacccacaggcagagtctgagtccattggctatgtacattcacacacacatggtcagcagcagagtaaaccggacataaagagtcagcctccagccagaagcagccagaataagtcacaaaatcagcacacggtcgactggactcctgtggtcagagcaacaggcacacagaggaatcagtctgacccaagtggcctgcccagcagtctcaaactagaacatctggaagtcagctgcacacacagcgctgaagatactgaccgggcctcacaggcagagtcaaggggctgctggccagccaaggggtgttgctcactcacccctcggggtccatgtacaggaaggtgccgataaccagggggagctcagatttgatgatgaacaggtaactggacatggctggtgcaggtgggggaggtgtaagcagaaggattctcttcatgcccccaccccgtcttccccagcccagcctggggaagcccacctcactccgccctctccccccaagctgacccccacctcccagagtcctcacccccaacattgtgcagacagatgactgtggccaccactaccttccccgcaggcccgaatgccctctgtcccagctgctcataggctcggatgcctagcggggggagtcaggaacagggttgaaggtccaggaggccaggccagaggtgcaggccagagggcccaggagctggggagttggggcttgggggaaccggctttgactgatggaggatgaaggtgggggttaagcagttgggcttgagtttgggggcagagtctgggaggtgggatctgaggccagggaaaaggatgagggctggaggtaagagtaggggtcttggagccagactatgaactgagaccatggtaggagctggggaaccggggactgaggggtgggggttagaggtagagtgtagtggtctgggggtgggttctggggtgctgggtccgggatctggggtctgcattcagggagctgggtctggggtctggggtccaaggtctgtgttgagctctggatgtggctccagagtctggggtccaaaggggtggagtggggactgggatccaggctctgggtctcacctgcaataccagcacaggtcagcaggaggtggatggagtaggacgacagaagcgcaatgcacagcagcagggccctgcggcaggtggcacagctcagacctggccccaggcctcccacctgccccacaacacccctggccccgcaggccacctatggactcacaggaagaagatgacccccgtgtgggccatggcataggccagccccaggatgccgctgcccatgatggcgttgctgaggttgaacactgacattccaaacgatgtcttcccctcgaactgcacgcaaggagcaaagcccgggcacacattgggacagggcacagggtaaggagactaatgccagggccagggaaagactagagaagaagcaagcggggtggagagaagccaaggagagaccatcggaggagggaagaggctagcagggaagaagagttgaagatggaagaggctgcgaatggggagagctgggaagggggaaactaggacaaactttggagggagcagctggaagtggagaggaccgggggagggtgaagcagccaccagaggtaaaacagctggggaggggagacgctgcgggtggggataggctgaggatggggagtgctggaggaggaagaacagctggaggagaaaggcaggccgggaggggagcagccagggagggcagtcactgggccgaagagcgggtggggagaaacaaggccagggagagagctggaaagggcatatctggggaagaggagtatctggagaggggagcgaccaagtagtgtgtagctgtgctggggagatagctgggcaggggaacagcagggaggaggaggagtggggaagagggagcagtgcgggaggagattagctggggaaggtgccaccaggacagatcctgtggggccactcacatccatgaactggaccggcttgctcccaggagcaggaccacgactgggcaggaagccctcacgttcttgcctgtagctggatagggcagggaaataggggccgataagagggaaatcctaacccctgatccctgagcccacctccttggacccctgactcaccccacagcatccgaagggagggctccattcatctttggatcctgcagttccatcctgtgggcaaagaaatggggtggggggatcagagatggaacgagcatgcttcaaagtgaggggagctgaagaaggggggaggggagtcccatagagaccgatggaaagacggagaaagagacaaggcaggggagcaggaacagacagggatagaaatggaggcagactgacagagaaagagatgagagagagagaagaacaaaaatcagagaaggagagaagccaacagttagttactcagagagacacagagagagccagtgagagagaaatagtggggaagagagagacagaaagctacagagagagccggaccccagcgcagatgagccgaccacgtggagaagggatagcctctcctcccagaccccagactcacgctgtctctcttgccatctgtgtctttcattccccggtcccccgcgccaccccctctccttccctccaccctcaccgcgtggccaggcggctcactccttgcagggacacgtgtcggcctggctgccccacccctcctaatgccctcacccccctccttcccgcctgggcccccaagcccgagaccagagctaatgcaacctgttgagtgagctgagggttggggacagactcggagacccctgccccagacgctgcaaactgctctctgccacgactctgaatatcctcactagaagccaaagacaagtgcccgaaccgagccccttcccagggacagaaatgacccagggactcccatttgaccccaattctagggcctagaggtcttttccagggcccctagcaagtcttaaacactcatcttctggcagaagtcaatttggagacactgccagacttgagaaacttcctaggtgtggggtgtggggtgtctcaggaacctggcccgagccctcatttcccctccggaggaagagctatttctgagaccttcatcaaagaccccctcccgtggcctaccgagtttcctggggtgggggtgtctctgcaatccccacccgagcctggagcccctgtcttgtaggtacagcgtctctgaagaaaccccagctccctcccgcgcttactccttgggaaggaggtatctcagaaacccccattcaaggtccccattagagctcaaactggctcaggaaatccttttcccaagtcctgaatcccgttcctgggacagggagggtctcaaggagtcccatcccccaccaccagcaccctccggagcctcccacccacacctgaattcacttcctgggatcagggtacaaaaaggacctccccatacacgccattccattccccactagtgctaaaatgtctccaaggaaccccgagccccctcccaggacccctactcatatctcaggcccccaggaacaccatccccgcagcccacgctccctcctcacctacctgctcctctcagctcctgaagtggccgcaactcagactcaggttcgggcaccctctcggctgcctaggctcctgctctggagcggtacttttttttttttcctgagaagaaatgttaattttaatttcgtttccctccttctggccctgggcgggggaagaggtggagaaggggcgccccctatctggacccacttggagggagacagcggtttgtttgtgtgttgatggtgggggaaatggcctgaaagattgagggtgtagacccacagctagagagagtgacaggcagacagaggggatggactcacagagcagacggacagcaggatgggatggatggcagaaaaaggtgcagagaggagacagagagagagtaggagaactgaagttacaaagaaagcaggcatgagaaacagcacaggaacagacagaccacagaagggacagaaagacagatgggcgggaggaggggatgctaggggagcttggaagacaggcagagacagggagaaagggacacacaggcagactcagaaacaaacaggtgggtagggataggctcgtggaaacacctgcagaaaggcaacaggcaattgggctcagtcatagacaggagacacaggctggccaagaggtgggggacagagccagacagctccccaaacagagggtaggaccagacacaccagctcagagagatgaaggggcagagagagtggttgaggcagagagactcctggagggacaggagaaaagaggcagagagaggcagattcaggcagagaggcctggggacagcaggggaacaggtgcaggggtagtagccaggctattccaggcagacctcaggcagacagcctaggcacgagaggaccctagatcttgggggcccccagagggaggcagggagggcatttgtggctgggtggggaatgtggactgtgaactcacactgtccgcaaactgggcgggcactgtagtcctggaccccaccccaagcgtggggtggggcttgtccaagccctgagaagtcccactatctgtctgtccgtctgtcttctatgggagtccgtctgttcactcccctccaggcatatgacaggcatgcctgtcccaggcaagccacgtgtccgctacaggatgtcaggcagggtggacttggggtctgggaccacctcgactgggctgcttgaagcccaggtggacaagaggcctctgtctgggcccctcgcccgcctgcccacccccgacagggaacacagaattcccggaaaggccaggagctggctggggcttcaaagctggcctagatgccctcaccccacccacagttggaggaggacaagggatggggcgtttacttccccacagcgggagagagactcctgcacactcaggaatcgcagctacacaacaggacccatcacagccccatcaaggggctcagatacgggggccaactcgccatcactcacagaggtgcacaaagactcacagccacacaagagaataaagactgacagacatgaacacacacagactcaccactgcacgttaagagcaatggctcatgggacagtcacacacgtggccacacagagtgacgatagtcttacagctatcaataccgacaggctcagagccgctcacagagagcacagactaacacagggataggcttgtgccgatttccagacactcgagactcctgaacctcaccgcccgtggacccacagccatgccaaagacaatcaacaggcaaatcacacacacagattcacagccacacacagagcacacaattacacacagctgatgacattgtgtgtgggtcctgggtctttcccacacacacgatccaggttcagatggccctggatctgaacctgaatccaggttcagatgaccctggaggcaaacttccaggttcaagccctaaaatgatatctctgtgtatgtgaacttgaatgtgcacttgtgaccacatgtaaccacatacagctccagtcacagagagaggcactcataggctgacatgatttttgtacaaacagaaaagccatagtctccttctctctctctctcctctctctctctctctcacacacacacacacacacaactgcatttcagcaaatggctgcacacagccgtgtacacacacagctagtcacaaatcaagtcagaaaagaaacatatagggaaagcatatacctgcacacaaacacaaagcacaggaatgcagagtacgcttactatcgttgcaaagaaaaaatccagaaaccacactgaaagctacacaaggaaaaaacaagagaaccagatagtactcataccatggcaccagaagaaacaccccgagggcacacatacctgcagccactcgctaagaagagacacaaatacagcagcagacacacaaagaaagatacgtgcgcatagatacacatataggagggacaagtactctgacacacttgtcacccacgaccattacaaaggagacaaacacccaagcaacacacacacacaacaacatatagatgaactgcaccgacagacagtaccaatgcacacggttgccaaaaaaaaaaaaaaaaaaaaggtatgagttgggccgggtgcagtggttcatgcctgtaatcccagcactttgggaggccaaggtgagtgaatcatgaggtcagtagttcgagaccagcctggccaacgtggcgaaaccccgtctctactaaaaatacaaaaaaaattagctgggcgtggtggcgggttcctgtaatcccagctactcgggaggctgaggcaagagaattgcttgaacctggaaggcggaggttgcagtgagccaagatcgcgccactgcactccggcccaagcgacagagtgagactccatctcaaaaaaaaaaaaaaaaaaaagcacaagtttggcaggcggccatagacagaacgcagcaccaggcaagttacataggaagacgcaggcacagctcacatacgtgtggctgtggctgagaacgggcaggtgagatacactcagcatattcacacacacgtgcgcacacactcctgcccaacctcctccagcctctgtctcctttcctatctactctgatttctctctcccctcatacccctcccccacccagagccattacacatctgtgctaccagctggccagggaaagagacacctgtcactagaggctttgacccagatggctaaaggtcggggggtgggggggatgcaggtatccatatttcaagtctgaagtgtcccgtccaaataactagcatactttatttggatttaaaaaaaaaaaaaaaagacaacccccctcccctctgcatccattcgccgcctccctgccacagcctcctgctctgattgctccccttccctcccagggcctgcctctactggccttccaacatggaccaacacagggctaccaggcacacagcaggcgctcaacaaaggccacttatctaatgtcgtattattatcattacttttatttctgccaaaggaactcttctacgggagagatgaacctccatccagctctgagaacccgacagctctgctaagtttcagggcactgcagatagcaggtgctcaacataagccggtatggcagcgggaaaacaaagggaatgtgtgatctggctgcttagaggaatttgctttagaaggaacagatgtctttaagcaggaccgaggccttgaggctgtgccagggataagaacactttgttagttcatcaaagtagggctccttctcagggtcatttaaggtttctgttggttcagtaaaccagacccttgtgtgacacatgggagtcccgtgaaatctgttaaaagtcactttgggttatcatcagttctaaggagacatttgatgaaaacagctcacttcccggtagcatccaggggagggagggacacagtgaagcagttaacagcaaaagctttctcagctctgccacttattagctgtgtggctaaacaagcaaattcctaaacctcactgagtctcagcttcctcaagggcctaataacgcctaactcattgggctatcgagacaattgaattaattaacacaggcagagcacttaagacaatgctttacacatagttattgctcaatacatatttgtgggaggaattaatgatttcttctctgcgaaagcaaagtcccacttgctgggctgcatatgggattccaatctgtcctttcatgcaggctccccacggagtaactctttccagtcacttcctttcctcaaagcagcccctgggcagcaaagtcctagtcccctgcccctgggccacccccctcgttccctcacactgctaagatgcccccaccgggaaagagctggcctggcagctcccccttccttgacccctccaggaggccaagggaaggacacctttacactcagtggggtgccgggtgggagctgcaggccgacaccctacttcgggaagagcctggagagttcagagcctggctcctgtcccccaaacccccggtcctgctggaggaagcaagtttctttgctaaaagttaaacatcctcttcgtgagcgacaagaaaacaggacgtgggaagcgtcccacagggtgaacatgggcccccaatgcctggcaccccctcctctcttgtggagcggaggcctggtggctcgaacccttcctttctcacactcgctcgcctctgcaggggagtcatgttcccacagtcccacaatgcccttgagttctgctgacaaagctctggcttcttccctggttctcagagtctctacgcctccacccagggctccatagaaatgcaggacgcaccactggggaaaaaattaaggaacgaagcaacaaaaggatgaattcaaccaacatttattgaacaccaactgtgcgccacccctgttccaggcactgggaggcagcagtgaacatgacagaacaggaatccctgcctggtgaagctcgtgtgctaaggaatcaatcattctgttttttttttttttcttgagacagggtctcactctgtcgcccaagctggagtgcagtagcacgatgtcggctcactgcaacctccacctcccaggttcaagtgatcctcccaccttggcctcctgagtagctgggactagaggtgcgcatcaccacgcccagctaatttttgtatttttagtagagacggggttgcactatgttggccaggctggtctccaactcctgacctcaagtgatccccccgcctcgccctcccaaagttctgggattataggcgtgagccactgcatccagcccttttattttttaaagagacatgggttctcgctatgttgcccagactagattcaaacccctgggctccagggatcctcccacctcagcctctggagtagctgggactaaaggcacatgccgccgcccctggctaatactcatatgcatgttgccaggattaaaatgaatgaacaaagggaaggacatgctggagccaacttatacaggttgggaggagctgttcaattttcagaaattttgcaaactggttgttaaacagctggtttaacaactggttttgtttgtttgttgagacagggtctcactctgtcacccacagtggagtgcagtggcaagatcaaggctcactgcagccttgacctcccaggctcatgcaatcctcccacctcagcctcccaagtagctggaactactcgcacacaccaccacgcccggctatttttattatttgtagagacggggatctcaccatattgcccaggctggtcttgaagtcctggactcaagcgatccttccacctcagccccctaaagttaaacagctatggttaaaaatgaaatgatataaacttactcaaaactggtaacttcctaattttaccacattccactattctctatgctcttgaggtcatttacccccattttatctgtatggtaaaaataatacatgatagtgcactactgcatctcttttaaactccctgttcagtgaccacaggtcggtaccttgaaatctaacaagaagattgtacctaagccatggaaattggtaaatgctagaaaccagcctcccttccccccacccctccccgccaccacccccgccccagccagtggttaaccatttaccagcacaccactgagggcatttagagcctagcacatggtaaacactatgataaacgttttcattatttttccgtttgtccactgggtcaggatgtatagtctttttttgtgtctgggatggaatttaaaatatttgaagatcacagaattacaaaagcccagagagtggctaagctacacctatttaaccctcccaataatgctgttaagtctatactattgattatccccactttccagacagggaaactgaagttctgaggcagtaaaactcaggcagcgccatgcattagctgtagtgcgatctgaaattgcagccgagcagcctccgcgcgctcgcgcacttcaagaacgcattttccttactgtcacgtttatgccccgagtggtaatttcgcttcccggcacgcgaaaaatgaatgggcgccatcttgcgcgtggcatcttgggaaatgtagtttacaggctcaataacaagcacggtccaagaagggaggggcgggggagcaaatcgatcttggcctcggaagaaaaagaacaaagaatcgctggcaacttgcgcgtcgcgtcgctgcagccacgcagtgcgtggattcagccgctttggccgtgcccgttgcatgccgggaaacgcagttcgcgagccccggatacgtcgacaatagatgacggggctcacgttgtacgttcacatcaggtcccggcccgccggaacctgggcgatccacgatgccgagtttgccacgctgcgacagcccataggcttgcccccccgggcattcgggtggactacgaacacaaactgaagccctaggacttgtcgcccgtttgcgctctcgccgaggcacaggctgctcgcggaccaccctgctccgaaaactaaggtgggccctggggcgcggaggacaggaatgcgggcggaggctattgaggcacgcctgcactgtcccgcctgcggggaaaggagggaggtccgccctgggcgccgtagctgtgtatggttcgggcggctggcaccgggtgggttctagacccaaggtttgtctgcagaaggggaccagtagacggggtggattcgaggtggggacatgggacgcagcggtcggagccgcctggaggggtacccggtggtcccgatggagctatcatctttgaggtattgatgaggagggacggggagtgtggtcagaaggctgttttgggaggttgggtggagcgtgagggtggggtgttactggggaatcaatgggggctaataagaatattttagtcgaactgttgttcattgattgattaatgaggggatggcagagtaagcaactagaatataacgagtgatggatgggaaaatgatcccccaggtattgatggaggtatgatattcaacgggttaatggaaagtgatggggcatcgtaatggcaaggatgatggtgaggttgtggggggaataatagatggatggaggtcatgatcaaggggccttggtgaaagaaaagataatgagaggctgatggtgttgtagtcagagtcagtagttgggctatggtggcatgaccgtcgaggaattaggggacagagtgagtaaagagagggcaatagtaaactagggttgggggggttaacttctgttgatacatagtaggtgaatagtaaactgttggagtgtgatcatccagtgatggatccatggagagcagggtggacagtgaggggagaatggggaactgatgtgtgatcagttaacgtgtttgttaatgaaagagttacagggcaggaggctagtgctgtgatctatgaagggtctattggagaaaactgagttaatgggggctgataaatcagtaattgaatgcttaatggggagctaatagaccatgattctccaggcattgttagaggttcataaggatgtagtaataaaggggcctaatcatctaagggattaatggcgaatggggtgaaacgagagagatatagggagtgggaggtacaatgaagtagtattaggataaaggtggaaaacaagggattaatgggggctaataggactatatgaatctaggggcaatggggacaactggggatacagtcagtgagattttaatgggcatgacatgagcagagaagggttgatagtggcagttgcagggtttaatgtgtggagtgtgggtgacagtgatgggaggtggacaggttcacaagtgggccatctatgggatgaatgttgggtttatggggtcttttgtgggaactgtggggtaagtgatgggggcgaggagggtctgtgtgataagcagtggagcctgagagttcagtgattgggtccttcaggccctataaggtcagtggggtcagtgccagggcttcagtcagcccatcttctgtgtgagctgtcatgtgggtcagatgagcccagtttagtttgtgtggttctctccgccctacagaggtaggtggtagcccattcatctggttactgatactggccggcatcagtggactgtcggcaggtccttgagcaactggtgtgtgaaatgggacggacgtcaaaggacaagcgggatgtctactaccgcctggccaaggagaatggctggcgtgctcgcagcgccttcaaactgctacaactggataaggaattccaactcttccaaggtccctgactggtgggcaggtcactgggcggtgaggtgggcacaggaggtaaacaagtaggctgggtctgcagagctccctgtggtaggtgggctgactcagagggtctctggggcagggagacaggcaggaagataggcagaataccggagaggagttgggcacctgggcaatggagatatgtgggtgctccccaggggagaggggtgaattttgcaagggtctccaggttggagaagtgggtgcagctgatcaggatgctttcactatgtatgcccaggcgtgacacgggcagttgacctgtgtgcagccccaggcagctggagccaggtgctgagccagaagatcgggtaagtgtgggggtcccagatgggagacccaggagggccggctgggtgggaggggcccgggagcgaaactaggctgatgtgggccatgttgtccacaggggccaagggtccggccacgtggtggctgtggacctgcaggctatggctccactaccaggtgtggtacagatccagggggacatcacccaggtaagagcatggctgagggtgttggggtatatcctgggtgaaggcccttacctggggtctatgcagagtggaagagaaacagagaggtgatagaaacagagagagaaagagagtgagagagtaaccatggagaaacagtcagcaggtcatcattgcacagacacagcagaaaatgatgatgctgggtccccagaggtggagcccagtcttagagaggcaaagcctgggaatttggctgacccaggggctgtgggccaggaccatgggcaggcgggatctgagggcagcagtggagggccgtggggccactcatcctccctctctccatagctgtccactgccaaggagatcatccagcactttaagggctgccctgcggacctagtggtgtgtgacggggctcctgatggtaaatagcaacagaaagtgggaggccaggcggggccccctgtgtgtgtccttctctgtatctcccaccttggttgacttattcacctcttcagttactccctgcctctcccttccgcactcagctttctcccacatctggcaacttctccctacctctgctgcctgttctctctctgcctctctcttcctcccacttgcaccccaccctttgagtttcatgtctgttgtctacctttccctgctctcatctctctgcaactgtccaattccgttgcactgttcattcattttcagccagccagccattcaacacacatttactgagcacctattgtgttgggaaaacattcatgaataaaattccattaatctttaacctcatggagctgatgttctagtgggagcaaatgggaaagaaaataaatgattcagctctgtaccattaaaaggggatggggccaggcatggtggcttccacctgtaatcccagtgctttgggaggatgaggtgagaggaacacttgaggcaggagtttgagaccagccttgcaacatagcaagaccctgtcttaaaatattagctggcatggtgatgcatgcccatagtcccagttactcaggaggctgaggtgggaggatcacttgagcccaagaggtcgaggttacagtacactttgatcgcaccactgcactccagcctgggcaacagagtgagaccctctctctaaaaaaacggggtgaggaggccgggcacagtggctcacgcctgtaatcccagcactttgggaggctgaggtggtcagatcacctgaggtcaggagttcgagaccagcctgaccaatatgatgaaaccccatctctactaaaaatacaaaaattagccaggtgtggtggcatgtgcctgtaatcccagctacttgggaggctaagacagaagaatcgcttgaacccgggaggcggaggttgcagtgagctgagatcgcaccattgcactccagcctgagcaacaagagcgaaactccgtctcaaaaaaaaaaggtggggtgggggatgggtaccatagggaaatcattgagcaggaggaaagcaggagtacctgttggaattttaaatcaagtggatggggaaggcctcactgacttaacagcagagactaaaggaggtgggggagtaagctatggatatgtctggaggaagagcaatccaggaaaaattgcagcccgtgcaaaggtcctgaggcaggagggtgcttgctatgtatgagtaatgacaagcagatcactgtggttggaacagagtgagggggggagagtggtaaaaggtaacatcagagaggtaacaggggacagatcctatagggcctcgtgggccatggtgaggctgttggcattttcaccgagatgagagcttggagaaaaccatgagagggttgtgaggagaagaggactgtgctgggcttgggctactatgagctgtgtgagggccaagggcagaagcaggggctccggggtggagtagtccaggcaagtgataatgggtgagggcagtggtggagaggagaagatcaagtcagatcttttgaaagtagatgtgttaatggcttcgatgtgggtgtgaggagaggatgcggggggagcatcagaggtgactaaggttttggatttgaacaattagaaagctcagatgagatggggaggatggtgggaggagcaggtttggggaggtaggtcaggagtttggttgtggatgtattggagatgtagaatctgatttgtgaatctggagttcagaggaacagtctgggctggaggtggaaatgataatgatgcttgtgtgtgaggttgttttagaattgaaatgagttcctaagggttaggagctcagaatatgcatccagttggcagacagtaatttgcatctggaaccttagcagtaagacagcctggaaaatgtatttagtgtctgatctgtgtggtacaagaagatgcacagagccagatgggacccccctaacgctgttcctcttgccacagtaaccggtctccatgatgttgatgagtatatgcaggcccagctcctcctagctgtgagtaaccctggccacccctgacccactttggccccctcctggctgtctccacctcagcctcagccgtctgtcctgcccacaggctctgaacattgctacacatgtcctgaagccagggggctgctttgtggccaaggtaagtctcaaggaacttggtggagtagagggaggtcgctgagggccaccctcacccgctgtctttgccttctcaccctgcagatattccgaggccgggatgtgacgctcctctacagccagctgcaggtcttcttctccagcgtgctgtgtgccaagcccaggagcagccggaactctagcatcggtcagtggggtggaggggccaggcaggcagagggggatctctgggacgccgactgcacgaggaggaagcggcagtcatgcctcactccaccttcccctggcagaggccttcgctgtctgtcagggctatgaccctcccgagggcttcatcccggacctgagcaaacccctgctggaccattcttacggtgagagctggagcatgggccaccctgggggactctgccacaccttatgcaatctaggtcccatgagggcccacagtctcaccccctgggggaggctctgtcccctcatgggaatttttttcccaaggggatccttagccccattctctgatggaaatcccacccctttatgggtattttgtcccgggaggagcttcagcccaggcagtcctctagtggtaactcttgggcctggtgaaaattccatcccaggaggatcctgagccctgccccagtggagactccacctgcctaaggacattctctcctaggaagatctcagtcatgtcccaggtggaaacctcctcggtgtgaaacttttgccccttaagcctctagcaggaagagacagagcctgcccctgggatgacatttgagtgagggagacgtcatccaggcagcatataatccaatatcaggtggacataaatgcagtgaaaaatagcagggcaccgatgttttagaaggggtgattatggagggcctccccgaggaggtgatctgaaccaaatgaaggatttctggtggggtgggaagagagtagctggtggatatgtggggagggtttggcagccataccgccgcctgtgtcatgactggccccaggcatcctgaccttgtcctcagttgtctccccctgttcctaagacccagatttcaaccagctggatggtcccacccgcatcattgtgccttttgtgacctgtggggacctgagctcctatgattcggaccgcagttacccactggacgtgagtgcccaaccaacagtaggtgggtgggagggaggctgtcctaggttaccaggtcctcaccatctccctacccctctgtccctgcagctagagggcggctcagagtacaagtacactccacccacacagccccccatctcgccaccataccaggaggcctgcacgttgaagaggaaggggcagctggccaaggagatccgcccccaggactgccccatcagcagagtggacacgtttccccagcccctggccgcccctcagtgccacaccctgctggcccctgaggtctggaaatgtgactctcagcctgccttgaccccttccccgtgtgcctttttctgacccaaatctcatggtttctggggccaaaattccctttcctgcctcccaatagctataaaaaattggtaaagccaagcataatgaatggaaaagtttcgccaaatatgtgagtcacttttctttttcttgggtagatggaagacaatgaaatgagttgttcaccttaacccattacggtaagtttgccttgttatctaagagtttgagtaagggcaacctttatgaaaaacctcagtaaaatttcacctttgaaatttttatgtcaactgataagattttaatcaacaaacccttttctaaacatctgttgttgtatgccaggaactgctttaagcattttacatttgaggcattcagtaaacatttattgagcacatactgtatgtcaggtgttgttctaggtttggagatagagcagggagcaaaacagaaatatcttggctctcacagtacttccagtttggaaaagaggcaacaatcaaaacagtctgtaagtgcaagagtttacatacacatatatactatatagcttgcatttctcaatttacatatcttgcaatatatataatatataagagtaatatgggatataaaaaatagaaaaaagtaaagcagggtgaagagaatcaggaattctaggcatggcagttttcatcttttggtgtttttgttttgagacaaggtctcactctgtcgcccaggctggagttcagtggtgtgatttcccgggctcaaaaaatcctcccacctcagcctctcaagtagctgggactacaggcatgtaccaccatgcctagcaaatttttgtatttttaggggagatggagttttgccatgttgcccaggctggtctcgatctactgggctcgagcgatctgccatcctcggcctcccaaagtaccaggattacaggcatgagccactgcgcccagccagtttgcactttttaaaagggttgtcatagaaggcctcagacattcctcagaggtaatgtttgagcaaagacctgaaggcactgccggagggaagccatgtgtttatctgagggaagagcattctgggtaaaggaaataggcatgtcccaaaggtggaactgcacgtggtatgggaggaaagtttatccatagccaaatgttctaaaaccacgatgttagaggatggccctttctgacaatggcatagcaggttattcagactaagtcagccatcacaaaaagccacctttttttttttcttgagacagagtcttactctgttacccaggctggagtgcagtggcatgatctcagctcacggcaacctccatctaccaagttcaagcgattctcctgcctcagcctcccaaatagctgggattacagtgcccgccactatgcatggctaatttttgtatttttagtagagatggggttttgccatgttgaccagactggtctcaaactcgtgacctcaggtgatccacctgcctcggcctcccaaagtgttgggattacaggtgtgagccaccacacctggccttttttgttttgttttttgttttgttttgagaacagagtctcgctctgtcgcccaggctgggtggagtgcagtggcactatctcagctcactccaacctccgcctcccgggttcaagagattctcctgcctcagcctcctgagtagctgggattacagacgtgtgctcccacctcacccggctaatttttgtatttttagtagagacggggtttcaccatgttggccaggctggtctcaaactcctgacctcacaaaatctgcctgcctcaggcctcccaaagtgctgggattacaggcctgagccaccacacctggccacaagaagccaccttaagaaaaaattgaaacagcaaatcattgtgtgaaagagatttacagtttttaatatttaaagggtcctgtaaatcaataaggaaaaacatgagagtggccagtaagcacatgaaaagctgctcatcaggaaaatacaagtgaaaactcaaaatatcaacaacactaagtatttgaaaggatatgcagcaattgaaagcctcgtacatgctactgggaaggtaaaatggtgcagccactgtggaaacttaggcattacctactaaagctgcatgtgtgccagttccactcctaagaaatgagtcctagaggccgggtgccgtggctcaacgcctgtaatcccagcactttgggaggccgaggtgggtggatcacctgaggtcaggagttcaagaccagcctgaccaacatggcaaaaccccatctctactaaaaatacaaaaattaaccgggcatggtggcgggcacctgtaatcccagctactcaggaggctgaggcaggagaatcacttgaacctgggaggtggaggttgcagtgagctgagatcgtgccactgcactccagcctgggtgacagagtcagactccatctcaaaaaaaaggaaatgagtcctagagtgttgctagcagcactatctatagtatatgcccattaaatcgtggtacattcaccgtggagaactgtacaacaatgacagtgaacatcctgcaattacaccaaataacaccttgtagttattcattaaactgaacatatataggttttatgcattttctatatgtcatggttcaccataaaaggaggaaatgtcacaaaaatgttagcagcagagttagctaggtgtggtggcacattcctgcctgtaatcccagctacttgggaggctgaggtgggaggatcacttgagcttgggaggttaaggttgtcgtgagctatgatggagctccactgcactccagcctgggtgacagagcaagaccctgtctctaaaaaaacaaaacaaaacaaaaaaactttctttgacttttggttagctggcaaactgatacaactcagaaactgctcaatgtcaggaaaaccggaacttgttgatgaacttgttttcaaaatatcatctcatcaacgaggcctggacaaacaagccctgaggagggatctgcaacaaccctgaagacaacaaggaaagaaaccatgaaagtctgtctgtactgcagtgggaattcttgagtgaggtcttacctcttctttaaacctcttcaggagtgtcctgattatgtccagaattttccctaaaggcagggattcttaacctggatagaagccaggggtaaccatgaacttgatggaagaaaatgttacatctttattttcagcaatgaaactgaaatttagccttactcccaagttataaatgctggcaacaaatcacagtagtaaaagcagtacctgggattttcccaccaatacaaaccagttacagcaactgtaatgtaacataaaaagggcatcttgaagtattgttcatatttgtcacctcttggaatgatagcagatcctgtaagttgatgtattaattaaaaagcccatatattactgcatctcaattttgtttcaatttaatatatagtaataattgtaattcaatgtaattggcttccattgtaattgtgtgtgtgtgtatgtgtatgtatatacttttaaaaatattctgtgaaggggttcacagatttaaccagatgccaaagggttctgcagaacaaatttatttatttattttgagacagaatttcgctctgtcacccaggctggagtgcagtggtgtgatcttggctcactgcaacctctgcctcctgggttcaagcgattctcctgcctcagcctcccgagtaactgggattacaggcacccgccaccacacccggctaattttcgtatttttagtagagacggggtttcaccattttgtccaggctggtctcgaactcctgacctcaggtgatccacccacctcggcctcccaaagtgctgggattacatgcgtgaaccaccgcacccagacttcagaacaaattttttaggttaaaaacctgtcttaaagaaacgtcagggccaggcgtggtggctcacgcctgtaatcccagcactttgggaggctgaggcaagcggatcacttgaggtcaggagtttgagaccagtctggccaacatagtgaaacccgtctctaccaaaaatacaaaaattagctgggtgcggtggcacatgcctgtaatcccagctactcaggagactgaggcaggagaatcacctgaacccgggagatgaaggttacagtgagccgaggtcgcgccactgcactccagcctggacgacagagtgagactctgtctcaaaaaaaaaaagcaatgtcagaaagtctacctggactgcagtcctaaatttctataacttaatgaacaggagctgacagaaactccccagctacacgaacagaactgttttctacagcttaatcctgtgtccttagaaattcacgtactctgtgatccaaggactatccacgccacagtccagtgacctcaggagtatccacataccagtctgcgaccccagctgtttccacacctgactgtgactcaccccagttaccatgtgtgaccccaggagtatgcacactcaagtctgggaaaaccattgtccaatctccagtcagaaatggtgtttaaattctggagcgtgtgttcataggcatgtctacactccggtctctgaccacgaaaataaccacaccccagtctgtgtgactccaggaatgtccagaccccagtttgtgtcagtctaggagtgtccacaccatggtgacttaacccaggagtcttctcaccgaagtcagtgtgaccacaggaatgcccacaccccaatctgtgaatatgcacagcccaagaatgtatggcggaagtgtccacacaaaaggccgtgtgaccacaggcgtagccacacccattacagtgcaaattcagcagcgttcacacgacagcctgtgagacctcaggagtgtcctcacgccaggttctgtgagtccagcagtggcaatggcttggagtttccatagccatcttagtggtgccataaatgtgtagctcaaacggtgaccacagaggagtccacagctcagtctgtggtgtcctgggagtggttttgccccagtccagccacctcaggagtgtccccacccaagtttttatgacacaagtaatgtccagttcccagcatatgtgaccctggtgttgtccaaaccccatagtctctggctattagtgtgtctatacccatcttgacggcctcaggcaggtgcactcccccatctgtacgaccagaagactatcgactcccctgtcattgtgaccacaggagtgtaaaactccagtgccagtgactactggtgggtccacattccagtctgggtgacccaggggagggcacagccctgtctgtgtgaccataggagtcttcacaccccagtgtctgtaaacacacaggagtcaattccccagtcagtgtgaccagaggaatgttcacaccaaattgtgtgaccacaggagtgtccacacctatctgcatgtcctgagaggtgtctatactccagtgggtatgacaccaacagtgtccacaacaaagtctgtgtgactccaggagtgtccctccccccagtcagtgggagtctagaaggatctacaccaagtcttgggagcccaagggtgtcccttcgccaatctttgtcactcaggggacattcaccccccagtcacacagacgaagcatatccacagctgggtctgtgtgaccccagcagagtctacttcacaagtcgtgtaaccacaggagtgtccccagacgaacctatgggaatccaggagtgtccacatcacagtcacttgaccacagtggtgctgacttcccagtttatgtatccttagccatgtcctttttccagactgtgtgaccctaagtgtccacaccccaaactcggtgatccaagtcactccagtctgcgtgactccagtgttgcccacacaccaatctgtatgaccctaagagaacacatcccggtctgtgatgcttcagcagtggccacaccctactctgtgtgaccccagaagtggctacaccacaatcagcatgacctcaggatttcttactccaaaatctagtaacatcatgagtgtctacaccctcacctgtgtgattccaagaggatccacaccccaggctgtgtgaccctgggaaggtccctatagcagtcagtgtaaacctgggagtgcactcttccctgtcagtgtgagctgggagggtgtatctagaggaagagtgatccagggaaaggcgaagggccggatgtggtggctcacacctgtaatcccaacactttgggaggccaaggtgggtggatcacctgaggtcaggggtttgagaccagcctgggcaacatggtgaaaccccgtctctactaaaaatacaaaaattagccaggcgtggtggcacatacctgtaatcccagctacttgggaggctgaggcaggagaatcacttgaacctgggaggcggaggttgcagtgagctgaggttgtgccactgcactccagcctgggtgataggccaagactctgtctcaaaaaaaagaaagaaaggcaagggccctgaggcaatggccctgaggtgcctggcacatttgaagaacaggccagtggggcaggagcagagtgaacaaggagccagtggcgggcggtgaggtcaaggagggcccggagggcctcgtgggccacggagaggactttggctttttctctgagagagatgagagccatggcagggctccgagcagaggagggccccgggctgacttgggttgcaacaggatccctctggctgctgtggtggcggctactcaactgttattgtttgtcaaaactcagagaactgtatgccaaaagggtgaactttatcgtatgtaaattataactctttacatttaagttataacttttggaaaatgtgcagtactggccaggcatggtggctcatgcctgtaatcccagcactttgggaggctgaggtgggaggatcgttttagcctgggagattgaggcggcagtgagctgagatcatgctgctgccctccagcctggacaacagagcaagaccctgttttgaagaaaaaacaaaaaacaaaacaaaacaaaaaaagtgcagtactttgcaagcaataaagatttctatttctgcaagagaggctgtgctcatgcctgtccttacccctctccttcctgcacaaacacatctcaggaatgcacctgaggaaaaggagggagccggggcctccctcaactgctcaaggtagtgctccctttgttgtctgctgtgaactgaattgtgaattcagcaaattcctttgttgaagctttaatcctcaatgtgactgtatttggagatgggggtaattaagattaaatgaggccataagggcagggtcctaatctgatagaaccggtgtcctcattagagagggaagagatgcctgagctccctccctctctccctgtgggcgcacaaaggaaaagccacatgaggacagagaaagaaggtggctgtctacgagccagaaagagaagcctcaccagaaaccaaccctaccggcaccttgatcttgaacttccagcctccagaactgtgagaaaataaacgtctgtggtttaagccacccagtctgaggtattttgttaaggcagtctgagcagctaattggctctcagtttcaaggctgatttcaagagactcgtgttggccaggtatgaggggagccagtgctcaagtgaaggaaggaaaattcagcacatcctcctcgtctagctgaagggggctctggagcagcaggaggggcccagggcaagcctggaatgaaatccgtggcactcctgcaggttctgggggcggtgtccatggaatatcctctgccacataacaaaatgactaataattgcttggggagctttcagaactgccccaaggcttcctctaacactccacccacacctggttcatgccaggttgctcgatgccttggttcgggagaataggtgtggtgtcatctcaggcttggtggcagcccaagggaaggggcaagtgttctgagtctctctagatgacacaggagctgaggaaagctggagtgaattatgagtcacagcccgtacctcacaagaaagttctgcccgatgccagagctgggagccatcaccagttatgcagggttggtggagaagagcctcgggataattggtatgcatgcccgcacataggtgtgtgcgtaccagtacgtgtgaagttatgcaggagtgcgtggtgtgcttatgcccatgtgtgtgcacattagtccttttgtgcatgcatgcatacatggcacatgtgtgtgcattcatgctttgctgttttgaatgcaggtatggttataagtgcatatgggcaacagaagttcaagtgtgaattctcatggagatgctagggtgtagcaggcacatggggacctgttccctgacaggggtgtttgtgaaaagcaactgtgcatatgtgtgagggtgtacttatatatgagattctatgtgcaaagccctatgtccgtgggtgctagcctgagtgtttgtgtctgtgtatatacatgtgtatgccagcgtgcacatgcatggctgtgtgtgagtgcgtaagtgaaggggagcacattggcccaagctggtaagtctagtatctatgcatgtatacccctgggcaccgccccccccgccccgtgcaagtgtgagtgaacaggtacacaagggcctgggcgtagatgtctgtgcacatgtacgtgggcatgctgtatgcatggctgcagggatttcccacgtgtgtgtgtgcacagatgcacaagtgcccaggaacctagattgtggtgtctgtacacatgtacctctgggcaccatgcatgtgtgtgtgcaaaagtgcaagtgtgcctatgggctcaggtctggctgtctgtgtacatataccccctggatgcccataaaggtgtgagtgtgtactgcaggtgcatatttgtccgtgggcctcagtctgggtatttgtgaacatataacctgtgtgaacgtgcatgggtgtgtggatgtgatcaggtgtgcccatggacccaggcctcggtgtctgtgtacaggtacctcagggtgcccgtgtgtgtgtgtgtgtgtgtgtgtgtgtgcgcgtgtgtgtgtgcatgtgcatgtgtgtatgtgtgcatgtgtaactctggaggtccatgcatgtgtgtgcgcatggcttcaagtgtgtccaaggacctgggtctgggcatgtgtgtacatgtatccctaggaacccatgcatgagtatgctcacgtgttcagcggtgccaatggccttggatcttggtgtctgtgtatgtgtacccttgggggaccacagatggcattcatgcatgcatatgtagcaccatggagggatctgtgtgcagatttacctctacctacacctggctggggatcataaagaaaatcaagggatgcgctacctccatgaatccaggtttcagcagagctaagggagtgaaatttggggccattttacttgtctcaaaccttgttatctgagagaaagctagagcttccttctttcagcccccagagacaatgtggccaggctccggagggctgggaagatgagcaatgcttgtgagtcaccatgataggaagcagaagggtcaggaagtccctgggagcaaggcttagggttagggttagggagaaaacacttgggcctggaggctcggggcaggcttcctagaggggaggggtaggaagaggcagtgacagggcccacagcaatggagaggagttggactgcagggatggggtagggggacagacgacaagggacactcagaagactaatgtctgggagtgggaaaacagtgtttgctcagccaggaagctgcatccagctcttttatcatttgtagaagaccaagtacccaggcctgggaggagcccagagatgaaccagagtttggagctgggggcgggggtagttctctctgtccctgtaacaggcagtttaggcttaaagagctgtccaggctgggcgcagtggctcacgcctgtaatcccagcactttgggaggccgaggcaggcggatcacctgaggttgggagttcaagaccagcctgaccaacatggagagacccccgtccctactaaaaatacaaaattaggcaggcgcagtggcacatgtctgtaatcccagctacttgggaggctgaggcagaagaattgcttgaacccgggaggaggagactgcattgagccgagatcacgctattacactccagcctgggcaacaagagtgaaactctgtctcaaaaaaaaaaagaaagaactgtccaggattccacgggcccctggggcccagggtaagctgcctcccctttctgggcctcggtcttctccattgtcacatggcctgcctgtctgcagcccaggccccgggaagcatttagcctgagagaggagcccatggacagtgggcaggcagctggctgctccccaagattgggccaccctcctgctcctctgccacttcagagtctttacaccctgccccagaggcaaagcttggaaatgggctgggggagccatggccacaggccagtcagcatgggggaagcctggtggggttgaaaccctgggctaggagggggcacgtccatcacgaaccctggtcccccaccaacccacccgaccatagcaggggaggcacaggaacccacaaccttcctcctgaccccagctggagaaggatgttgctgctcctgaattccaagctggcccagatgtagagtggtcccccaagggtatacttgcacagacaccaagatccaagcccattggcacagctgaaaacatgagcattcccatgcatgggcccctaggggtacatggacacaaatctccccttccagtcatggcaccccagtcctgatcagcttcaccccaaaaagctcccaggtgcggagtcaagaccttcttgtgcccccacttcaaccccaagccaatggcttctttttttttttttttttccagagactggggtggaggggtttcactctgtcacccaggctggaatgcagtggcacaatcatagctcactgcagccttgatctcacaactgatcctccgtcctcagctactggtgcgagctaccacgcctggctctgagccaatggctttcttttagatcctccagaaggtcaacaatactgactgcagaacgccaggcagccacaggccactgggcacagttgtgcaggctgtgctctaacaaaagttgcctggccacagaggacactgggagcaggaatgcaccctgggctcctctagcatcactggggcctggcctggggccgcgtccatcaggaggaaggggcatccttttctaaagttcacgcaggcattatgtgagctagtggcgcccctcagtgtccaggtttttaaaggcaaaggaaatctggacatgcgcagaaagtgaacatggccccagagccaggcataccttcacccgggatgtctctgagctggaaaaaaatactcagccattgtctagcgcagccctatgcttatcaggaaaaattgtaaaaaacttttaaatggacaaaactattccccaggtgtcctttcaatggaacactggatgtggtctacccaagccccttatggcgtatctgattctatagcgggctgcacttttgtctttggctgggccattttgcacctctgtagagagaagttaacctgtgcaggactgataattcccatccataataaatgaattttgtcctgtagagatacagctgatctctatcctgtagaaaaagattattccagatattatattgcatctattggcaaatccattgcagtatctctgggagtttatatatgcttgttcttcagattctcctctgagcctagtgtaacatattaccagttccctcattcataaatgatctgggccaggcatggtggctcatgcttgtaatctcaacactttgggaggccgaggcgggtggatcacttcagcccaggagttcaagagcagcctgggccacaaggcaaaaccctgtctctacaaaaagtacaaaaattagctgggagtggtggtgagcgtgtgtagtcccagctactcaggaggctgaggtgggaggatcatctgatgccagggaggtcaaggtctgcagtaagctgtgattgcaccactgcactccagcctgggcgacagagtgagactctgtctcaaaaataaataaataaatgatctaaaaatccttgacacatgttcactttatatttgtaggagtcgtgatgttaccattttggaaataattttttaattgcatctaccagctcacagtacagatgagatcaccaagctgggggagaagggacttgcttgaagtgaccctcatggactgggactggaaggcagagctgaactcaagctactctgggtgctgccctgctcctggaaggagggggatatgctgtgcccaggtgtggaatggaatggagggctgtgacacacctccaccatggggatatggagtgaccttctgagatgagggggtcatctgtcaggtcccaccctctgtgctgtgccttgattcagacccacgacacaaccagccgtccaccccaccccaggtggtcctggccaggggaagtgctgaaatgcccccattgccatcctgaactgctatgctggtgatgaccataggaaagctttattctaggtatactatttcaactgctgggccccagcttccttatctataaaatgtagttagttccggttcctgccttatatgatgtggagaagattaaatgagattatggacacgaagctcttcaaattgcccggcacagagtaaacgctcaatatttatcagctgttagtcattaggtctgtttgacttgcagaacttccagtggtggacatttttgaagggatgcttggggccccctcgagatgctggcctagcaggacccagctgctccatccttggatgaaacacccaacaagtgttccccgggtgatggatcaggaaactcagactcctggccagggaaaacaggcctgacctgctctctggaacccccatgttgccatccaggagatcctgaagcccaaggcacaaatgaggaggagcacaaggagtggtgagttcttgacaggaaatggtggggtgccctaggagaaatcacctcttagggtctcggtttccccatctgtacaatgggcacttcggagctgtgagttgctgaggacctttgcagccgccttttggggaagaacaaatgttctccaagggtgtaacggctggaggctgaccctttcccagcccaggccctgccattagagacaaagtacaccagacacaaagggaaaacccagtccccgccacacaaaggcaaaacccagtccccgccacagcataggaagctgcccagcaagttgagagtcaagttgcccaagttttgtggccagtgaaggggaggtttgcagccagaccactcctgaggcctacctggggaacttgtgggggttgggttggggggatggactcagtggcctctggggtcccttccagtccagactctcctctgtggctggcatgctctgacctcagaggtccaatctgcaaaatgggacgataaccccatgtgggctgagagggcaggaaggtggatgtattcttcagggttctgtgagttgtaagtggcagacactccagtcaaaccagcttaaggtaaaagggaataattactcaggtaatggaagagacctgggacagagtgagctttggccatgcacagcgtgtctgaggactctctctctctgtccaggaggtctgatttatctttgagagcttggccctcggcaggctctcccaggtggtggctgcctcgcctatccctaaacagcaaggagtcccagaggacagcaaagcctctttcccttcagttccagctttagatcatgtggcctggcttgagtcacacccattcctgaccctgtggtcacaatgacagattgctctgattggctggtctagtcatgagtccactcctgaagatataggtgggagcagggaggtgggggagttagccccacaagaacaacatgcactggagtgaggtgaggaggaagggggttgctaaaagaaaatggaggtccagccgggtgtgttggttcacacctgtaatcccagcactctgggagtctgaggcgggcggatcacaaggtcaggagtttaagaccagcctggccaacatggtgaaaccccatctctactaaaaatacaaaattagccaggcgtggtggcacgcgcctgtaatcccagctacatgggagactgaggcagaagaattgcttgaacccgggaggcagaggttgcggtgagccaagatcatgccactgcactccagcctgggtgacagagcgagactgcatctcaaaaagaaaaaaaaaagaaaaaaaagaaaatggaggtcagacatgatggttcacatgtgtaatccgagaacactgggaggctgacttgaggccaggagttcaaaaccagcctagacaacatagtgaaaccccgtctctacaaaaaatacaaaaattagcttggtgtggtggtgcatgcctgtagtcccagctacttgggaggctgatctcttgagccctggagtgagaggctgcacctctcactccactgcactccagcctgggtgacagaatgagaccctgtctcaaaaaaaaaagaaaagaaaagaaagaaagaaagaaggtggtctttcatagaagaggaaagaggtgctgagttggtaaaaggaatgcctgcccaatacagtaggccaccgctgaatccttaagtaaaaccactggcagccttagtccctctctgcctaccactttcaggtgctcagctttatgctgtaaagttaccccatcactcctaaactcggaaattctgcctcccatgacagattaaaaggcaatttatactaaaatgtcaatgactaccagattctgaagaaggcaaagcctcactggatgtgacttaatcttctagtgagatttagggccgtgtggcaaaaggatggggagatgtcagggagtgtgccaagtactcaatggaccaggcagctcaaaggcagccccgggaggagagagcaacctccttcccatgttctgtctccattcagagcagatggccctcccaggcgcatctgagctcccggctcttctgctcccctcctctgagggacctgtctgtctagctatcagcctgtcagttcagctctgctgcaaagctgttgtgtaggtgtatattcatcgagtgtctgttcctaacactgatttcttggcagagagaagtcagttcatccaaccattaaggatgagttctgtgtgagagggtcagagaagaggattgggaagcagatggagcaggttagaacattagaattgttatcaacccgctctttcttgtagatacccacagttcatctactcaaccactcacttagccttgcgcccattcatccacccatgattcacccacttacccactattcattcatctgtttatctagccacccatccgcacacccacataactggtcactgctgtggctccagctttgtgccatgcattgggagcacagagatgagtcatatcccctcctgctctttcagccctcccagtctaactggagagacatccacaggcaaatctcgctgcatgattctgtgatcaatgctgtggttaccccagggagcatttgattatgaccctgacattttagccgagtgctgacagatctcttggtgttgccaggagagaggaggaggaaggacattcctagaagtgggaacagcgtagataaaccctgggaggtgtaagagagaatgagtgtggttaaagcgcagggtggatgaagggctgaggcagaagttggcacttgggctgggtgcagtggctcatgcctgtaatcccagcactttgggaggctggggcgggcagatcacctgaggccaggagttcgagaccagcctggccaacatggtgcaaccccatctctactaaaaatacaaaaattagccgggtatggtggtgggcacctgtaatcctagctactccaaaggctgaggcaggagaatcgcttgaacccgggaggcggaggttgcagtgagcaccaagatcacgctgctgtactccagcctaggcgacaaagtgagactgtctcaaaaataataataaaataaaagaagttggcatttggaagctgagcaggggctttaattcctagtcctggggtgccagggatggcttttgagcaaaagagccagcacccagagtgtggccagaggcctggggaagctggcctggggtagccagcccgcttttgctccaggccccaaagagacacatgtgccaacccccagcctgcaattcaaagaaagaaaaagacttcaggaagaacgccatttacagaaactgtccctgagatggatggacagatggacagtgggatgctgagatgtctggtgggtgtacagatccaagcataaactctggtccacaccacacgctttggggacacataccagggaaacaatgtggtcaggggaatcaggcatgtgcaccccaatttacctggctctgcagggcttggagggcttgcaggatgcatggccacgttgctgagggaagagggccagaaggtcaaagccacttccagttgggactctaagaatttcctcaagggggccgggtgcggtggctcatacctgtaatcccaacattttgggaggccaaggcaggtggattacttgaggtcaggagttcaagaccagcttggtcaacatggtgaaaccccgtctctacaaaaatacaaaaattcatcttgcgtggtggcgggtgcctttaatcccagctgcttgggaggctgaggcaagagaattgcttgaacctgggaggcaaaggttgcagtcagccaagattgtgtgccactgcactccagcctgggtgacagagcaagactctgtcttcaaaaaaaaaaaaagaatttcctcaagagcagcagcttctgaattttcctgagtgtagctgaatctttatgctaagaaaccatcccaagacctctgccaggagcactgggtgctgttagctctgtcgaatgatgttgtccttcacaaggagtaagagccaggaggacaattgaggatgtgtcctaagaatgacaccccgtgcaggggatggggctcagtagtgaaccaatccctctgcccagggctgccagccttccaggtgtcagacttggtcaggaaaagtcctcagccttgatagcttggtgtgagagtagtgcagtcagatctcagggtgccagaggaaactgggtcagcagatgatatgccaggaggccctagggtgccaggagctgtggagagacctcagctggctctagaaggaagaagggcagcagtttgcaggtagggtggggtagaaaaccaagggcggccgggtgcggtggctcatgcctgtaatcccagcactttgggaggctgaggcaggtgaatcacctgaggtcaggagttcgaaaccagcctgaccaacatggagaaaccccatctctactaaaaatacaaaattagctgggcgtggtggcacatgcctgtaatcccagctacttgggaggctgaggcaggagaatcgcttgaacctggaaggcagaggttgcagtaagccgagatcgtgccattacactccatcctgggcaacaagagtgaaactccgtctcaaaaaaagaaagagagagagagagagagaaccaaggacaacagggctgcagggtgaggaggacctccccaaaacccaaaagtcctatggcggccccatttcaagcactctccaggcagggagaggccagcacccagcccttcgtcacccctgctattcattggttgatggagtcctgtagtcaacgcttgccagacatcgtctagatgctgagcctagtgcaggcactggaggccacagacagcagagatgcagcactgcctagtggggagacagacacttttgtgtgataaggtttatgaagatagggtctgcccagggtgtgggaatcccagaagcaagaggtaggaagggtctccccgacctgggaagtgatatcaaactggatctttttttgctttattttagagacagggtctttctctgtcactcatgttggagtgcagtggcacaatcacagctcactgcagcttggaactcctaggctcaaggaatcctcccgctagagcctcctgagtagctgggactacaggtgcatgccaccatgcctggttaattttttctttttttctgagatagtctcactctgttgtccaggctggagtgcagtggtgcaatctcagctcactgcaacttccgcctcccaggtgcaagtgattctcatgcctcagcctcccgagtagctgggattacaggcacgtgccaccacacctggctaattttttttaatttttggtagagatggggtttcaccatcttggccatcttgaattcctgatctcaagtgatctgcccgccttggcctcccaaagtgctgggattacaggcatgagccactgtgcccagccaatttttaaaaaaattttttgtagaaatgtcgtctcactgtgtggcccaagctggtctcaaactgctggcctcaagcaatccccccaccttggcctcccaaagcgctgggattacaggcatgagccacctggcctggccggaactccatactgttttccacagctgttgcaccattttacatccccactgacagtaatttcccctatccttgttgattttatttatttttgaggtatttgaaacaagatggtttcaaaagtcagaactaggccaaaaagtctactcagagaggtgtcactgtcacttctccgttctatccctctcacccattccctctaggaaaccaatctcaatagtttctgctttatccttccaatgtttctttttgtaaagataaacaaatacatgtatgttttcttatatcatcttgtttcttacatgaatgcttgcatcctatatttacttttttgcactttgctttttccacttaacagcatgtcctggccgggtgcagtggctcatgcctgtaatcccagcactttgggaggccgagctgggtggatcacctgaagtcaggagttcaagaccagcctggccaacatggtgaaaccccgtctctactaaaaacacaaaaattagctggacgtggtggcaggcgcctgtaatcccagctactcaggaggccgaggcaggaggatcacctgaggtcaggagttcaagaagagcctggccaacatggagaaaccccatctctaccaaaaatacaaaaattagcccggtgtggaggtgtgcacctatagccccagctatttgggaggctgagccaggagaatcacttgaacccgggcagccgaggttgcagtgagctgagatcatgccagtgcacccagcctgggcaacagagcaagactctgtttcaaaaaacaaacaaacaaaaaacagtatgtcctggaaatcgttcctcatcagttcatagatgtcttcctcaatcattttacagttgcacagaactccattgtgtgactgcaccacagtttattcaatcactgcctatgtataggaagtgatattgttttcaatattttgcaattataaaccgtgccacaatgaataaccttgtgcatttgtattttcacagtgtctgggggagtatcttcagggtaaattgctggaagtgggagcgctggtgcaaaagaaaaatatgcatttttgttagatgtcaaattccccttcatcggggttataaaaacgactttttaaaaagcacaaataagaaaagctgatctttgcaaaagaaaccaaacagtctttcttactgacatctaatagtctgcgttggttttaagactgaggcatttaatttcacaaagactgttttttacagagtgatttaatttcaccattgtcacaggctctgctggtgcctacgccacacacacacacacacacacacacacacacacacacacacacacgacctcacatcgccataggagctgcttatcccatctgagcctcagttgtagcctctgtaaaatgggcggcacctgtctggctacaagtggttttagagactaagcatttggttctctgtgagattccagatttcccagaaaatctgatgaaagctgagagctcgctccctaggaacatgctgagaaagagacaagcagcccctgacatcccagagctggcttgatacccacggctagaccttagtgccctcctgttgaacacggacaatttcacaaaacatcagtatcagacaaggccactctgactgtgatggatcgagacaaaaacaagatcagtatgtcatcttgtcttagcacagacacatgaatacattgtccaaaccacaaaaatgaccaagtattccccgacttggctatacaatgcacttttttttttttttttggccaatgacaactttagcctccactctagttagtctgccctccttctagataaaatttattgtgatatccaatcatagaattagccccactccctatccagagcaaagccctgcttccttaaaccatcccccaaatcactgaacacaagccccaatcctattataagttctaactcccttttactgagacaccccacggttccccacagtgtacaccctcccttgttgcaatgagcaataaacccaacttgttcaaccacacatgtgttcctggggggttttggctagaggactttgacagcacttacagagttggctgtaagctcaaggactctttggaaccccatctctgcatgcccctagtccacagactcctaattaagtggccttgagtctagagcatcagtaataccattaaacagatggagaaaccgaggtctagagagattgacttcttcaaagtcccattgtgagccaacagctgggtaggaactggaaactgtggctgctggtcccaaggtgaggtatgtccagcagacatagaacccgtccccaagctccccttggccacaacagtgttctccctgcacaggccacagaactaaccggcaagatacgcacatgcgcatttctgaaggatggcttcattctctccctgtcctgcctttctctctgtagaatggggcagtgagatcccaggttgagggataaaggaacccccacaccggggctaccctcaaggacgctcacacactgtggtctcagcttaaaggagcctcatcttccctgtccagctgctgcgtcccagagtgtgcaccctcacagaccctgtcaccagtagcacctcattcccatctctcaatttccctctgcatttgcccaggtcaggcgagctacctagaacccccctcccttcctttcttgaccttgagttctcataatttttcttcgagatctagcgtggggccaggcatggtggctcacacttgtaatcccagcactttgtgatgtggcaggatggcttgaggccaggagttcaggaacaggctgggcaacatggcaagactccatctctagaaaagaatttttttttttttttgagacggagtattgcagtctagctctgtcacccaggctggagtgcagtggtgatctcagctcactgcaacctttgcttcccagattcatgcgattctcctgcctccgcctcctgagtagctgggattacaaggcgcccaccaccacacctggctaatttttttgtatttttagtagagatggggtttcaccatgttggccaggctggtctcaaactcctgacctcaggtgatccacccatctcagcctcccaaagtgctgggattacaggcgtgagccaccgcgcctggcccagaaaagaatttttaaaagtcccagctactcaggaggccgaggcaggaggatcacttgagcccaggagttgtaggctgcagtgagttatgattgagccactgccctccagcctgggcaacacagtgagaccctaacaatcaatcagtcaatcaacaaaataagaatctggccaggcacggtggctcatgcctgtaatcccagcactttgggaggctgaggcgggtggatcacctaaggtcaggagttcgagaccagcctggccaacgtggcaaaacccgtctctactaaaaatacaaaaattagccaggtgtggtggcgggtgcctgtaatcccagctactcgggaggctgaggcaggagaatccattgaacccaggaggtggaggttgcagtgagtggagatcacaccactgcgctccagcctaggtgacagaacgagactccgtttcaataaataaataaataaatataaaaaataaaataaaataagaatcttatgagtcccagagagagagagagagagagacaaagctcttcctcacagtaaaatcccaggtatatgtgtaaaagaaaaatcattatttggccaccatcagagtagttattgcttcaggcaagaatcaccaatgaatgctaaagtagtgagtaaaagtttgatttaaaaaaaattgcagagttacagtctcaaagtatctcccgaaaagctacttattaattacaaaaggggatcatgcctgtaatcccagcactttgggaggccaatgcaggaggattgcttaagcccaggaatccgagaccagcctgggcaacatagtgagactgtttctacaaaaaatttaaaaattagccgggcatggtgactcacacctgtagtccttgaagattacatgagcccaggagttcaaagatgcagtgaaccatgattgtgtcaatgccctcaagcttgcgtaatagggcaagaccctgtctccaaaaaaaaagaaaaaaaattacaaagggaaaaatagtaaatttatactggtgaaaactagaagaccactttaagcaaaagatcaatgctaatactaacaatttcgagactaactgaaccctcctgcctcctgataacgctgagaacacagcgtcacttctgtggaattcctgccaaaaatgcagaattcaaatctaatcatgaggagacatcagataaacccaaattgaaggacattcttccaaagaactggtctgtgctctcccaaaacatcaagatcatgaaagttaagtgaagatggagacattgttccacattggaggagactaaaaaaacctgataacagaatgtatcttgtgaccctatgattcccttttcctatacaaggacactattgacatgcccaccagggtggctagaaccaaaaagtcagataacaagtatttgtgaggatgtggagcaatggaaacctcatactatgctggtagcaatgtaaaaaaagaaaaaaaagtccttgctcttaggatattcatactgaagtatttagttaaaagggtgtcatatccgcaaccactaacaaataattcagaaaaatcactgtatatcattcagaaaaattatatatatgtaaattacatatgtatatacatggggagaaagaaacggacagagacagagagagagcaaatatgttatcattataaggcttggcatttttgtcagtcccataagtgaaaaatagtatatcattgtttttaatttgtatctctttaattatggagagctcatctaaaacaccccagaaaccacaacctagaatgaccacagacatttattgagtgtccaccctctactaagctccagtgataaaaatatgaagcacaacatctggtagatgtaaaatggtattatatctcactgttgttttaattttacatttccctgagcagtaaagagattgggttatcttttcatatattatacatattgaccattttaggtttcttctgctgtgaattacctatttgtacccaatgtctattgccaagtgtattgtttgtcctcttcggatttgtagatgttcgttatatatcctaaaacctagatcctacttctttgtgacacaggtcaaaagcctagatggaaacaatcaagtccgcaaagcccaggagcacatgtggtaagaatcttccagttttaaatgccaagtcttgcaattgagggaagtatttctggtaggtgctgtgggtcattgttgactcaacttgagtgggtttgacaactgagaaaaaaattaaaatgaaatttaattcataaaatgtatgtcctgtattctgctgttaaggaaaagaattgatatttgtgcatctggtctaagctattattccttatatatacatattcttaccgtattaaatgttttttgtttgtaatacatgaatactaatttatgagctagaactccatttaacttcatgttaaaatagagagaaaatatacatttctcttcaattaccattggtgtttcccagcaaaaacctgccaagcccactcttttgtttaacagaaaaggacaatggagacgggtgagtgaacatgacttgcccagctccatacaggccattgttaatctgattaaaatctgtttcagttggctgcccaggtcagggtggcgtccagtttgacctgggcttccttctcccttccacgtcacagctaagcatgtagtgcagtaagcgcccagtaagtgctcttttggaaaaataggcccttcatcagcctaggtacaaaggggaatgcctagaaactgcagcagtagggtaggtagaaggcgggtgctacataaatctttagtgttggtgcagatagaggtgcggatggggccagtgtaagcgctttcttttttattttatttatttatttatttagagaaggagtttcgctcttgtttatttatttatttattttggagaaggagttttgctcttgtcacccaggctggagtgcaatggcgtgatctcggctcactgcaacctccgtctcctgggctcaagtgattctcctgcctcagcctccggagtagctgggattacaggcgcccagctaaattttttgtatttttagtagagacagggtttcgccatattggccagcctggtctcaaactcatgacctcaggtgatccatccgcctcggccttccaaagtgctgggttacaggtgtgagccaccacgcccagtctttatttatttattttgagacggagtttcgctcttgtagcccacaatgacgcgatcttggctcactgcaacctctgcctcctgattctcctgctttaacctcccgagtagctgggattacaagcgtgcgccaccacgcctggctaatttttgtatttttagtagagacggggtttcgccatgttggccaggctggtctcgaactcctgacctcaagctatcctcctacccttggcctcccgaagtgctgggtttataggcgtgagccaccgagcctggcccttaagagctttataaatgccccccttttaagtgctcggtactagcctccctctagttcacagagaacatttactagtcgctggggtcaccttcgaagcaaagagtctgctggggaattaagcatgcaaatcacttctcaacgacgacacgccaagtgctcacagctcgtccccaggggaagcacaggcgcctaatttgtgttcctaggtgacacagtcattacttataaatgttcctggccggtcccaggaggtgggagggttgggagttacttcggttctctcaaaggttggggaaggagagatctcggtttgttttcccatctgtgaaacggggacaccacggtatttagaggacgtgcgcgggtgactatttgggggtgcagcggcttccctcctccctcccccatctttcccttctcacttccaaggcttggaaatttggagattcggaagtttgttcttggatggccagaaatcctccggaggcagacggtctggggctgaaaccgccacaggccggaaaggtgcgggcgtgaacgtcctgcgcgccgacgtccccccgcgccggtctcccctcaatcctcctgctcccctcctccgcgtccccgtccccgcccccctcctgctctcccattggccgagccggcggccgggccgccccgggatttaaagggcccgctcgccgcgccgctctgggagccgctgctggtcccggccttgcggcctgcgggggaggctgcccggaggaggcagcggcggcggcagcgcgtcctcggtccccaggaccacggcttctttcctgccaggtaggtcgccagtagtgcgcacgcggctccccagctcccatccctgggccggcctccccaggcggatctgtagcgcgagtgctaggaccccctccccatcacctttccgactctccctcaggctatgtctcctaccaccacctccttgcagcccccggacctgggcaggactttgttggcggcctctcgccgggtggggatgagatggggggcgcggaggatacaggacaccccccctccccgtgccgccgcatccatacaaggagagatgcacacggcccccaagtgtcacagaatccccctctctgccctccactcagagcgactctaccttggaaaccagggattccccttcccgtcgcccgccccatttgatatatgggcctgaaatgtatgccatcccatcaccatcggactggactgttcacagcactggagagacagaggtccttcattcactccaggtcacaggctgtgcgtgtgcatgccgaacacccacatgcacacagttggtggctcagtctgatgtacctgacttctcacgccttcccccagtcctccagtaccgtgcctctacatgggctgggcagccccaaactgaaatgtgagtgccagagtgcatcctttaagcgaggtctgccccacggacacccgctccctctgtgtccctgctttgacagatctatccatctggccatccatccgtgggggtctgcaatggccacctttagccgccaggaatttttccagcagctactgcaaggctgtctcctgcctactgcccagcagggccttgaccagatctggctgctccttgccatctgcctcgcctgccgcctcctctggaggctcggtaagtgcctgccataccgtgtgccaccatgccaggccatatcagacctcccacattcatccatatcgagccacaccttaccctgtcacatcctgccaggccctagcatgtccaagctggaccccaacatgttcagccccaccacatcccaccaggccaaaccccattccaccataccacatcctactatgccagccaccccatgccatgccacaccgagccacatcctgccatgccaagccatgcccttcagtattcctgagttctgggattccagaaagctgagattcttggatcttgggattctgaaatgtctacatcccaaggttataagacattggcatgctgatgtcacagggttatggaatcccaaagtaccatgattacagcgtttggagattctgacaatttgaaattctcacattctagacttctaaaatgttggcattgtggatttctataatcagggcatgatgcgatttctggattctaggattctgaaatgtttccacagtcatagcaggcctgtatcttaatgaaagattccaagtccccaagattcctataggaggcggagatttctggaaatctgagatccgaaggttctacactttcttttttctttctttcttttttaattttaaatggatgttctattttttcccaggtttattattttgaaatttttcaaagctactgaaatgttgaaaaaatagtacagtgagcacccacgtatgcatcaccagattctctgtcaacatcttgccacgttagctggctctatctgtctatctatctatctatctgtatatctatccatctatctatctatctatctatccatctatctatctatcatcttcctgaattgcctgaataacctgctgacatcatgacactgtaccccacatccttcagtgtgtggcccctgagaacaaggacatcatctcccacaaccacatcctccaccatcaccccacaagacattgaatctggatacaataatgttatcctatataaattgatatttgaatttcttccaaggtcccccaaatgccctttatagatgtttcttttctttaaacccaggccctgccaccctctccagctccccaacacctgctttgggcccctccaatcccactacattccagcctgaaggcctttgccctggctacgccctctacccaggtcatcctccccttcctactagcccaccaaccttctctttcttgttctccctctctctctccctccctccctcccttcctcccactccctctctttctctctctttctcgttctctctctccctttctttctccctttcacccaaagggttgccatcctacctgaagcatgcaagcaccgtggcaggcgggttcttcagcctctaccacttcttccagctgcacatggtttgggtcgtgctgctcagcctcctgtgctacctcgtgctgttcctctgccgacattcctcccatcgaggcgtcttcctatccgtcaccatcctcatctacctactcatggggtatgagtatgcatccttatcctcacactgttggctgaagtgcatgggtgggtccccaggccccatatgaagttgtccaagacagggagggtggtgagattccccggagaaagaagggagtctgggagaatcatttgcctatgaggagacacagaacaggtaggacgtggagtgtccctggagaagggaatctgggagatttgtcctttcacaggactgtaagggacaggttgggcatgggctccccctggaggagggagcctgggagaatttttccaccatgagactgttgtaggacaggaggaggtagaaccctctgggcaccttggacccccttcccctgtcccccatggtctcagaggccatgagtgtcatgggaccaagaccagcacctttttcctcagtgagatgcacatggtagacaccgtgacatggcacaagatgcgaggtaggtagccctgcccctctcacctgcccaacccccctgccccactcctcgtctcctaactgcccccaccctgtgcctttcctctcctgcttttctccctcacctgcccaccccactggacgtgcagacctcacattactcttgggtccgtgtctctttccaccgtgcattttcccgaagtctgtctgtctcgtgtcatgtatgtgcctgactctctggagtaagggcatctatctgtcctgggcttccttgcccacctgcctatctgtcccatgcccacctatccatccttgtgcccgcttttcctaccacatctcacctggtgcacctcctccttgccatgctgatctgctctctgcccatccacttgaccatgggcaccacacataggggcacagatgattgtggccatgaaggcagtgtctctgggcttcgacctggaccggggcgaggtgggtacggtgccctcgccagtggagttcatgggctacctctacttcgtgggcaccatcgtcttcgggccctggatatccttccacagctacctacaagctgtccaaggccgcccactggtgaggtcctgagtggatgggtgggcagggactgtgggagccaccctggggcagcactcatggagtgcttgatccctacagagctgccggtggctgcagaaggtggcccggagcctggcactggccctgctgtgccttgtgctgtccacttgcgtgggcccctacctcttcccgtacttcatccccctcaacggtgaccgcctccttcgcaagtgagcacagccttcgaggcccctgcccagcaatgagggggttgggtagggacccgcggtttccccagttctgagcctgtctcttaatgcttctttctgtcttctgttactacagcaagaaacgcaaagccaggtaaatgagggcaggtgtgagggcacgtggagtggggctgacatgagtgggggcagagcccatgaccaatgggttctgtgtgtccaagtgtgtctgaccgtcaactccatgactagacagagactgtggttggctggctggctgacgaagcttggctctgtgactctgtttgactgacactccaacacatactgtctctggctgtccatctgttcagctgtctcgctgttagaagcaagtcatattaactgtcatggagagtgacaagtatgtgttggttgggtgactttaacctgtcagtgactctgtctagggatatgtatgatgtatgtttgtctattggccactgacccccgaatgtaagcctgtgtggctgtctggctgtgccatcatcagtgatagggtatgtggctgtcattggataagataaatctgtgttcaagattctgactttttgtagctttggccaggaatgggtctgactgtggcatgtcatatgcctgtctgtggagttcatggactacctctgcctgtgtgtctgccttccctgatggcttggtgttgtctagctgaggggttgtacccgactctggtctgtgcctgtctgcaggactgactgcctctagtttgactatagggtttgatctggctctttggttgtatggcccctcccctactccctggctgctgattaggtctaatgccgaatgagtctccaaaaggtcaagtgacttgaccagtgtcacccagctaagcagccaggcatgaatcccaggcctaacttcagaacctatgctttttccaacgcaggatgctgcctgtttttgaccatgtctgattacaactagtagggggggtgtgtgtgtgcacagcagggtgtttgatggtctctgtgcccagctcagggatttttggctgtcctgtagtcgctgagtcaggttagagcattgcaaggctgggagtctgataagatttgtgtctggctgttagagggtgcaggtctgtgaagtcgggcctctgatggtggctggctttggccgtctggccacgtgagcctgcagggccatgccatattataggatagctcatgcatccatttgagccacataagactaactgcctgagggtggatgtctgtgtgtgactatcatagttcaccttttttgtggctacatttcatctgtcttgtctgaacaattcagaccagcctccagggcctctctgactctcttttctttcttctctgctgccttcctgacccctgggggccctaggggcaccatggtaaggtgagtctacagagcggggcccaggatgctgacatgtggtggggtatcatgttgggacctgaacgtgatgcctctcacccctgcccctttctccccaggtggctgcgagcctacgagagtgctgtctccttccacttcagcaactattttgtgggctttctttccgaggccacggccacgttggcgggggctggctttaccgaggagaaggatcacctggaatggtgggggggcttggggaccccctctcccacagggtgctgcctagaggagctgcagggaggagggcgggtgctcccaggggagggaacggccaagacagaagtgtggcggtcagatgagttgagatcccaaatggatttgcatatctcttctgcccccagggacctgacggtgtccaagccactgaatgtggagctgcctcggtcaatggtggaagttgtcacaagctggaacctgcccatgtcttattggctaaataactgtgagtcaccaagtcaccactccagctgtgttggtaatccaggccctttcatacattcatacaacatttactgagcaccttctgtgtgctaggcacccaaaatccctacccttgtcgagctgcagttctcctgggggggcagatgataaatacgagaaaaaaaatacataatagctcaggtgttgataagtgctatggttaaaaaaaaaaatttttaaaaaagcaggtaaaggtgatccaggagtgctggcaggagataggagtggggagggtagggtattgcaattgtaaaaaaattagccagggcaagtctccctgaggaggtgacattggagcaaagatgcaaaacaggtgagggagcagggagcgcagatatatgggggaggattgtaacagatgcggggacagcaggtgcaaaggtcctgaggcgggaacttgcctggtgtgtggggaacagcaagaaggccagcagggcaggagcagagtgagccagggtccagtggcaggcggtgaggtcagggaaggcccggagggcctcatgggccatggagaggactttggctttttctctgagagagatgagagccacggcagggctctgagcagaggagggccctgggctgactcgggttgcagcaggatccctctggctgctgtgaggacagactgagaagagggatcgaggatgcagcagtgaggaggccgctgccatcatccaggccagtgatggtggtggtggcagtggatgtggagaggagagctcagattctggcatattctgaaggtggaactcacacaatttgctgaatttggatgtgggagtttggggagggcaaatcaagggtaattcccaggtttttgccctgaggaactggaaacgtggagttgacattgactgaacttgatgagactgggaggagcaggctgggaagatcgggagctgggctttgggcatgtgaagtttgaggccatctaaggactttatcctgggggctccaacaggttgtgggtattctcatcctgctgatggccctccaggaggggctgggggactttcaggagaattttatcccacatctcttcccctccagatgttttcaagaatgctctccgcctggggaccttctcggctgtgctggtcacctatgcagccagcgccctcctacatgtgagcagggtggagcaggatcagggtggaagctgggtgggggcgggtggcagggcctcttcctcactcatttcattgtcatctgcattcccccagggcttcagtttccacctggctgcggtcctgctgtccctggcttttatcacttacgtggagcatggtgagtgcagggcccagcccagccgttggatagaaggttggtgggggggctggagacagcctcccctgaggctaacctgacccccttacctctccccaccaccctagtcctccggaagcgcctggctcggatcctcagtgcctgtgtcttgtcaaagcggtgcccgccagactgttcgcaccagcatcgcttggtgagggttcagcctgggcaaccttgtgcccaacactccctgtcaaaaatgttccttctatctctatcttgtatgtgtctcagggtgcccaccttcttcttttggtgcctgagccatccccataacctctcctctattcgctggcatccgtttccctaacaggcatttatcgagcatctgctgtatacacacctggcattcgtttcccccagtgaacatccgttgagtgcctgttggtgctctaggtgctggagacacggtgaatgaaacagactgaagtcccagccctatgggacaaacattttaaccgggcagacagtagataaaaaatgagtcagtaaagtctaataatagtgtgtcagattgcaagtagtgctaaggagaaaatgtgtagggcaaaggggacgggaagtatgggggtgatttccatttgaaatagggaggtcagagaagcctccctggtgaggtgatgtttgaggcctttaaccgaaggaggtgagagagggaaacgttccaggcagagagacacccagtggaaaggccctgaggtaggagagggcctggaatctttgaggaatagcaaggcagccagggtggcttgagcagaggtagggtgaggaggggagatgggtgggaggcatgggccctctagatcatggtggggatttggttttgttgtgtgtttttcattctgtttgcaataagaagtacagacaacttcatacttgtctcccacccaactcccgttcattactataaagccctgactcaaagccctgccactcttcctcctctgcctggagactcgcacctcccccaacccaggatgccctcactgtgaacagtaccctcatcttggatgcctctgcataggaggctccctgaaccatctcttccctatctcagggggtaccctgggcatcctcagtcctggaacccactgtgccctgtgtgtcccctgggctcccccgtgcaggaggaggtgggacacagtgagtaggtccagttgccaagtatatccatctgtcccccacagggcctgggggtgcgagccttaaacttgctctttggagctctggccatcttccacctggcctacctgggctccctgtttgatgtcgatgtggatgacaccacagaggagcaggtgaggtggggccctgggctgtgtggttaaccaagggtggcgctatctggcggggggaaaccatgaggacaaaggctgggaagctgaggcctgagctcctcagactgtgctgcttcgcctgggcagccagtgctcctcggtcctttcccatagtccctctgcttgagtcacactgttaggtcttttatttgggtgaagtgtgcaaaatatgtttatttattttacttataaaataacttttaggctgggcatgctggctcacgcctacaatcccagcactttgggaggccaaggtgggcagatcacttgaggtcaggagttcaagaccagcctggccaacctggcgaaaccccgtctctaccaaaaatataaaaaattagccaggcgtgatagcatgcacctgtaattccagctactcgggaggctaaggcaggagaatcacttgaacccaggaggtggaggtcacagtgagcccatgccactgcactccagcctgggcaacagagcgagactctctcaaaaaaaaaaatcactttatagagatggagtggaaaatccaggttttacttgtgttaattatttcacttcattattgtttaggtagaatttgcaagacttcttaattttttttttttttttgagacaaggtctgtcacccaggctaaagtgcagtggtgtgatcacggcccactgcagcctcacattcctgggctcaagccatccttctgcctcaacctcctgagtagctgggactacaggtgcatgacactaagcccggctaatgtttttttaattttttttgtagagacagggtctccctatgttgcccaggctggtcttgaactcctaggctcaagcaatccccttgcctcaacctcctaaagtgctaggataacaggcatgagcaccctgttttatttaatttaaatatatatatatatttttagacggagtcttgctcttgttgcccaggctggagtgcaatggtgcgatctcagctcactgcaacctccgcctcctgggttcaagcaattctcctgcctcagcctcctgagtagctgggattacaggcacgcaccaccatgctgggctaatttttgtacttttagtagagatgggatttcgtcatgttggccaggctggtcttgaactccaggcctcaggtgatccacccgcctcagcctcccaaagtgttgggattacaggcgtgagccaccacgcccggccaaaaaaatatatattttattttacttaggttgagtgtacaaaccctggattctgcactttaaaatttttcgttaaaatgtatgcactatttttgttcatgttgagtatgcaaataccagattttactcctttttaaattaagaacaatttaaaaataacatttattcatatggctcttgcagaatccaggtttttgcttctcttttagttaggtttcagtcaaaaacaaaactttgtgttttttgatattaaaaagtttttaattcaggttaagtgtgcaaaatctgggatttgcttttcttttttttttttgagacacggtctcactctgttacccaggctaaagtgcagtggcacaatcatagctcactgcagcctcaaactcccaggctcgagcagtccacccacctcagcctcccaagtagctgggactagagatgcatgccaccacacctggctttttgcttctttttaaataaagtttttgttttgttttcattaaaatattttaaaatagtgaatgcctatcatgtgcttcaaaaaccaaacagtattcaagatatttagagaaaagatttgctcccaccctctgccccctaccctcttacaggttacatggtgagacggggtttcaccatgttagccaggctggtctcaaactcctgacctcaggtaatccactcacctcagcctcccaaagtgctgagattgcaggcgtgagccaccgcactgagcccacttttatccttttattaaaatatctttccaaaatttaagcatatcaaacaaatataaaaatatattttaattctacccccttgccagtttttaccctaaagataacacatgaatgatactgttctgcaatttttgaaaatcttccacatcaggatatagtgtcctcattcattttttccactatgaggaagtgacacagtttattttttctcttatttgtggacatcaggtaatttctagtcctttcctattgcaagtgatgttgcagcaggaactctgtacccaagtggatccacacaggtgtggacagatctgtaggatctgttgatagtctcaatggagtagtacttttgtgctctcccaccagcaatgcctgaatgtgcctgctgccccaccagtacagagtgcctctcagacttcctggatatgtttgccacttcaataaagaggaagatggccgggcggggtggctcatgcctgtaatcccagcactttgggacgcccaggcaggcagatcacttgaggtcaggagttcgagaccagcctgaccaacatggtgaaaccccatctctactaaaagtacaaaaattagctgggcatggtggtgcagcatctgtaatcccagctactcaggaggctgaggcaggagaatctcttgaacctgggaggtagaggttgcagtgagctcagatcgtgccactgcactcaagcctgggtgacagaatgagagcctgtctcaaaaagaaaataaataaaatgaggaagattattaatgaggctgagcatcttttcatatgtttaagagccatttgtttttcctttactggaatgacctattcaccttctctggcaatttttctttccaaaaaattaatttttaggagctctttatatattagggagataacaggtcagagaatgggatcactttgtttttaaaatgatttttaaagaagaagacaaaaactatatctggtcacctttcatatgtacctaggcccttctgcggggcctcgcctagagcagtcacagaaatgtccttgggcaaaggatgggttttcctaagaacttctttgtccttgctaagtgggaccatcacctctttctctcccacagggctacggcatggcatacactgtccacaagtggtcagagctcagctgggccagtcactgggtcacttttggatgctggatcttctaccgtctcataggctgaggcacatctgtggaccctcataaccctcttaagacccctctcagggtgccactgatgggggatgagggaaggccctctctctactccttgaccccctccatccttgacccccaacacctcaacacacacacacacacacacacacaaaatcacaccattttcatgcctgtcaatccccaccccaccacaaggcaggaagggggtggtgcctgctggggcctagagggggatgcttggggaaacagagaaggggagatccagggcctccccgccttccttcttcctttttatatacaatttgttattgtcaaataaaagtaggaaatattcaataggcttcttcttcactgctcagaggggaataggaatgagtgaggaagggagcacagcatggataaaggtttggaagctggaaaccatgaagagagagcagactgtgattggttcatggttagtttatgattgattagatgatgagcctgaagatggcaggatcctggtcctgcttggtttgatcagggcagggacagattgcatagttggatgtgggggaggcctgattggctggaaaactgaaggatccccattctgattggttgctctgagtgggacacagaggagagaaagcaagagagatgaagggttggtgcctatttatccttaggactgagggttgtgggttctaattggatgggaggtctgggatgggtctggattctgattgattgctccatctgggggcccactggtggttaggcgtttgattggctttttagaactggcatatggagattgagggtcttcatgccaattggtcagtaggactgagaggcctgggttctaactagttcttctgacttgaggtcgggagaagagagaatgaccgctgctattaggactgaggagttctgagcactgaagagctggggagggggtggttgcagtgtatagcgtgtgatctgcttgtaacagtttcgttgcattatactaagggttactctacctagaaaagggcggaggtgaaaggatgcaacgcaacgctaatttcaccagcggaagaagcgggtacagaccttaatgagtccccgttttgatcgactgataagggaatggggaaattgaagccaggactcgatgcagattggctacggatccaaaacgcccactaaccttggcgcgtcccagtctccaccccaaacctaactcaggtgaaaatggcgccacgcgcgggggcggggctagaggtacaaagagagtgtctattggttgggagcggcacgggccgccttcttcgcttcaccattggctcgctccgtaaggcaagagaacccactaggggatgagcccgaactagggatgtgacagagcgcgagacccagcctaaagagagcccggagccagcgtgggaggccgctgccgtcgcgcgccttggtgagtgccctccacccggcccctgctccctcccccagctctccccggctacgcggccagccctcggcgtgccagcgcgagaccctttgccacccgccccccccaccgcccttttgcgcctgcgcgagacccccagctaccgcacggttgtccagaggacagaagatccgtcttctcattgggcagcgggactggagggttctggttcggattgaccggctttgtgttccgttctagcgctgcacgccagacaccggcctttcaatatccgtctcttccctgcaggttgacggcgttgcacgctctcgcggggaggctctggctttccaaacgctggcaccgagggttgtagttctgattcgttttctttcctctgtcccccagttgcagttttcaggactacgtgggggagggaatagctttttgttgaacggtttaagacgctgacctgtgcaactggaccacgcctggttcctgtgtctcttaccaaaccgtgaccccggagcacaggactgggtttggtggtcgtgagcagtttgtgacccttgaaggaagacaccaggcctggtcctgtatctccctcgccagactgtgaccagggagggctgggatcaggtgttgttcccatgtgcctcccaccagactttgacccccgagggctgagaccgggactgtttctaccacatcataatatggcttctaaagggctggaacaagctttcagcctttctgtggccttgtgtttcagtcatgttctttttcttttcttttttattttattttgagacagagtctcgctctgttgcccaggctggagtgcagtggcatgaccccggctcactgcagcctctgcctcccaggttcaagcgattctcctgcctcagcctcctgagtagctgtaactacaggcgcacgccaccacacctggctaatttttgtatttttagtagagacggggttttgccatgttggccgggctggtcttgaactcctgagctcaagtggtccactcgtcttggcctcccaaagtgctgggattacaggcgtgagccaccgcgcccggccttcttttttagaggcagagtctcagactggagggcagtgatgtggtcactgctcacttcagccttgaagtcctgggctcaaagcgatcctcctgcctcagcctacctactagctgggactacaggcctttgtcaccacacctgactgattttcttatttttttagagacagtttcgctgtgttgcccaggccggacttgaattcctggcctcaggtgctgctcctgcatcagcctcccaaagcactggaattacctgccacggtgcctggcctttagtcatggtcttaaaacagaatgtaggccgggcgcagtggctcacgcctgtaatcccagcactttgggaggctgaggcgggcggatcgtgaggtcaggagatcaagaccatcctggctaacacggtgaaaccccgtctctactaaaaatacaaaaaattagctgggcgtggtggcaggcacctgtagtcccagctactcgggaggctgaggcaggagaatcgtttgaacccggaaggcagaggttgcagtgagccgaggtcgcaccactccactccagcctgggtgacagagcaagactccgtctgaaaaaaaaaaaaaaaaacggaatgtaattagaagtgttacaatcctgtctgttaactggtaaattcggtccatttacatttctcatgataataaactatttgaatttgattttattatctcattctgtactttctatttgtccaggtttttctgttccttttttttttttttttttaacttcctgcctatacacacgcagccatcagcccacaaagacatgactaccaacgcgggccccttgcacccatactggcctcagcacctaagactggacaactttgtacctaatgaccgccccacctggcatatactggctggcctcttctctgtcacaggggtcttagtcgtgaccacatggctgttgtcaggtcgtgctgcggttgtcccattggggacttggcggcgactgtccctgtgctggtttgcagtgtgtgggttcattcacctggtgatcgagggctggttcgttctctactacgaagacctgcttggagaccaagccttcttatctcaactctgtgagtcctgatttctttcatatgctgtgggatgggatttgctgggcagggatcggcttgcatgtttacctatccacctattcttcttccattgatttattttaaatttttatttaatcttttaaaaaatttattataggccgggcacagtggctcacgcttgtaatcccagcactttgggaggccgaggcaggtggatcacttgaggtcaggaatttgagaccagcctggtcaacatggcaaaaccccatctctactaaaaatacaaaaattagccaggcgcggtggctcaagcctgtaatcccagcactttgggaggccgaggcaggcagatcacgaggtcgggagttgaagaccagccaggccaagatgatgaaaccccatctctactaaaaatacaaaaattagccgggtgtggtggcacacgcctgtaatcccagctactagggaggctgaggcaggagaattgcttgaacctgggaggcggaggttgcagtgagccaagaccatgccattgcactccagcctgggcaacagagtgagactttgtctcaaaaaaaaaattattatgtattgttattattattctttttgttttttgcccttctctaaaactggtagataacttatttttgagacaaggtcttgctctgttgcccaggctggagtgcagtggtatgatgattgctcactgcaacctccaactcctgggttcaagcgatcgtcttgcctcagcctccccagtagctgggactatactataggtgcacacctttatgcctggctaatattttcacttttttgtagagacaaggtcttgctatgttgctcaggctgttctttaactcctgggctcaagcaatccttccacctcagcctcccaaaattctgggatgacaggtgcgcaccaccgtgcccagccttatttaacttttttgttgcatgtatattcacgtgggtcaaaaaaccatttaaagagatttgcagtgaaaatctgctttctatccactaagtttccccaaacgctgttaggcactgttgatagttgtttatgtttcttttcagtttatttacacacgtaagtctcaatttgctcaattgtaaaaggaggataatagtaataaccaactatatgtaagatacttagaacagtgtttggcaaacagtggttgccatgtaactgttcactattattatcattatttgcacttttccctttttacacaaatggtaatatgctatatatacttctaatcttttctctttttctttctttccttacaagaaaaccaaagaagccattttcttttttgagacggggtctcgctctgtcacccaggctagagtgcagtggcatgattatagctcactgcaaccttgaactcctgggcaatcaagcaatcctcctgcctcagcctccctagtagctgggattataggcatgtgccaccccaccaagttattttttttttaacaacttttttttttaagagatggcgtcttgctttgttgcccaggctgttctccaactcctggcttcaagtgatctgcccacctcagcctcccaaagtgctaggattacaagcatgagccaccgcacccagctgctttttttaatgaggtcactcctcatgatttcataaagagctttcaaagcatggacattgtacagttgcttgacttgtgtagtattgatgggcattttccctcaatcttctgccattataaacaaggccgggcagagtggctcatgcctgtaatcccagcactttgtgaggcgaaggcgggcagatcacctgaggtcaggagtttgagaccagtctggccaacatagtgaaaccccgtctctactaaaagtctaaaaattagctgggcgtggtggcaggtgcctgtaatcccagctactcaggaggctgaggcaggagaatctctgggacctgggaggcggaggttgtggtgagctgagattgcgccactgcacactccagcctgagcgataagagcaaggctccgtctcaaaaaaaaaaaaaaaaaaaaaaaacattacaggcatgagccattgtgcccggctggtcagatgtttcttaaattttagtcattccagtagatgtgagtgatatctcattatggttttaatttgcttttccttagtgactaatggaagtttgaacatctttcatatacttattggccatttagaaatcctctttgtgaagaacctattcaagtcttctgcctattttatattggatgatctttttctttctttcttttttttttttttttttgagacagggtcttaccctgttgtccaggctgagcactgtggtgctatcatagctcactgcagcctcaacctcctgggctcaagacatcctcccactgcagcctgggactgtaggcacgtgccaccacgtccagctaatttttgtatgttttatagagttgggggtctcactatattgttcagactggtcttgaactcctttatgcaagccatcatcccacctcagcctcccaaagtgttgggattacaggcatgagccatcgtgcccggcggtctttttctttctgattctctgctcactcttgtattcactcatctgttcacctacattctctctctctcattggctacttcactcactccatcatctacacctgcttccttttataccacacacacttcttgagtaccaatcacagccacactgttttgtgtcaggctttacacatattaccttgttttagagaaataaaccactagaatccaaacagttaccccatttcacggatgaggaagcagacgcatgggaaggttatgaagtctgtcttcttgcagggacccccagctctcacaagtgtgtgttcctttcactgcctttattcttcatatctctctcttcttttcttcagggaaagagtatgccaagggagacagccgatacatcctgtaagtgtttgcctctgtcaatggagactggcattggttttcggggggtggtgagttggggagcactaatgggctaacctgtaggaagagcacaccgataccagtgtcccctcatgctttctcctgcaggggtgacaacttcacagtgtgcatggaaaccatcacagcttgcctgtggggaccactcagcctgtgggtggtgatcgcctttctccgccagcatcccctccgcttcattctacagcttgtggtctctgtgggtaaggaaagggcactagaggggcactgggcactagaggggttgatgggggatccacagacacagatgtatccctgtgggtgggatctctcaacggtgcccttccaggggtaagtcagactgaatgacaaaccccctgaggctctggaaaggtcatgcccttctctgagcctgcactctcaggtggggagggttcatttttcttcctcctcctccttctccatcacaaagtctcctgtgaaggttacatgaggtggcccagggtggcaagaagcccctggaacctccaggatcagggctctgagatcccttcatgtaagattctgtcatattttttttaaaacagggtctggctctgtcacccaggccagagtgctatggtgtgatctcggctcactgcaacctccacctcccagactcaagcgatcttcctgcctcagtctcctgagtagctgggactacaggcatgtgccaccgtgcctggctaacttttgtatttttagtagagatggggtttcgccatgttgcccaggctggtctcaagctcctgagctcaaacagtcctcctggcttggcctcccgaagtactgggattacaggtgtgagccactgtgcccggcctcagtcatcttgtgttattaaattgttagctttctttagttctagcgatatgagttatctttagtcccagaatcctaagctgtcttggatttgaggattttgaacttccttaaatctgaaggtgtgagctctcctgagttctgaaattctcagctctctggtgtctggaatctcacttttctgatttctcagattttcagctctgtgatttcagaatacttagctctgagaccttgaatgatgacttggaaagtgctttggaatagagaattggcgaaagtgtccccttcctcactggggcttctccttcccctcctgccacccacaggccagatctatggggatgtgctctacttcctgacagagcaccgcgacggattccagcacggagagctgggccaccctctctacttctggttttactttgtcttcatgaatgccctgtggctggtgctgcctggagtccttgtgcttgatgctgtgaagcacctcactcatgcccagagcacgctggatgccaaggccacaaaagccaagagcaagaagaactgaggagtggtggaccaggctcgaacactggccgaggaggagctctctgcctgccagaagagtctagtcctgctcccacagtttggagggacaaagctaattgatctgtcacactcaggctcatgggcaggcacaagaaggggaataaaggggctgtgtgaaggcactgctgggagccattagaacacagatacaagagaagccaggaggtctatgatggtgacgatttttaaaatcaggaaataaaagatcttgactctaacactgagagatccttaattactaaccccagagatgcgctatgactgaccccacagatcccaccatcattcacttattccagacccccatcagcatctaaagacctcccacctctgacctcacaaacccctatcactgaccccccgccagaccccataactcactacacagaccctatcactggccccacagtcccctggtcttaactcgagctgccataacagaatgccacagactaggcttaaaccaccgaagttcattttctcacagttctggagtccaagatcaaggtgtcagcaggtttgacttctcctgaggcccctgtccgtagcttgcaggtggccaccttctcagtgtcctcacatggtctctatgaactagcgtccctgtccctggtgtctctctgtgtgtccaaatttcctttttttttttttttttttgagacagggcctcgctctgtgtcaggctggagtgcagtggtatgatc

SEQ ID NO: 23293 - DNA, 3770 bp, Homo Sapiens
  misc_feature (3646)..(3646): n is a, c, g, or t
  misc_feature (3650)..(3650): n is a, c, g, or t
  misc_feature (3666)..(3666): n is a, c, g, or t
  misc_feature (3672)..(3672): n is a, c, g, or t
  misc_feature (3694)..(3694): n is a, c, g, or t
cggggacaccacgccagtgctttcctgccttccttccgagatggaaagaggagctcctagctcacttaagccggggtagggctggttctcctttccgagccaaaatcccaggcgatggtgaattatgaacgtgccacaccatgaagctcttgtggcaggtaactgtgcaccaccacacctggaatgccatcctgctcccgttcgtctacctcacggcgcaagtgtggattctgtgtgcagccatcgctgctgccgcctcagccgggccccagaactgcccctccgtctgctcgtgcagtaaccagttcagcaaggtggtgtgcacgcgccggggcctctccgaggtcccgcagggtattccctcgaacacccggtacctcaacctcatggagaacaacatccagatgatccaggccgacaccttccgccacctccaccacctggaggtcctgcagttgggcaggaactccatccggcagattgaggtgggggccttcaacggcctggccagcctcaacaccctggagctgttcgacaactggctgacagtcatccctagcggggcctttgaatacctgtccaagctgcgggagctctggcttcgcaacaaccccatcgaaagcatcccctcttacgccttcaaccgggtgccctccctcatgcgcctggacttgggggagctcaagaagctggagtatatctctgagggagcttttgaggggctgttcaacctcaagtatctgaacttgggcatgtgcaacattaaagacatgcccaatctcacccccctggtggggctggaggagctggagatgtcagggaaccacttccctgagatcaggcctggctccttccatggcctgagctccctcaagaagctctgggtcatgaactcacaggtcagcctgattgagcggaatgcttttgacgggctggcttcacttgtggaactcaacttggcccacaataacctctcttctttgccccatgacctctttaccccgctgaggtacctggtggagttgcatctacaccacaacccttggaactgtgattgtgacattctgtggctagcctggtggcttcgagagtatatacccaccaattccacctgctgtggccgctgtcatgctcccatgcacatgcgaggccgctacctcgtggaggtggaccaggcctccttccagtgctctgcccccttcatcatggacgcacctcgagacctcaacatttctgagggtcggatggcagaacttaagtgtcggactccccctatgtcctccgtgaagtggttgctgcccaatgggacagtgctcagccacgcctcccgccacccaaggatctctgtcctcaacgacggcaccttgaacttttcccacgtgctgctttcagacactggggtgtacacatgcatggtgaccaatgttgcaggcaactccaacgcctcggcctacctcaatgtgagcacggctgagcttaacacctccaactacagcttcttcaccacagtaacagtggagaccacggagatctcgcctgaggacacaacgcgaaagtacaagcctgttcctaccacgtccactggttaccagccggcatataccacctctaccacggtgctcattcagactacccgtgtgcccaagcaggtggcagtacccgcgacagacaccactgacaagatgcagaccagcctggatgaagtcatgaagaccaccaagatcatcattggctgctttgtggcagtgactctgctagctgccgccatgttgattgtcttctataaacttcgtaagcggcaccagcagcggagtacagtcacagccgcccggactgttgagataatccaggtggacgaagacatcccagcagcaacatccgcagcagcaacagcagctccgtccggtgtatcaggtgagggggcagtagtgctgcccacaattcatgaccatattaactacaacacctacaaaccagcacatggggcccactggacagaaaacagcctggggaactctctgcaccccacagtcaccactatctctgaaccttatataattcagacccataccaaggacaaggtacaggaaactcaaatatgactcccctcccccaaaaaacttataaaatgcaatagaatgcacacaaagacagcaacttttgtacagagtggggagagactttttcttgtatatgcttatatattaagtctatgggctggttaaaaaaaacagattatattaaaatttaaagacaaaaagtcaaaacaaaaatattttctaacttgtaagttctatttaaagggggtgggggggaatcttgggaacgttgtggggtccaagccacaagttaacttgctatgctgccagaagggatttctggtataaggttgaaattgctgagataaaataaactaaaacaacaaacatccttaaagaggtagggtgtgggctgctgagggggcaagagggatagactgaatctgtcattttttagaagatgcttcataggacacaggactatccatttctacagacatctttcttaagccgagagctgtctttgcagaattatcttattaaaaaaaaatacaaaaaaaaagcaccatgaatttgtactgtgccaaaatgatagtggcaataatatttttcttcagaggctaaggggaagatagacctgtacatgtattttaagcaggaaaaccaccaaaattcaaacgaacccttaaaggggctgagtctttgtccatgtgcacaagtcttgggggtctgtgcactggacacacatgtgccttgcctgacagaattgcttagaaaggagcagagaaggacgggagctggcgtagctctcagtctaatgctttcacattgcaccagattcctgcagttgggcttaacccactctgcaaggcatgtgtctattcagggtttcccaggaggaggaggcccctgaaggggtgcggcagcaggggggtggtaagggagggtaaagcagagagaatgtattcacaggaggccataaattagcattgtgccatgtccacctgttgttcctggactctgacacatgattgtagacaatgatggcattttatgatttttaaaaaagattttgtttgttttaaggtggagagggaggagaagcctgaattggggagcttgggagtggaagcttttctcatgcttgtgatttggtgactcttctaaatgctgattcattagggattattacagcggatgtcaactggttgtggtgatggggtgggggcagaacatgaatagcaaagaaaagggagagacgaaaagggtacaggctcatgtaaagtaatgaagcctttcccaaccaggatggttcacaaaaaagctgtgagatccacagttacaagtgacacgcatgcacacatggagttccacatggggtactgttgaatggagcacactgatgggaagcttccctctcccaggccccctcaggagaaggtggaagagaaagggtgggcgtgggtggggaaggcagagatctctgttattctggtccatctaatgatgtaacttctttcagttattattttagctttaaaaggaaataaggggttcagatttgaaagggggtggtatgggtgggggaggggaattgccaacaaaanaacnctgattgtaatgtganaaaagngtatttttgtattttaataaanattgttgaatttttaaaaaaaaaaaaaaaaaaaaaaaaaaaaaaaaaaaagaaaaaaaaaaaaactctccagcgct

SEQ ID NO: 23294 - DNA, 2727 bp, Homo Sapiens
tttcccttttttttccgtttggcaacccacacccttccacacacgctcacccgaaaattaaacaccaagatcctctaacttgtttggattgactgatgaagacataaagctctatgttttttgaggtggagtgagtggtttttcttcatttttaaatggccaaatgacagcttgacccagtttgctttccaatcaaagggcatttattttgaatgtctctttgtggcgcaagagccaacgcaaaaatgatggcggcttacaatggcggtacatctgcagcagcagcaggtcaccaccaccaccatcaccaccaccttccacacctccctcctcctcacctgcaccaccaccaccaccctcaacaccatcttcatccggggtcggctgccgctgtacaccctgtacagcagcacacctcttcggcagctgcggcagccgcagcagcggctgcagctgcagccatgttaaaccctgggcaacaacagccatatttcccatcaccggcaccggggcaggctcctggaccagctgcagcagccccagctcaggtacaggctgccgcagctgctacagttaaggcgcaccatcatcagcactcgcatcatccacagcagcagctggatattgagccggatagacctattggatatggagcctttggtgttgtctggtcagtaacagatccaagagatggaaagagagtagcgctcaaaaagatgcccaacgtcttccagaatctggtctcttgcaaaagggtcttccgggaattgaagatgttgtgtttttttaagcatgataatgtactctctgcccttgacatactccaacctccacacattgactattttgaagaaatatatgttgtcacagaattgatgcagagtgacctacataaaattatcgtctctcctcaaccactcagctcagatcatgtcaaagtttttctttatcagattttgcgaggtttgaaatatctccattcagctggcattttacatcgagacattaagccagggaatctccttgtgaacagcaactgtgttctaaagatttgtgattttggattggccagagtggaagaattagatgaatcccgtcatatgactcaggaagttgttactcagtattatcgggctccagaaatcctgatgggcagccgtcattacagcaatgctattgacatctggtctgtgggatgtatctttgcagaactactaggacgaagaatattgtttcaggcacagagtcccattcagcagttggatttgatcacggatctgttgggcacaccatcactggaagcaatgaggacagcttgtgaaggcgctaaggcacatatactcaggggtcctcataaacagccatctcttcctgtactctataccctgtctagccaggctacacatgaagctgttcatctcctttgcaggatgttggtctttgatccatccaaaagaatatccgctaaggatgccttagcccacccctacctagatgaagggcgactacgatatcacacatgtatgtgtaaatgttgcttttccacctccactggaagagtttataccagtgactttgagcctgtcaccaatcccaaatttgatgacactttcgagaagaacctcagttctgtccgacaggttaaagaaattattcatcagttcattttggaacagcagaaaggaaacagagtgcctctctgcatcaaccctcagtctgctgcttttaagagctttattagttccactgttgctcagccatctgagatgcccccatctcctctggtgtgggagtgatggtggaagataatgtactactgaagatgtaatgtagctttccactggagtctgggatttgcaattctggaggttaatcatgcttgtactgtaattttactaatgaagttttaaattaacaaccactacttgtatgatatgaataatatttagaaatgttactagacttttaatcttgtaaagtggttgtgcttttagaagaaaaatattttacccagagttgcacatgttttatgaatttagtgcagctgttatggctcacctcagaacaaaagagaattgaaccaaatttgggagtttggggttttatgttttgtttttcttttctaaaatgaagtgagattgttcacacacacacacacacacacacacacacacaaacacaaaggacagtcatacattttgatatttgagccattcctaaagatttggggttttctaaaactaaagaatctaggaaccttgcctgcgaccaatcatggagccacgtgagctgatcgtggctgcacctggggggagggtagggaggaggggcatgccacctaatgatcaagccctataattagcttctcattagagccgtgatggtgatgtgtgctgtctaaaatccaatgttgtgggtagagagaatgagtttgtgactaggagagactaaacttttgttttccttacccagtataaatatatatatatatatttaatctatttttattagaagtttttctgctctttcttacataaaagaaccccaagcatgcatctttcatgtgtgtaaataattcatttctgggctaatttcaaaagaatcccaatattgctgtatagaaagagaactagcttgcacattttaggtctgtgaaattttgtgagacttttcctgcactggacagtaaaaaaataataaaagacaaaaacaaatttaaaaaaaaaa

SEQ ID NO: 23295 - DNA, 3674 bp, Homo Sapiens
ggccttcgttcctcccagaaaggtctctgcctttctctagaaaaagaaagaaaagaatgaccgtttccaaggagatggtgacattcaaggatgttgctgtggtcttcactgaggaggagctggggctgctggactctgtccagaggaagctgtaccgagatgtgatgctggagaacttcaggaacctgctcttagtagcacatcagcccttcaagccagacctaatatcccagctggagagagaagaaaagcttttgatggtggagacagaaaccccaagagatggatgttcaggaaggaagaatcaacaaaagatggagagtattcaggaagtaacagtaagctacttttcccccaaagagctttcctcccgtcagacctggcaacaaagtacaggtgggttaatcaggtgtcaagatttcctgaaagtttttcaagggaagaattctcagttgcaagaacaaggtaattccctcggccaggcttgggcaggaataccagttcagatttctgaagataagaactatatattcactcatatagggaatggctccaattatataaaaagtcaagggtatccatcttggagggcacatcattcttggaggaaaatgtatctgaaagagtcacataattatcagtgtagatgtcagcaaatttccatgaaaaatcatttctgtaagtgtgacagtgtcagttggctctcacatcacaatgatgaactggaagtacacagaaaagaaaactacagctgccatgactgtggagaagatatcatgaaggtatcattacttaatcaggagtcaattcaaacagaggagaagccctatccatgttctgggtatagaaaagccttcagtaatgactccagctctgaagttcatcagcagttccacttggaagggaagccctatacatacagttcatgtggaaagggctgtaattatagttcacttcttcatattcatcaaaatattgagagagaagatgatattgagaattcacatctgaaatcctatcagagagtgcatacagaggagaaaccatgcaaatgtggtgaatatggtgagaacttcaatcactgttcccctcttaacacttatgaacttatccacacaggtgagatgtcctataggcacaacatttatgagaaagccttcagtcatagcttagaccttaatagtatttttagggtccatactagggatgaaccccatgaatatgaggaaagtgagaatgtctttaatcagagttcatgtcttcaagtccatcaaaaaatccacactgaagagaaactatacacagatatagagtatggaaagagtttcatttgtagttcaaatcttgacattcagcatagggttcatatggaagagaattcatataattcccaggagtgtggtaatggcttcagtctggcctcacattttcaggaccttcagatagtccacactaaggaacaaccatataaacgctatgtgtgtagtaacagcttcagccataatttacatcttcaaggtcacccaaaaattcacattggagagaaaccacgtaaggagcatgggaatggcttcaactggagctcaaaacttaaagatcatcagagagtccacactggacagaagccatacaaatgcaatatatgcggcaaaggtttcaatcatagatcagttctgaatgttcatcagagagtccacaccggagagaaaccttataaatgcgaggaatgtgataagggattcagtcggagttcatatcttcaagcccatcagagagtccacactggagaaaaaccttataaatgtgaggaatgtgggaaggggttcagtcgaaattcataccttcaaggccatcagagagttcacactggagaaaaaccatacaagtgtgaggagtgtgggaagggcttcagtcggagttcacaccttcaaggccatcagagagtccacactggagaaaaaccattcaaatgtgaggaatgtgggaaggggttcagttggagctttaatcttcaaattcatcagagggttcacacaggagaaaaaccctataaatgtgaagaatgtggtaaaggcttcagtaaggcctcaacacttttggcccatcagagggtccacacgggagagaagccataccaatgtgatgagtgtggtaagagtttcagtcagagatcataccttcagagtcatcagagtgtccattctggagaaagaccatatatatgtgaggtatgtggaaagggcttcagtcagagagcatatcttcaaggtcatcagagagtccacactagagtgaaaccgtataaatgtgagatgtgtgggaagggctttagtcagagttcgcgccttgaagcacatcggagggttcacacaggagggaaaccatacaaatgtgaggtgtgtacaaagggtttcagtgagagttcacgccttcaagcacaccaaagggttcatgtggaagggagaccctataaatgtgaacagtgtggtaaggctttcagtgggtattcaagtcttcaagcccatcacagagtccacacaggagagaaaccatacaaatgtgaggtatgtggaaagggcttcagtcagagatcaaatcttcaggctcaccagagagtccacacaggagagaaaccatacaaatgtgatgcatgtggtaagggtttccgttggagctcaggtcttctcattcatcaaagagtccatagtagtgataaattctataaaagcgaagactatggtaaggactacccttcatcagagaatctacacagaaatgaagattctgttttgttttgaagtcctcaaatgggagctgaaattttccagtcactagagttctttcggtagaaaaagaatttttaaaaattaaaatgtaatgttgctgcccaacttcaacattcataatggccaggagaccacacaacagagacatttaatgagaggggtttcacgagggattttgttagaactttaacatcagtcattgcacaggagctaaggcttataaaatatgagtatggtcaggaatttaataaaagtacagtgatgagcatgcctaaatccatgttctctagaatgtaagcttggtgaaagaagggactttgttcattgctagtctacaaaactaggacatttcataacgcaatgtaggtgctcagtactttttgctaaataactaaaagtatgtaaaggtaaaaggtttgaaatttttaagcgcattttttaaaacttaaaacgtatttggaggagaaatcctgcaagtaatcttaataaagtcatttcaagtaaatatttgaaatgtagaacaataagcattatgatgatctgaaataacattaatttgattgtaaccctattgggttagttcccaccctttgttccatcttgagcagagatgtgctgcatttcttaacgtttggtctctatacattataccatctgctgaagtttagctttgtgtgtgtgtatatgtacccatgtgtgcactttaaatatcaatacaaactgataaacaatgtttctggttaatgttgcaaaaatggaacactgtattttacataattgattttctactcctgccctgtgaattaaggcagagttttactgtaatatttgcaagtatccaaaatggttactgatgacaaatactttttaataaatgtcaaaatcact

SEQ ID NO: 23296 - DNA, 3206 bp, Homo Sapiens
gtttataacttgaaaaatcctctccgtctcccttccctgcctcctttcctttccctttcctctgccagtacaactagacccggcgtctggcgtccccggtgcccagcattctgcggggcaggcggattaattggaattcttcaaaatgtcaggtgtggtacccacagcccctgaacagcctgcaggtgaaatggaaaatcaaacaaaaccaccagatccaaggcctgatgctcctcctgaatacagttctcattttttaccaggaccccctggaacagctgtccctccacctactggctacccaggaggcttgcctatgggatactacagtccacagcaacccagtaccttccctttgtaccagccagttggtggtatccatcctgtccggtatcagcctggcaaatatcctatgccaaatcagtctgttccaataacatggatgccagggccaactcctatggcaaactgccctcctggtctggaatacttagttcagttggacaacatacatgttcttcagcattttgagcctctggaaatgatgacatgttttgaaactaataatagatatgatattaaaaacaactcagaccagatggtttacgttgtaaccgaagacacagatgactttaccaggaatgcctatcggacactaaggcccttcgtcctccgggtcactgattgtatgggccgagaaatcatgacaatgcagagacccttcagatgcacctgctgttgcttctgttgcccctctgccagacaagagctggaggtgcagtgtcctcctggtgtcaccattggctttgttgcggaacattggaacctgtgcagggcggtgtacagcatccaaaatgagaagaaagaaaatgtgatgagagttcgtgggccatgctcaacctatggctgtggttcagattctgtttttgaggtcaaatcccttgatggcatatccaacatcggcagtattatccggaagtggaatggtttgttatcagcaatggcagatgctgaccattttgacattcacttcccactagacctggatgtgaagatgaaagccatgatttttggagcttgcttcctcattgacttcatgtattttgaaagatctccaccacaacgttcaagatagagagacacagcaagccatcaactatggttaattttgaaaaatggaaaagttggattgggcttacagtcagcactcagttatttgcaagtgtatttctttgctttgtagagtatttttattgggtgttaactttgacagctgagagtgggcttgcaagaacacaatctaaaagtgtgtttcaattgagtatctctctagtagaataggagttcatcctgaaaagctgtgactcattaacccagtaaacatatacaaagtaagcttaaaacactataaacatgagataagggaaaatgaatccagagttctcatattaataggtagtgaaacaataaggctttttagagcagactttgttggcataaaataacctggcttctatccctaaccctttcctacctttcctctccgtcaacatgtcctcatactgaagacaaacttgtttcaatgatagtcttcatttttaaaaacaaaaaggcaggcagacagaaataatgatgttttcttgcactaagaaggtactacttgtacacatatatcaaaacctcattctgcaaagtttttgaaggtttcaatgggaaatttgattttattacaaaataaaacattttttaatgttaaagtttatatattccatgcttgttttctcattcactggcatggatgatcaggagctgcctatatatgaaggcagaatcagactatcaggaaaggagctggccagggccacagccagtcaagatctctgagcaacttagagacattggtgtcattatatgaagcttgcatttaatacatttatacataatacatttgtacatttaattcataacgtctcttggtcacagatgccttatatataaaataagttgccagatctctaagattgcctagtacacctttgtatctcatttgatgtgatacccagaagagatcattgttttttgtttttgtttttgtttttttcaagaagatccttcgtgatcaccatgctgttctcatggtaagaactggagttatgtttttaaatttgaaaatatgacattttatgtagcactatataaaaagtgaaagcgacaaattccaccgctgcttaatactgctttgcttctttttattgacatgatagatacatatgtatctacacagagtaataataataaaacacagtaaacattctatttctctatggtctacagcatgccagtaaataatatgtaggaccaataataaattatcaattacacatttttgtgttaactaattaaaagcatagtgtataagtgagtacactctaattaacttgcttctgttgcactttagttttctacctgcatatggactgcatttttttttttaacacagtcagtatgtagaatgggatgtattcttctgctgctgcttattaaataaagaaagcctgagtgttcttagatggggttattctgagatgagggtcttagcctacagttctttttgaaatgaaaggtgctttgttttttaattatattcatcttttcagggtaaatttgtttttctgagtttctcgtaatgctcatttttacatgctgctactagcttttttttttaaaaaaagtaaaagttgctgctttctaaaatattaattgccttatatttgaaagtgccattgcaatcgtaagtagactatgtatttcctataatgatgtctgatatttaaataggaaatcagacaaacaatattcagaaagtttaagcatataaactttttatttttaacttgcctagatccctgtattccaaaacctgctgcatcataataaatatatctatatatatttagcataagacgtgatatttttaatttcttttttaaaaaattatatttgtctcttagagttaaaattttctttatataatattgtcatatgtcatagttttaatacaattcacatgatttctatgtttcttaatgatattttgttgtgtaaaattgatcggattgattaaaaaacaaattctctggaatttgtgcgttcatgctttttcgtattctttatggcttttaaataaatatacaatggttaatagt

SEQ ID NO: 23297 - DNA, 34402 bp, Homo Sapiens
  misc_feature (1959)..(1959): n is a, c, g, or t
ggaaacatgactcgcgatttcaaacctggagacctcatcttcgccaagatgaaaggttatccccattggccagctcgagtaagtgatttgtagccctcgcgcttagcagtgctaccctcctctccagaggcctgctgcccaccgtgtctctttaaaaaaacttctgtcctttctctccctcgctttagtctcatttgtaacctgacctttcattttagttttttgcccaataatctcccgtgtaattatgaaaatccagacgtttctacatacctgtgtatttccctatggtttattggcagacttggacagattttcttcctaggaaatatttaaatgcgttgctagttaatattccattgtaggtgaaataatgaagagtgaatttttgtttaaaaattagtgaaacattgacatttccatagttttggatcaagtcaaaatatcaatggaatttgtgcagattacacacaaacacttggatgtcagagaagtgcgtatgtgattaaattggatttacagggtttttaaaaaaaaatccttgtacttgatgaggccttctggatttgcttgcttaatacagattcaggactggatattcttgaaagtattacagtagtttagtaccgaggaagggccagaaaattcatttctccttttttatttgagatgtttatgaccttgaagaagttgttttacctttttgtttccaataggcaaaaaggaggtgtggaccagattcctcagttcacatctagtggtacagagaaatgattaaggacccaggatgttttgtgacattgaggaattgagactgtttaaagatctacgctccatttttagaaaaagggttctttttgtttatggtggtcccaggctctcaaacagagatagataggacctaagatatgttgcaatcaattagattaggtaaactcaagatcctttaaaaatatacttacatggggttctgaagttttaaaaaaccaagccatttattttcgactaatttactgcctttgaaaatgtatttcttaaaaataattaaattctgtagttttagttatgtcagcaggggaatggtggaaaacacccattagataaacggagtcctgtctaggagctgagagtgccatccaagtgtaaaacgatcactgttccttgactttcttccatctagctgctctacgtaaactcctgttcacaagtttccttccaaagcttttttttccttgcctataaagtctgccttttcggtgcagtcttacttgaacaatccttagtcataatccttgtctgtatattttacattctaatctattcctttcgagataatcttttgttttaattcttaactctgtgtatgctttgacctccaaatatattgtgagaccgagggcaacaaccttaaatggaatttgtttataccctccatagtccgtagtatatatgatgcacctataaaacacaattcacgttcaaatggagcctagggaaactgatcaggtttaaggcccctctgatatactttttcatggtcttcgaggtatccttgtttattttgaggtgtttgaaaatatgaggttgtctaatagatctatattccgatttgcatgccacagtgaagttaaaagccaaaggaaatgtttaaaaaatctcccaaatcaccctccccacgctcatatgttaagtgactaagagtgctactgaaaataaaatagggtagcctttggaagaccagagtgttttccttatttaacaagttctacatttaacaagttcatttggattggaagggaagtgtttgtcttttcccttttccccatcattttttctgagaaacacctccatttagtgttggtgtattctgtgtccaacagtaacattcctttttctgtcttcttcattcttaaaaatttgaaatcttgctggtagagtttagagtccatatttaaagtntgagccgtaaaggtgacacctcttgttgcaatttttgctttaacatttctgtctacatgtcccaaacttcattaatttttaagtcttaaacattcatgtacataatcgtttaccagtaataattatttaaaaaatcaacttaaattttcccggcatttgctaaaggctataggtgctaggtatttgcataaactctttaagctgtttgctagcagaaagaggcatatgaactgggttaacagaaatcatctcttaagggattaaggatttttgcaattatcgggacattcccacaaagttgagataacaggtgtgatcttcatcatataagtggggaaataggtccctagagatattgggtggtaatgattctgttggtgtgtgaaagcctttagacttccctcacaaatcagttcagtcatcctgatggtcttcttctgcaacaccataatgcttacagaggatagtaggtcctctgatggtcaacccccttcttaacaaagtcagctgattttcaaattgaagtgtttttgaaattatgaaaattatgacatttaaaatagatatgttgttaaattctttttttttgttttttttaaagacaggatctcactctgtcacccaggcttgagtgcagtggcatgatctcggctcactgcaacctctgttgcccaggttcaagtgattcgcctctggagtggctgagattacaggcacctgacaccgtgccctgctaatttttgtatttttagtagagaccgggtttcaccatattggtcaggctggtcttgaactcctgacctcatgatccatccaccttgccctcccagagtgctgggattacaggtgtgagccaccgcgcctggccgacatgttgttaaattctagctagatagtactgctttagtcctgaggtctgcttttccttttattgatgagggaaagtaagaagtattatggatatattagacgtgacagcacctgatgatttcttccttacataatttaaaaggttgaaagagcagtgaaaaaggaacaggtagcctcatgtgattcaggcacatcagtgaaggatcttttcatagtaagtttttcagactttgggaggtactgatttaaacttttacattagtctgttatttgtatagatttcctgcagaactaacatttagggttgtcaaataggttcagactccttacctgaaatgatatgattaacaattcagaattctgggattttaggaaggcagggagagtacatatgccatatattttgctgctggtgcggtctggaatagcacataataatatgtctgcaaagaaacaacagtggaaacaggtggataaaagaaatgactgataccctcaatgtcagtccaggttttgccaccaaatgagttttgacagaaattttggttttcagagcttcttgggtttcagatttggggataggagattatgggcctgcagaactggcccattttataacagaacccttttggatgttgtgctcttgtttattcaaataaatgttgaggtgtgtatgatttaaaatattttaatttttctcacttttcttttaggtagacgaagttcctgatggagctgtaaagccacccacaaacaaactacccattttcttttttggaactcatgagacgtaagtcctgttagctttaaaggcaaatcagagctaatttaacagggttattaggcagtagacattaattcaagggggaaatcgtaacgtaataggaaactttaaaatctttgaactttggaaagagtctttaagtctctatttttaaggtagcgtttacagatgctataggtttattttttactggaattgatatttccttaaccaaaaaggaaagtagaaattctctgagcaataagaatgattgatggatgaaaatacataaggaaagttttaataagtgatctgatattcctatacagtaaaataagtgctttttataaggactagttggtacctaatttttggttttatgatatcagatatgcaaactgtgtatattgtggagaaggtgagaagaggaagtctagctagttccctccatgtgtttatatggtccctgaagctctgctgcctctggtgggtatgtgggcagagaactgatgtgaagcaaatttttcaaaaattgcagctgaatgttgacgtatgttactgccaagtgcatgggatcactcaggaggctaccgttaatttcccgaagaatgttcctatgtacctataatttaatggccttagaaatactatataatctggttgattttggacttgaagtttggtgtctgtcataattttggtagtcttgtttacctgggatgaggagaaacaaaactattgctattctgattagaattatgtattcctaagagtggctgcaatggcaatatttggtttaaagttgcttagctactgtataaactttcacacaatgtctttaatagctctattgagatggaatttacatacaaagaagttcacctgcttaaagtgattttcaatagattttagtatatttagtagattttagtatattgactatcataaccttttgatgatcactttcccctctccaaccgtaaacaaccactagtctactgtctgtatagacttaccagttctggacattttatttgaatggtgtcatacaatatttcataacaagtttttaaaaaaatacaactttggatccagaattggtttggccttcatcataattagagttaggttcaagtgtattctatatataacaatataatttttaagaagtgataagtttctgattccatgggatactttaaagaaactcttcagtaaatttaatagaggacaaaagtatcttttaatggaaaatggtgcagtgtatattagagtagggcttttcaaagtgtgttgtcaggtctagcaccattagcatctcttgcgaactttaattaaaatgtaagttcttggctgggtgtggtggctgacacctgtaatcccaacactttgggaggccaaggcgggagggtcacttgagttcaggagttggagaccagcctgcaacatggtgaaactgtgtctctacaaaaaatacaaaaattagccgtttgtggtggcacacacatgtggtcccagctactccagaggctgaggtggaaccgtcacctgagccggggaggcaaaggttgcagtgagccaagatctcaccactgcagacctcatctcaaaaaaaaaaaaaaaaaaaaagttcttaggccttattctagacctactgaataaagctgtgagtgtggagccaaagacctgttttaacaagccttccagatgattctgatttacgttgaagtttggaaatactgtagtaatgtgagtggacattccttagcatttttcagttttataagcttaaaagtctttaattctgatttttgtctgaaatggaacaggttttttcttttttttttttttgagaccgagtctagctctgttgcccaggctggagtgcagtggcatgatctccgctcactgcatgctccgcctcctgggttcacgccattctcctgcctcagcttcccgagtagctgggactacaggtgcctgccaccacgccagggctaattttttgtatttttagtagagatggggtttcaccgtgttagccaggatggtctcgatctcctgacttcgtgatttgcccacctcggcctcctaaagtgctggaatggaaccgattttatacttctatatatcctgatagtcttacagaatacacagtccattcttacgttactattttaaatttagaagaggaatgattatcccttctcctgcatttaaaaggattttcatattataaatatatgtacactttaaaccaaaacaaactaaactaaataactaaactgttgtttggttaataggtaattagatagttaatgaagacagtgaattactaatattcaagaatttaggatatattcaaggaattctaataatccccaggtgttaagggcggaaccaggtggaggtaattgaatgatggaggtggtttcccccatgttgttcttgtgatagtgagtttcatgagacctgatggtttcataagcgtctggcattttccctgcttgcatgcattctctcctgtggccctgtgaagaggtgccttctgccatgattgtaagtttcttggggcctccccagccgtgtggaactgtgagtcaattaaacttcttttctttataaattacccagtctctggtatttcttcatagcagcgtgagaatggactaacacacctatagtggttcaacttagattttttgactttagagtgggtttttcatggttacttaaatggatttctgacttcagatattttagatttacagtggacttattgggacataacctcctagtaaattaagaactatctgtgtatatatgtacacacatatgcaaacagttgaggctcgttatttgtggattccatatttgcgaatgtacctactcaccaaaattatttgtaagcccagatcagtagtacttgttgtacaggtcattcacaaacatgcactgagtagtggaaagacttgagtctcctgatacaacacattcttagctgaggttgtacaagggaatgcttgccttcttttttcagcactcatactgtaagcaagtatcttttttgcagtctgtttattgccatgcatttttttgcttttgttggtcattttgctatttaaactagctcccaagcataatgctaaagtgttctttcatgttgctaagtgcgagaaggttataatgtgctttacagagaaagcgcatgttacatacgctgttggctatgagttcagtgttaatgagttagcagtctgtattaaataaggtgtctttaaacagaaacacacataaaatgaatttatgtattgattggttcatgaaaaccttgtgattacaggaacctaaccctgtatttcccctaggagcaatggttgtgtatttgctaattcagttttcacagtgactttatagaacattactaccacagatagcaaaaattgatagtacatatatgaatgaatgggttataatatgtctgattccctcattcagtaaaataaaattcttaacatactcactgattattttaaaaacacgatagttttgtgagttgtataatatacgaagttattttgaagtgaaactatatttggggtgcagttaaatgtgttgattaatgctaatgtgtcaaagtttgtagtttaaaaaaacccaaatttattgaattaaccttttttttttttttttttttttgagacagagtctcactctgtcacccaggctggagtgcagtggcgtgatcacagctcactgcaacctccgcctcccgggttcaagcgattctcctgcctcatcctctcaagtagctgggactacaggtgcacgccaccacgcccggctaatttttgtatttttagtagagatggggtttcaccatgttggccaggctggtctcaaactcctgacctcaagtgatccacccgcctcagcttcccaaagtggtgagattacaggcgtaaggcaccacgcatggcgatgtaaccatttttaagtgtatagttcagcagtgttaagtacattcacattgtgcaacgtctgtggttttacttaataggattatggatttaaatagtagcttgttactgaatttaataaaagtatttggaattattaattgccctttaacttatttaagatttgtaatgcagtttaggttctgtatttttgataattgtgtaatagggtgtcttatctaataaattatgtatttgagcttgctttgcactcacatcttccccacttcttttttagtgcttttttaggaccaaaggatatatttccttactcagaaaataaggaaaagtatggcaaaccaaataaaagaaaaggttttaatgaaggtttatgggagatagataacaatccaaaagtgaaattttcaagtcaacaggtaagtcatattacataaaatttgatattacttatttaatcctggggaataatcactatcctagctgtaggaaagtaaatactaaaagccttgggaatttcatactagtttgttgtgttcttatttgtgaggttgaaccttgggcattttatatcaaaatgaattgacaaaatcattattttatgtagttaaacagatctcaagaaactgggaactattcagttatttaactcctgatagagggtttaatacgtcattgaatataaagctgtatgtactgttctaaatttaggttttgcgacttacatggtgtatgcctaagttttcttattctctttaattaattaattaaatttctttttttttttttttttttgaggtgtagtttcgctcttgttgcccaggctggagtgcaatggtgcaatcttggctcactgcaacttatgcctcccgggttcaagtgattgtcctgcctcagcctcccaagtagctgggttacaggtgcccgccaccacgcctggctaactttttgtatttttactagagacagggttttgtcatgttggccagactgatctcaaactcctgacttcaggtgatccacccacctcagcctcccaaaatgctgggattacagatgagagccattgcgcgcagcctttaatttctaaatccatagaattgtattggaatatgaacctcatgagttaaattggtatgtgacaaatgtacttacagcactatgcaaattatatttattggtgtcagcagccaccttataccttcttttctgtggtttttcccatgggtccagagcttttattaatttatatgtgatagtaaattttcatggagtggtttgcctttatccaatttgtattgtttttatcctacagaaaacactggttctcttacttctcctttgtgttggtattgatgtgatttagaaaaaatttattttttttgagaggagtctcgctctgtcgcccaggctggggtgcattggctctatcttggctcactgtaagctccgcctcctgggttcacaccattctcctgcctcagccttccgagtagctgggactacaggtgcccgccaccacacccggctaattttttgtatttttagtagagacggggtttcaccgtgttagccaggatggtcttgatctcctgaccttgtgatccgcccgcctcggccccccagagtgttgggattacaggcctgagccactgtgtccagcctaattttttgtatttttagtagagacggggtttcaccttgttagccaggatggtctcaatcttctgaccttgtgatctgcccacctcggcttcccaaagtgctgagattataggcttagaaaaattttttatattgtcgattgcactcttgaattgttgcatatattcccaaatgaatgttccagaactcttacgatttaaaataaacagatggctttataataggatcagagggctatgagaggtctttatgaagataattgggacagtttctctttcatcaataaacgtcctctgtttaagacctgaggtccaaaaactaggaagagcacgagtaaatctaaagaagcgaggtagcaacaaagtggaaattctgcagctttttactctttttgttgttgttgttgttgagatggagtctcactctgtcaccccggctggagtgcagtggcgtgatctcggctcactgaagcctctgccccccaggtcaagcaattctcctgcctcagcctcctgagtagctgggattacgtgtgcgctttgccaccgtgcctgggtaatttttgtatttttagtagagatggggtttcaccatcttggccaggccagtcttgaactcctgacctcgtgatccacccacctcagcctcccaaagtgctgggattacaggcataagtcactgtgcccggcctagctttttactcttaaaccgataaattttatttcttcacatgtgccatgctttaccttggagaactttttagatactgttctatctggaacatataaatctttcattgctgctccaaggccacattaaatgattagtgactttattacttcccagtacttacttgttaatggattcatcgaaccatatcataattgtttctgtacttgtctgtacctgctacagaatattatgttgcctctgtgaacaaaggtttatgtcctgtgtgcccagcatgtacacgtgtgagaagaatagctaatcactaaatatttgttgaatggctacatggtttcttatcattattgccttgactgtgtgatgggaagacatctgtctaaagagacagaattgattgttatctgaaacttaacgtcttgtaatttcttttttgttgttgtttttttggagacagcatcttgctctgtcgcccaggttggagtgcagtggtgcaattttgatcttgtctcgctgcaacctctgcctcctgggttttaagttatactcgtgcctcagcctcccgagtagctgggattacaggcgcgtgccaccatgcctggctaatttttgtatttttggtagagatggggtttcaccatattagccaggctggtcttgaacgcccgacttcaagtgatctgcctgcctcagcctcccaaagtgctgggattacaggtgtgagccacagtgcccaactacgttttgtaatttctcttggatcatttgtcctgtgattgcacctttatggtcttttttatcctccaaattgccaagccttgtcaccatataatcttggagttttttttaatttttattatttgagactgcgttgcccaggctggggtacagtggtgcaatcatggttcactacagcctcgacctcctgggctcaggctgaggagggaggatgccttgagcccaggaattgaggcttcagtgaaccataattgcgccactgcctccagcctgggtgatagagtgagaccctgtctctaaaaaaaaaataaaaataaagaattgtatatattattgggataaaaacttattttatgaaattaatagagttgattgctcacaggcagcaactaaacaatcaaatgcatcatctgatgttgaagttgaagaaaaggaaactagcgtttcaaaggaagataccgaccatgaagaaaaagccagcaatgaggtatgttctatttctcctaacattttaaacccattttgtttcaaggaagaaataatgaaatgagttggccatgattaattagtaagtaatttttaaagtacttgaaaagtgaattagaaaatatttaaggcttatttccttgtgtaaatattaaatacagtattgtcaaacaacttatgcatctttaagatgcatacctgttattatttgaagttatttttatatgtaaaacatgaagtccaactgtagggtgcggtagtgttaaggattttttttaaagagaagtgttgtaggatggatgtactggaaacagcattagactaaattttttaaaacctaggttgatgtccaactgtatatgatctgtgtgtaaagatgactcatttagcccttccaggcctaatgaaatggttgttagatgatcttcaatgtcccagccaccctttaaaattcacaattcaaatttatccacccctataattcagaattctagtgtagaaaaagtagttttataaatttaaatagacagacttcctggtgtaccagcaaccatgacttacatttgatctgacagtggaaatgcatttttctcactttataatgttgagacacaatgtttttaatttcagaactctacagagcaaaacagatttccccaatgctttcagttaaacgtgcttgtaacttttagtttaacaaggtttctttcattcctggaataatttattcagtattcagttttcttttttcttttttaggatgtgactaaagcagttgacataactactccaaaagctgccagaagggggagaaagagaaaggtaatttcactgacttaccaaccatggggatctgaaaagaatttttattttaattgggttgagggagagtagatacaatgaaaccttaaatttcagcttttattctaaaccctttaattttttatgggttatgttttacttggcaaaactatctgtgtttctttcttagtgatatagcacccttaaagtaacttgagtggtaaaggaaataaaatacaccagttttcattcattttaatgactgtgcctcagttttctctaaattgggtagaaatatatactccaaggttgtggaggattaaatgatttaacatatgtgaaatgtttatgctaaatcctgatacctaaacactagtaagtgttatataagtgttgtccattatgttgttgttgttgttacttcacgttgtgagaaatgagtgtgagtgacagtgcaaggttaggtacatagtaggcttttaattaatatgaaattttccttccatatacgaagttttgttcacacccttttctgacctatttatgtctcaaattattatcatataccaaagatgcaaagaaaaccaaaagttcagtatctcatgaggaggtaaactatgaaaataaataattacagtggcttatttgttgtgcagtatgggttggaagtggtgtgataacaagattttaaaatacaggcagaattttgtcaggcggatgaaggagcagggaaggacacatgaagccatttcacatagaggaaattcctactcaagcatcttgagtattgtatttcattattaacacaccataaagtctgagggaaatgggtaccaaaaaaacctgatgttgtcctaaagaccttggaacttacagaagtgatgggaaatgattgaattattttaaattttagatacctccttttaaaaaatttttttaagagatggggtctcatgctgtcacataggctagagtagtgcagtggcacaatcatgcctcactgcaacctgaaacttgtgggctcaagggattttcccatcttaccctccctaatagctgggactgtagaagtgtgccaccatacccggctaatttttttttttttttttttttgagacggatctcgctctgtcatccaggttggtgtgaagtggtgcgatcttggctcactgcaacctccacctcccgaattcatccaggttggtgtgaagtggtgtgtttttagttaagatcaaggaagctggtagagctagaaaggggtaaaaaatgaagagaaaatgagggttagatgtctcagagcaagtaaaatatggaataaataaatctgtagtcagtagtttaagatattagcatttaagatgtttaaatatttaagcatatcctaagagtggaaaagttttaaatatatatgtttcgtataacttcattggtcctttctttagataaaatatttattattctttgattttattttcatgaggaatggttctgacttgcatgattttgccataatagtcatgaacacacgtgcatggtagggctgatctcttagtattagtgttaatatagttttaattattattgatgaacttgttacacttattggtacctccttaaaaaccatctcttttacctataattctttggtttttttgagacggagtcttgctctgttgcccaggctggagtgtggtagcaggatgtcagctcactgcaatctctgcctcctgggttcaagtgattctcctgccttagcctcttgagtggctgggattacaggtgcctgacttatttttgtatttttaatagagatggggtttcaccatgttggccaggctggtctcgaactcctgacctcgtgatctgctagccccagcctcccaaagcgctgagtgggaattacaggcatgggccactgcacccaaccctacctataattcttattcagtgttttgatttatttccaaaagcagaaagtgtaagtggagagagtcttctttgcaccaaagaattgaccagttataactgaattttagacaaattatgccctcttaactcctcagtaggaaaagagctctcagtcttgagttcttaagctttgttacctggggagctttataaaaacacagaatcctggttccctgactcagagctattgaatcaggattggggcagggcaactttgtaagttcttaaaattctagaaataaaacctgagctaataatgttcagggaggaattttcagtgttctctgagaacaactcaagggttaccttagatgagttttaataatacttttaatatgcttcattatgtttcagttatttaaagaaatgtttaaaaaactaataaagaaatggatacattcgtagaagtggaattgccatataaaggttttttgttttgttttgtttttttgagacagtcttgctctgtcgcccaggctggaatgcagtggcatgaatttcagttcactgcaacctctgccccctgagttccagcaattctcctgcctcagtttcctatgtagctgggattataggtgtgcgccacaagcctggctaatcttttgtttttagtagagaaagggtttcatcgtgttggccaggctggtcatgaacttctaacctcaagtgatccactcaccttggcctcccaaaatgctgggattacaggcgtgagccactgtgtccagccctatatagagatttgcacattctatattgccaatactcattcataattatgtgctttcataaagtatcagtttattgataccagcttattgatcattggtagtcaatgtatgaatgattctccacatgcttatcaacactgggcattatgtttacaaatcattgatgaaaaggcaatttttaatttttttaatcaatgagattggattatgcatgtttttgaatgccttcttgtttttatctttagtgatacagttaatgctgaattctaaatagttgggggagttggggaaggagcccatctcctcctttggtctttctctttcctccttttgcagttatgatcagtaccaactgctgcctcatgtttacattttgtttctaatttgtgttcttaacctttgttccattctaatgcttaaatcaataatactgattctcatttggggccattctctccaggagaatcatactagcagttatcaaagggcattagagtttgcaaatggtcagtggattccttactctctgttgtagtaaatcctttcttacgggaaataagaataactcctaaaggagaactgttaggtaacagtctcagtttagaaataaaatgtgtctgtatgaacgaagaattagaaataacattgtgttagttgcagtgtaatcacatactttgttctccataccgcatcaagaatattagctttatttttacaaatgacttcatttctaagaaatttttagttttttttaagagttgttcactagagttataaactaagtttgaagatgttactcttgagttgattgttgaaaaaacaaaagatcatatagaggttatatctatacttgaactcaacgttaccatagactggcatatttttgccatcgaattaaactttgagtgcctactatttgctaaataagttaattaaatttttgtaattcaggcagaaaaacaagtagaaactgaggaggcaggagtagtgacaacagcaacagcatctgttaatctaaaagtgagtcctaaaagaggacgacctgcaggtaggattactgatgtttaaatatctgtttggcttgtgattaatattccagtccatttaaagtgttgctgcctcaaatattttggaatgaagcaaataggcaattgattatgtgtaacatacagatttcaaaggagataaacatgatttgtgctctgtttcaaagtatttaaatttgaaataaactttgctttatctctgttatgttttccctaaatagtggtaagagaggctgtggggaggttaaaattatcatgaataatgggtttattttacctttcacttaagagtcgtaagatttcaaaatggagttataatcagagaatgagaaatagcatttgattaaagtcattaatattttaaatttgtgcgttctttattgatagggattttgatttttacagtttgcagctctcttcagcattgcctatttaaaagtattttcttaatttggcaaattggaaatattttggaaaaatcttcgtaaaacaaaaccaaaattgagtgaattttttttctactttttaataggattcttactgaaaatggggggtaagatgagtaatacccagaaaagaaaaaagatttttatttatatattttggagtttaatattgcagtggataaaattaatagtgctagggaaactcagtgaattttgatatgaacttccaaagatatgtaactgcataagtaatataatatgtatatgaatattaaatataagtgctgtttcctattctaaaagttgaattttgtgacattactgttaaaacgatagtgaaaaatgttttaagccctctcagtcataattaggacaaattgaggattactctgtttacctctttataaattttttgttgttgctcattttaaccatggtgggggaggtattattttttcaatttagcaataattgtatctgtaataagctactaatattcttaaatagtatgtatcatttctaatatttatatctgagatttgtatcttaaatagaaactagtagttactgattttttttccatgtgtatattagctacagaagtcaagattccaaaaccaagaggcagacccaaaatggtaaaacagccctgtccttcagagagtgacatgtgagtttatttttaatgtataattatgcaataaatgagacatttgactttaaacaagcacatatctctgcgattttatcagttttctcttacaggatgtttgttattattttgatctttcttaaaattacaggaaaaactgggaaaattttgtaaagtaaaaattggtaaggaatggctatttatcatttcattaattaagactcttgggtatatcaatttatatagatacttagataatacaacataaaatatataatagagaaattgggcaagatggtatgtttcaggaattttagaatatatttgaagtaatgtcacaaatttttttttttttttttttttttttaaagatggggtttcactctgtcgcccaggctggagtgcagtgctgcaatcgcacagtgtaacctcaaactcctgggctcaaggagcctcttcccactttagcctcccaagtagctgggaccacaggtgtgtgccaccacacctggctaactttttttgatgagactggtctcatcgttcccaggctggtctcaaactcctgggctcaaacgattctcccacctcatccttccatagtgctggaattataggggtgagccacgtgcctagcctacaaatcttttttttatctcctctagaataggtgctttatttaaaaatagggctaaaataatttttgtatgtaaatttaatttttaaagcatttcagaataactattcagttatccaggaaattgtgcgtgttttttggttttttgcatttttcccttgctgccttttctacttggatcctttttactttggcttttttggggaatctttgccagaaggaatagagagtatatttagacaaagggggagaaaaactttttgtggctattgtgtttgaagatttgaaaggcttaagtggggtatgtctattaagcatagatttacattgttttgaatgaactgattatagaaaattctaattgtagaacactattagagaattggtatgtttcaaccaaaatatgtttaaagagtttcactgccagtctgtatttactttcaaaaatagtggcacataacaatatatcatatacttgaaaattactaagagagtagactttaagggttctcaccacaaaataaaaatatgtatgtgaggtggtatggtaaatagcttgatttagccattccacagtgtatacgtacatcaaaacattgtgttgcacaccataaacacatagaatttttacctgtcaatttttaaaaatagtggcagaaaaatacaacatactttaactattatagtgaaattaagaaattggatacttaacaggtgagttggcagtcattattccctaggaaatctgaaattctgctgggaaaatactgtgagatccctctgttttggatataattagtgttccctaattaggtcccagttttcccccggagtatgcttcccactccgtttgtcttcttggcttttggctgattcctctggaacttctctactttttcagtatcatcctttgttgcatctgaaaaggtcattggaaaatactgccctcctcatcagctgagcagctttctcagcctactttcggaccatagtgatctgagggcccagtgtacctttttaggaacttatcctcatctcacttactttcttttgatggagtctggtgtcacttttggtaatgtaatacttttgtatgtgtgtttaattctggtcagcttcctatgcaattattgttaagacttttctcagacatgctcgtctttttatatttaataacagatactttgagtttataggtttttgtgagaaaccatccctcaggaatcatttgtccatctgaaggattaatgaagtccaattttaattcttaaggattgcagctataccctttattgggtctttgacccaggctatcacccaatttgaaagtcttacatcctcacttgaaaataggctaatcttttttgaacacatctttcttgaacactatcaaattcaccttgatagtcatttcacgctaccagtattctattttgaaacttcttcacccaaagccacaagttgattgaatatattttcttatttctgctgcggtccaacagttttacccattgtataataacgtattagggtttccagtctcccagccctaaagcaagtgactacatgttttaggtttttggtcctggtgtcagtttctctattagtgagctttttcctgaggcaatggacaaccctaaaatagcagtagcctttacaacgtttatttcttattcatgctgtgcgtaggctgagtgtgagctgtaactactcttggctgtgtatctgggcacacactcagtggagtgcagaactaaactgtataagctctttttaaacttctgctcttcaccgttagaacaccatgtatctcttagcgtctacttctttgtcacgggtactgatgtgacacaacagtagaatagagcccagaagagctaaaaaccaactcataatcctcagaaatgtttgttaaagcccactgaagctcttagggttgtgtttgcattagtctttgcttatattaacatatattaaaagattaagaaatttacaaatacaactttgctaatatcccttacctgctaaaaagggaagttgtcacaagtctgtatttcatggaagaaccactgggaaaagactcattggtagcaagcagtgatagtcatgtttatgtaaattgttttggcacaaagattatttcacaccttgaaataatcttttttatgaccttaggataaatttttaaaataaatccctaaagcactttttaaagaccagctgcatggtatcccactgtatgttttataattcttaagatctatcctatgtatggatagacgattttaaaaacattgtcatctattcttttgtacataatgcaaatatattggttaggatacattgttagaagcagatttgctgggtcaaatggtatttgtatttttaatagctatttccttccatagaggtgtaacattttgggagaagtagttggccagtattgtttaagagacacagaaatgtctttttaaatgggactctagtcccatttttaggaaactgattatcaaaatatttacatcagtggaaatcctgaagaaagcaaatagtttcacttgcatgcttttactttcatttattaaaagtaaaggatggttttaatcccagagaggctaaagttaaaaggataaaaaccataggaccattagaaaataagcatacccaatgataattatataataaaaagtttctaaaggggcaaaagtaaatttcttctcttccaacttaatagttcttaagtggtcagggaatcacttgtctggaaagaggttaatggatttggaattgagatgttgggcttgttatttgaccttttgcatcatcattttctcatttgtcaaatggaaggggttgaactgaatgataggaagtctcttcaagctctcaaattcattgatttaattgaataatttgcgaaaatctcaatgaaattctttggacagttaaaaggttacagtttttaaacggcttattccagcttcaaatgaagtatttatttgtaaaagaattgctttagaagaatatatatcaaccataaaagtaattacgtggttagtatttgcattatttgattctcctagagcctatttctgaagtaccaacttgcataaatatgcagcagtaattaggattattgagcagtttaggtagtttctcttgttttagtggtgtctgtgaaattcagtggtgatgggaatacttaggtgctagtcagcacagcactgtctgaaaacatgcttaattggctatatatttatcatatgcttaagttgggacctttttaccctgcaaagaatatttgagttctaaaacgaccgtatttgatttcacttccgcaattccatttgtcccagtgtgtctactttttaaacataatttattcttacaaatatgtagaatttaagttccataagagccagggatctgcccatcttctatcttctaatttataccaaaaggatgttctgtgacagaattccttttatgattggatagtgaagacactctttttactttgttttagatttgcctttaaattaaaaattatagcttactgatatctaaaatactattatagttgaatgacaagtatacattgttatgttctctaaaatagcattactgaagaggacaaaagtaagaaaaaggggcaagaggaaaaacaacctaaaaagcagcctaagaaggatgaagagggccagaaggaagaagataagccaagaaaagagccggataaaaaagaggggaagaaagaagttgaatcaaaaaggaaaaatttagctaaaacaggggttacttcaacctccgattctgaagaagaaggagatgatcaagaaggtgaaaaggtataaagtttacatatataaaatggctgttctattcttagtttatatatatattttttgttttttctttgttttttttttggtttttttttttggtttttttttgtttgagatggagtctcactgtgttgcttaggctggagtgcagtggcacaatcttggttcactgcaacctctgcctcctggattcaagtaattctccagccttagcctcctgagtagctggaagtacaggcatgtgccaccactaccggctaatttttgtatttttagtggagacaaggttttgcaatcttggtcaggctggtcttgaactcctgatctcaggtgaacctcccaccttggcctcccaaagtgccgggattacaggcaccacacctggccatttatgtatttcttaatctgcccagtttaagagcttttaatattttggaggaagtctataaatatcagtggcagttaaaatgaatttgtttacctttttgaatagacttgaattagctgtgttacaaagcatattgaaaacgtccctttattatctgttctctaaattcatctattttacaattatgatctggaaattaagtaaacagtacctttccaataaccccatctgtctagaaaaggtagatgaaataggctgtggccagtgaagacaaatgttaaaagaggtggatttatatagagatttttgttatttacccccaagaagttcttaacacccttcaggcctattgtcattttatcagtggtatgtaaatttatttggacgccatagttgttgggaacctcattaaagctgtgtatccttttgtgtagaaaaataaaattttgtgtatagccttagagatttacagattcaggtcatgcaaatcttttgtttactttcatctgatttttggctcatttcttaatcttttagaaaccaaacattttaaattggataggtcatgtagtgtgcttgtcagtactcaagtcaaatcactctgtagagaggcaaacagactgacatactatattttatccaaaggacatcactcctatagcagggcataaaacaagatgattatttcacggtcattaatcaaagttaaacttgcagagataggtgtaattcaaagactatttttaggttgctaatttgagtattcatcccttttttaaaaactagctgctgcttttcccccaagattataattccataagcactagtcactgactttatagttaaataaaaccatcctaattctcaaaacagaagagaaaaggtgggaggaactttcagactgctcacagaaggaatatgctgaaaggccaacatgagaaagaagcagcagatcgaaaacgcaagcaagaggaacaaatggaaactgagcagtaagtatttttttttttctaaattttgggttctttttaaaggctagcatggaatttttaaataatagactttcattttccagactttatgaagccttttgaagaagtgacttttcccatgtgttagaaaaatcttcaatatatgatgatgatcttatttcaggcttcattctcttctgagaggatgaaattgactgaggcagtcactctgtgaattacttttgaatttaaacgaagtgcagataggatttaattgatactggctttgcaagaagtgtactcatcctcaaccatttgtttgtataatataatacatatagatagaggggcgataatatactggtagacaaagaatgcaggaaatgcccttattcatcacaccaccaagcaggcctcaccctaaagaccagcaaaagtaacaaaagcacatttggaaacccaggaagccagtaaaagtaaatctaaaggctgacagggtgtacattattatatatgtgcaatataaatcaaattcaaagctgttttctcttaaattttgatacttatagagacaggacttgccatggggaatttgtttccccttactatataattttattactagaaggaaaagtaatagcaatgataataatgaacagacttcgtgtctttattacatttgctttcctagttacctttagactgtcacttctgagttctttctctgacatgcttttcttttctcgtgaagcgtcttacattctgactaaattttgtttttttgttgttgttttagtgaggtgatttttaaaacatgctctaggtcaataagacaaagttaatgatgagcagtaaaacaattcttgaataattttgtactttttttctttatataatatatccgtaagccaaagtctttcttgacaagtacagcgttttactctgctttcttagtttggaggatatacaagtagttttagctccttgagggagtaatttaaataacttatctaaagctcaaaaatattattccctctaatgttagactttaagcacttctgtaaatatttaagttattctttgtcacctatcattttctattctatcttttcactgaaaagctgttggactgtttgttgcttttgactttattgtgatctcaaaattaagatataaaattagttgttactagtatatgtagcccaacccttctttagtatcttaaagttatctttatgtatttcagtttcttttgaatgtcctccaatgtaactttctcaaattctaatatttgtgttttctttccttctcctgttattacaaaactttgtacttggacagttttgctctgtaaagcatttcagatgcagcttgtgtgaaatgcattatgcaaaataaagtttattgtattgtattcccagccaaacaacatgtaatctacagtaataaaaaatatatctcattttgggctcaaagcattaatccagttactgaaaagagaatacaagtggagcaaacaagagatgaagatcttgatacagactcattggactgaatttcccccttccccccattgatggaagaatgttccagattctaaattgaggacttcattattaatggcattactgtgttatgattaacaaatttcctgtaaggtacacactacatactaaggtcggccatcattcccggtttttttttttttttttttttttttaaccaagcttaaaatgaagctttgtgtttgaaagtaataacaagctcagacgaagatggtggttgtacattattcatctagaaaatataaaaattcattttgttttgaagctagttattaaactggaatagcagttatatccctgagaatggggcccttctcttgacattcctttgttgtttaattctttagaatcttaataaatgtttttttaatcctgagagattaaacagtagtagacttgttaagaatgaaactgtaaccaaaattttaaaataaagttttttttaaaaaaaaaacctgatttttagatattttttgttcttgtctatttgaattggttcataatatggcctgaactctaagccaaggtactagaaattaagatttcaattttaagtggttatttttgtgattgacaataaaatggtaccttttgtgaaatgttagtgaatgttactggacgtcattcaagtttgatgaattggccaaaattttaaaaacagtgttatcttaagtctatttaactttaaagctaacttcagaactcattaatctgcttgttacatgcacaatgattaaattggtctattttaagatgcagctttaaaaaagaatggatgtagaagccattaaacatttataggtgtcatcttcccattgtggcctgtttgtccagtgaccctgaaattgctcttctagcaacacactatttgtgatgtcactgaaaagccagatatgatttaatctagcatgttaattagagttttgcttatatttatgctacggaactgcaccattctaagagctacagtcagttcctttgcagtctaggctattgacttattttaaggaaaacatttttagcttttacatagggattgtgggcatttagtcacaaaattccaatgtgttgaaatatttttgttaacatttgataggcagaataaagatgaaggaaagaagccagaagttaagaaagtggagaagaagcgaggttagttatttcactttctaagatacataaaattatacatggaaaagaagttatatagacataacttttcatgtattggttttggaataattttatactcatatcctacaaatagaatttttcaaatccctaatgggctttatataaattgcattgtattttaagcataatcaagtgaacttgcttgagttgtttatgtttaatgctcattaattatttgatggtgtcaaattttagtacacttgctgaaagctggatgctttcccatttcagacaaatcccttggttaaacataaggaaaagcaggtgtttggggactggagagcagaggagttatcatatgcagactatttattttaggaaaaacgcagccaagtggtggttttgtgcttttacactgcatgttgcttttctcaaccactaaaaatggcaataagtacttattcttagttaagctattgtgcatatctttgagcttcttagtaaagattactaagaacatttttttttaagtccactaattcattatacttagcctgtatatagaaatactggttttggaaaaactgttcactgtttttcacatattttaatttgtagaaacatcaatggattctcgacttcaaaggatacatgctgagattaaaaattcactcaaaattgataatcttgtaagtgtttaacttcatttaatacttcagtactgcatttatagcttcatcttttattttctcacatgatcttatgagtatgtaaatttaagggataattactggtcattttgcactacctctttttttttggaaacgatctttagaaacagattgtttaagtgttaagataattaacagctatgaaattactgttttgtcatgaaggatgtgaacagatgcattgaggccttggatgaacttgcttcacttcaggtcacaatgcaacaagctcagaaacacacagagatgattactacactgaaaaaagtaagtgatttcaagtcatgtggattctttgaattttgtcattacttcatttaaaaattgtttaaaaaatcaattaggaaaacaattatgatgaatgtatattgttttctcagatacggcgattcaaagttagtcaggtaatcatggaaaagtctacaatgttgtataacaagtttaagaacatgttcttggttggtgaaggagattccgtgatcacccaagtgctgaataaatctcttgctgaacaaagacagcatgaggaagcgaataaaaccaaagatcaagggaagaaagggccaaacaaaaagctagagaaggaacaaacaggtatgtggtaaaaagccaacaatttcacaccagtttttaaaccatttgccaggactgcttttaaaaatggctttcatacatagtttcactgtgtatacgccacagaaaaagtatacaaaggcaaaatggtgaaaatctgatgggcctattgaaggactagagcagtgtgcattgagaacaaaaaatcatgtcagtttatattcgacttctaaggcagaaaccattgctcatgaggcagatgactctggataaacaatttttaaaaacccatccatcacaatgcctcctaatccctagagtacccacttcctggttgctcagctgcttctgttttcttctcacctaaaaagtaaaatagcgtacagtagccttttaaattaaaacacagcctcataggtggagactacacctgccattacttgatacaggtattctgatgatgctgctgagttatcctgaacagacttcacagtattaatgccatgtccttttttttttttttttttttaaagatggagtttcgctcttgttgtccaggctggagtgcagtggcgtgatctcggctcaccacaacctccaccttctgggttcaagcgattctcctgcctcaacctccagagtagctgggattacaggcatacgccaccacacctagctaattttgcatttttagtagggacggggtttctccatgttggtcaggctggtcttgaactcccgacctagggtaatccacctgccgtggcttcccaaagtgctgggattacaggcatgagccaccgcgcctggtgataaagtcttacaaagcacctagatgtgtagcatatatgtaaggcactgaaccttagcttctacttttttcactaactttagcagtagttaaatcctgctagtacttattactaacagtagttattttcttttcatttgtattaggaaaaatttataacgtatacaaatagaaataacttctcatgtccttgtcatccagctttggcagttcagtttatgatcattgtgcttttgtagcccataagctttctctatgcccctcttgaaagttgttttacgaaaaatccctgacataccatttcactcataaacatttcagaatgtatgaaagactcttaaaacagaatcatagtaccattatcagctcctccagtcttgttattaaacttcttagtggcagctgcttaaggtaaaagctggcatttcaaaagcagtcggttggttttttgtttttgttgctttattggggaatgacatgggtccccttagagaattattaatacgacttacaggaaaaccccctttattaggcacaaaaatatcaattaggaaatactcctttagcactttgttctaaaatagtaaattttaaaatttgattcacattgcttttccgtggtagaataaatgaatatgctaagaattacaacaccctgtagtcttcctggtaatagtaacaaccagaataatcagattaataatccacttcttgtactcatagatagttaacctgctttttatggtgccttagctacccaaagcctctgttggtcatctgctcccgtttttgacaaagcatcaaaacccaattctaacattcaagagagggctgtattacaatgtaatttcaaataaaagacattaagtagtagaaacacgatggccatgttgtattttgattctggatctttagtggacaccttcaattattgttttgtaagctttaacaaagtttttccattggattccttcgcaagggtcaaagactctaaatggaggatctgatgctcaagatggtaatcagccacaacataacggggagagcaatgaagacagcaaagacaaccatgaagccagcacgaagaaaaagtgaggaataggttttaatgggtcttgtgtgttttttattattcaggtttttaatcacagttctgttccaaggttatcttactataataagcagttatcttttgatcacccaattcctgaattcagtaagcaagttacaattcaaaaaggaagaagagtaaaaaccttttattgacagtgactttgccactgaattcaagggaatggaactagctgggaacccagttaaaaagaaaatatttgctcctggactacttttactgagatactgttagtaatgacttgcattcacactttcttgaattgtgaaaggataattgtaaaaagttagatggagaatcacagttttgttgttgttgttttttctttgagacagagtttcactcttgttgctcaggctggagtgcagtggcacgatcgtgctcactgcaacctccacttcctgggttcaagcgattctcctgcctcagcctcccaagtagctgggattacaggcacctgccaccacgcccatctaattttttgtatttttagtagagatgaggtttcaccatgttggccagcccggcctcgaactcctgacctcaggtgatccacccaccttggcttcccagtgttgggattacagctgtgagccaacatgcccggccatcacaggctattttttaatacccaccctaaaataggctatggagccatagttgaagtcttggtttgttccactgtgtatctgaaggagttagatagaagcatcccttctaattctgaaattgagggaaatcttgttgtctatgtgtgtatcaacctctctttttattaagattttgaaatatgttggtatcacagatataaaacattctcatgttctttaaagagaattcacttttatgctagaaatgatggaaagggcttggtccatgacactttgctgagttattttgcttcatctgcatattactttgggaagaagatacaacatggtaaaataacagttttgaagaagaaaaaaataataatgactgttctaataacaagtcaagtttttcttttgtttggttggtttcagtcttttcatgggtttaaaaatataatgcagacttaatgtctttttttccttcatcaggagaaaatcctaattccagttgtacctttcccccttttcttcaggccatccagtgaagagagagagactgaaatatctctgaaggattctacactagataactaggttgacatacctggaatatagagaacacttgagaagtttgtaatggttttcatttgaaatagactgctgaaagttttaaatttttataagcataggtttgatgttgaaaacttgttttgagggagaaaatccctttgttttaaagtaaagtaaacattatcgctaagtgtacttgtgcagtattaacagctacattatacagtaaatgtgggataaaatccatttagaaaatgttaaactgcttttccagacatggttgtagcatattttcaattagtgtgtgtatgttaatgtgtaattgatagtagaacaaagttacatttttaaaactgctacttgtataaaccttgcctcttttcccaaatactgtgggttttgtgcatagtttttacaaaccttggatttaccagactgtcttttcactgtttgtgggttttgtagaagttacacatttttatggtagataaaatgttacttctatacaagtactcactccctttttatcaaaagttaattttaatctcacagtctacattgtgctacattatccagcttctttggaacaatgtgtgctctgtatggttttttttggtatgacaactaattaagcaactgacattgaactgagaattctacaaactataaaacattaatttttgaaggtaatttagttttgtggctgggcattcagtgaagtcttaggacttctttgcagacaactgactgggtatatataggaatgaatctggctttagggttaaatcatttaaggtctttttataggcaggcactagtaactaaaactgaaaactaagtaagtttatttttgaggaatgttgttaaaaatgtctttaggaagtcactaaaacttaattggaagaaaaaatcatgatgcttatacaataaatatgaataaatgttatataaggaaactcacctatttgaaatcatggctatattgtttttattttctagattccaaaaatacaaacactagttgttccagcattgtactttgataagtctgtacattgacgtgtatggactaaatccagggtaaaatcaatgttacaaaatttaagggtatgttaactaaaggatagcatttctaagatattttgaatattagggtcatttggcacttctcagcaagtaggatacttctcatgttttgaaattatatgaatatggaaaaaaatggcttaagaccagcgtctctgtatgacattgtgtggttgaccctctgagataactgttttcatctacagaattgcatttttgcttttaaagaggtcttataatggaactaggaatcaccgttttgagagaacctgcatatataccagtcattatctgtttggtccttatacagttttaacttacttagatttattctagttaagccataagttcaacgtgtaaacttgttttcattaaagaatttttctatcaaactctgctagtaaattactttcttgctatttacaagagtaagtgatggaattctgggtttgctgccaaggaaataatttcttagttaactggtcacagaggttgtgctgttttgggaaacggggtaactaaacagtaagctcaagatgataaaaaataaatatttatcttttgttcaccctccctttcttcccatgacccaccagatctatagttttacaaagaagccacagaatattccaattctagagatagagcatcattctcataatttatgtcagcttgtacaggctgaccttgctctaactagttgatgtatgttcgcttcaagcataattgctgtttctttaatcataactctcaagaaatggtgtcataggctgatttacagataacttctcagaactcttgataattattcataagacttaagaactttcaggatcattgaaattgttcattggctcaatttgtgtgtgtggtcaaaactccacagcttgacaaggcaccaaaaggtaattttgagatagataacccccaccccatcccaccccaccccacccctccaaaaagtacgtgtaatatgtatgttttaacacctcttttgggctggtatgtgtgtgtatgtacgtatgtgttttgattactggataaaagagtcatacatcagccgggcgcagtggcacgtgcctgtaatcccagctcctcgggaggctgaggcaggagaattgcttgaacccgggaggcagaggttgcagtgagctgagattgccccactgcactccagcctgggagacagagcaagactccatctcaaaaaaaaaaaaaaaaaaaaaaaagagtcataccatgaccaagcagaactgaccattgaaggttttcttagctgcttggagaaattgcagatacatctatctgaatctgagaactgactgggatttggtatgtgaacaactggagagaaccatacactttataattaatattatatccagtgatttcaaataatatgatagattttgctgatacagtactgctgtctgtgttcctactcatacacttacctggttacagatgttaggtcaagatgaggtctgcatctaatcctgtataagagcagagatttttcatagggtgctgtgagggctttgctaactctattttgtccgattggccagaaaaaggatgctctaatggaaatagcaaacctgtatcattaaactctttagaaacaaagaaactggtttaataggcagaaatgtgtttatgtttgtgtcgtgtaattctgcaacacaatgttagagatgactgacctttctcctagtaaaactagaatgtctaattgtccttaaatggtactgatgcctgaagaatgtttaaagaaatagctattgcttctctagtaacttctgtgcatgtgtatccactattatataaaagtcaaattcaactaccaagcaggttgacatgttcatgacaacattttcagttgcctatcttcattagctaatgtgttacatgtaatttgacaggcgtgttacatttgattgaaataagcataaagaaaagctgcctcgaaaaaagagaaaagctgtcttaaatcaggggttttatagctccagaaatatacaaagttaggaatttcttttgacttgaacttggtgggatacctgtataactgatacataacacacgggcaaactgtgggagtaacctggttgattaacttttctcctcagtttcaccagggaacaataataggtacctgagtctttgatgaaaaacttaaccttaagaactagcaaaataacattctcaaataattaataaagaatcccagtagcagaaatgttttaactggcatgtttcttctttgtccgctaaaatgtattgacaccacacatggaataatgcattatgacaataattaactttttgaagtttggtgttttgagagtatgaaatgaatgaataagataaaatatccttgcatatgcatgtaagacctataaggaacgcagtattgaaaataaaggaatcaaaatttttacccatggaattttagggttgggtaaatcattcatttatcttaaatctatggtttgctggcagttatcaatctgctcaattttagcattgttgtatacaagaaagtaaaaatttaggtataacataagccagcctcttaagttctctatagtgattatctgtgtactgactgaatcagtgaatgagaacactagacataccagaaactcgtgcttgtcatctccaagccaatggacttaactgtttgtggcatttaagtccataaaacatacttcactgtcaaacacataggcttataggtttcgtcagttttccatgtgtaagataaatgtctgttcttagccatccagatattcagtcaaatttaaatacaacctaggagagagaaagtggaatttatttattttaaatgatgcatttgaaatctatagtattcctaaaagtcttctaaacagtattaaatgttctacccataaaggttcccagaaaatatttgagtaaatctatctgatggtctagacctgaaaataaataaagtttattttgctgggcgctgtggttcatgcctgtaatcgcagcactctgggaggccaaggcggatggatcacttgaggtcaggagttcgagactattctgcgcaacatagtgaaaccctgtatctacaagaaataaaaaaattagcccgccatggtggcctgtgccaccatgtctcagctactcggtaggctgaggtgggaggatcacctgagcctagggaggtcagggctccagtgagccaagatcacgccactgtactccagcctgggtgacacagtaagaccctatgtcaaaaaataagtttaaaaagttttggtttttttttttttcctcagaataagatgagagtaactagaattactatagtaaggggaccagaagaatggaagacctgggccaggaaaacttattttttttctttttgcttatataattttggtatatatccaatagtatcattaccggagaataagtgagccagagctagcaatcaataggatcttgatttttccatgtccccacagtcatacgaaatctgctattgttttttaaatcatagtattaaattgacatattttaaactcataacattcataaagct

SEQ ID NO: 23298 - DNA, 3319 bp, Homo Sapiens
taagcttgcggccgactttttttttttctttcccctccccctccctctccaagccggaggggtcctgaggtgacagcgcctgcaactgaaatttcagcagcgggagaagatggacaagagaaagctcgggcgacggccatcttcatccgataagaaagatgttaaatgcaaaaccagaggatgtccatgttcaatcaccactgtccaaattcagaagctcagaacgctggactctccctttgcagtgggaaagaagcctaaggaataaagtcatctctctagaccataaaaataaaaaacatatccgagggtgtcctgttacttccaagtcatcaccagaaaggcaactcaaagttatgttgacgaatgtcctatggacggatttaggacgaaaattcagaaagaccctacctagaaacgatgctaatttatgtgatgccaacaaggtgcaatcagactcattgccttcgacatctgttgacagcctagagacatgtcaaaaattagaacctcttcgccaaagccttaatttatctgaaaggatacccagagttatattgacgaatgtcctgggaacggagttaggaagaaaatacataaggaccccacctgtaactgagggaagtttgagtgatacagacaacttgcaatcagagcaactttcttcatcatctgatggcagcctagaatcttatcaaaatctaaaccctcacaagagctgttatttatctgaaaggggctcacaacgaagtaagacagtagatgacaattctgcaaagcagactgcgcacaataaagaaaaacgaagaaaggatgatggcatttctcttttaatatctgatactcagcctgaagaccttaacagtggaagtagaggttgtgatcatctcgaacaggaaagcagaaacaaggatgttaaatattctgattcaaaagtggaactcactctgatttccaggaagacaaagagaaggcttagaaataatttacctgattctcaatattgtacttctttggataagtcaacagaacagacaaaaaaacaagaagatgactcaacaatatccactgagtttgaaaagccaagtgaaaactatcatcaggatccaaaactgcctgaagaaattacaactaaacctacaaaaagtgattttactaaactatcctcacttaacagtcaggagttgactttgagtaatgccaccaaaagtgcctctgccggttcaaccactgaaactgttgagaactctaattccattgatattgtggggatttcttccctggttgagaaggatgagaatgagttgaataccatagaaaagcctattctaagaggacataatgaagggaaccaatcactgatctcagctgaaccaattgttgtttccagtgatgaagaaggacctgttgaacataaaagttcagaaattcttaagttacaatctaagcaagaccgtgagacaactaatgaaaatgagagtacttctgaatcagcattgttagaactaccattgattacatgtgaatctgtacagatgtcatctgagttatgcccatataatcctgtcatggagaacatttccagtattatgcctagtaatgagatggatctacaactggattttatatttacttctgtttatattggtaaaataaaaggagcttctaaaggttgtgttacaatcacaaaaaaatatattaagatcccatttcaagtgtccctgaatgagatttcattgctagtggataccacacatttaaagcggtttgggttatggaaaagtaaggatgataatcacagtaaaaggagtcatgctattcttttcttctgggtctcttcagattatcttcaagagattcagacccaattagaacactctgtattaagccagcaatcaaaatctagtgaattcattttccttgaactacacaatcctgtttcacaaagagaagaattgaagctgaaagatattatgacggaaataagtataatcagtggagaattagagctttcttacccgttgtcttgggttcaggcatttcctttgtttcagaacctctcttcaaaagaaagttcttttattcattattactgtgtttcaacttgttctttccctgctggtgttgctgttgctgaagaaatgaagctgaaatcagtatctcagccctcaaacacagatgcggccaagcctacttacaccttcctgcagaagcaaagtagcggttgctactccctttctattacatctaatccagatgaagaatggcgagaagtcaggcacactggacttgttcagaagttgattgtatatcctccaccacctactaaggggggattaggagtaactaatgaagatctggagtgtttagaagaaggagagtttcttaatgatgtaatcattgatttttaccataagtatcttatattggagaaggcatcagatgaacttgttgaacgaagtcacatttttagtagctttttctataaatgcttgacaagaaaggaaaataatttaacagaagataatccaaatctttcaatggcacagagaagacataaaagagtaagaacatggactcgtcacataaacatttttaataaagattacatctttgtacctgtaaatgagtcgtctcactggtatctcgcagtcatttgttttccatggttagaagaagctgtgtatgaagattttccacaaactgtatcccagcagtcccaggctcagcagtcccaaaatgacaacaaaacaatagataatgatctacgtactacttcgacactgtctttgagtgcagaggattcccaaagtaccgagtcgaatatgtcagtaccaaagaaaatgtgtaaaaggccatgtattcttatactagactccttgaaagctgcttctgtacaaaacacagttcagaatttacgagagtatttagaggtagagtgggaagttaaactaaaaactcatcgtcaattcagcaaaacaaacatggtggatctatgccctaaagttcctaaacaggacaatagcagtgattgtggagtatatttattgcagtatgtggaaagcttcttcaagaatcctattgttaactttgaacttccaattcatttggagaagtggtttcctcgtcatgtaataaagaccaaacgggaagatattcgagagctcatcttgaaacttcatttacagcaacagaagggcagcagtagctagttaatctgtacaaacatgacacagatgttctctaagattactggaaagcctcttaccagcatttgtgttagccagccctcgtgccgaattctggcctcgagggccat

SEQ ID NO: 23299 - DNA, 3948 bp, Homo Sapiens
atggaaaagtaccacgtgttggagatgattggagaaggctcttttgggagggtgtacaagggtcgaagaaaatacagtgctcaggtcgtggccctgaagttcatcccaaaattggggcgctcagagaaggagctgaggaatttgcaacgagagattgaaataatgcggggtctgcggcatcccaacattgtgcatatgcttgacagctttgaaactgataaagaggtggtggtggtgacagactatgctgagggagagctctttcagatcctagaagatgacggaaaacttcctgaagaccaggttcaggccattgctgcccagttggtgtcagccctgtactatctgcattcccaccgcatcctacaccgagatatgaagcctcagaacatcctcctcgccaagggtggtggcatcaagctctgtgactttggatttgcccgggctatgagcaccaatacaatggtgctgacatccatcaaaggcacaccactctatatgtctccagagctggtggaggagcgaccatacgaccacacagcggacctctggtctgttggctgcatactatatgaactggcagtaggcacccctcccttctatgctacaagcatctttcagctggtcagcctcattctcaaggaccctgtgcgctggccctcaaccatcagtccctgctttaagaacttcctgcagggactgctcaccaaagacccacggcagcgactgtcctggccagacctcttatatcacccctttattgctggtcatgtcaccataataactgagccagcaggcccagatttggggaccccattcaccagccgcctacccccagaacttcaggtcctaaaggacgaacaggcccatcggttggcccccaagggtaatcagtctcgcatcttgactcaggcctataaacgcatggctgaggaggccatgcagaagaaacatcagaacacaggacctgcccttgagcaagaggacaagaccagcaaggtggctcctggcacagcccctctgcccagactcggggccactcctcaggaatcaagcctcctggccgggatcttagcctcagaattgaagagcagctgggctaaatcagggactggagaggtgccctctgcacctcgggaaaaccggaccaccccagattgtgaacgagcattcccagaggagaggccagaggtgctgggccagcggagcactgatgtagtggacctggaaaatgaggagccagacagtgacaatgagtggcagcacctgctagagaccactgagcctgtgcctattcaactgaaggctcctctcaccttgctgtgtaatcctgacttctgccagcgcatccagagtcagctgcatgaagctggagggcagatcctgaaaggcatcttggagggtgcttcccacatcctgcctgcattccgggtcctgagcagtcttctctccagctgcagtgattctgttgccttgtattccttctgccgggaggcagggcttcctgggctgctgctgagtctactcaggcacagtcaggagagcaacagcctccagcagcaatcttggtatgggaccttcttacaggacctgatggctgtgattcaggcctactttgcctgtaccttcaatctggagaggagccagacaagtgacagcctgcaggtgtttcaggaggctgccaacctttttctggacctgttggggaaactgctggcccaaccagatgactctgagcagactttgcggagggacagccttatgtgctttactgtcctgtgcgaagccatggatgggaacagccgggccatctccaaagccttttactccagcttgctgacgacacagcaggttgtcttggatgggctccttcatggcttgacagttccacagctccctgtccacactccccaaggagccccgcaagtgagccagccactgcgagagcagagtgaggatatacctggagccatttcctctgccctggcagccatatgcactgctcctgtgggactgcccgactgctgggatgccaaggagcaggtctgttggcatttggcaaatcagctaactgaagacagcagccagctcaggccatccctcatctctggcctgcagcatcccatcctgtgcctgcaccttctcaaggttctatactcctgctgccttgtcagtgagggcctgtgccgtcttctggggcaggagcccctggccttggaatccctgtttatgttgattcagggcaaggtaaaagtagtagattgggaagagtctactgaagtgacactctacttcctctcccttcttgtctttcggctccaaaacctgccttgtggaatggagaagctaggcagtgacgttgctactctctttacccattcgcatgtcgtctctcttgtgagtgcagcagcctgtctattgggacagcttggtcagcaaggggtgacctttgacctccagcccatggaatggatggctgcagccacacatgccttgtctgcccctgcagaggttcggttgactccaccaggtagttgtggattctatgatggcctccttatccttctgttgcagctcctcactgagcaggggaaggctagcctaatcagggatatgtccagttcagaaatgtggaccgttttgtggcaccgcttctccatggtcctgaggctccccgaggaggcatctgcacaggaaggggagctttcgctatccagtccaccaagccctgagccagactggacactgatttctccccagggcatggcagccctgctgagcctggccatggccacctttacccaggagccccagttatgcctgagctgcctgtcccagcatggaagtatcctcatgtccatcctgaagcatctgctttgccccagcttcctgaatcaactgcgccaggcgcctcatgggtctgagtttctccctgtcgtggtgctctctgtctgccagctcctttgcttcccctttgcgctggacatggatgctgacctccttatagttgtcttggccgacctcagggactcagaagttgcagcccatctgctgcaggtctgctgctaccatcttccgttgatgcaagtggagctgcccatcagccttctcacacgcctggccctcatggatcccacctctctcaaccagtttgtgaacacagtgtctgcctcccctagaaccatcgtctcgtttctctcagttgccctcctgagtgaccagccactgttgacctccgaccttctctctctgctggcccatactgccagggtcctgtctcccagccacttgtcctttatccaagagcttctggctggctctgatgaatcctatcggcccctgcgcagcctcctgggccacccagagaattctgtgcgggcacacacttataggctcctgggacacttgctccaacacagcatggccctgcgtggggcactgcagagccagtctggactgctcagccttctgctgcttgggcttggagacaaggatcctgttgtgcggtgcagtgccagctttgctgtgggcaatgcagcctaccaggctggtcctctgggacctgccctggcagctgcagtgcccagtatgacccagctgcttggagatcctcaggctggtatccggcgcaatgttgcatcagctctgggcaacttgggacctgaaggtttgggagaggagctgttacagtgcgaagtaccccagcggctcctagaaatggcatgtggagacccccagccaaatgtgaaggaggctgccctcattgccctccggagcctgcaacaggagcctggcatccatcaggtactggtgtccctgggtgccagtgagaaactatccttgctctctctggggaatcagtcactgccacacagcagtcctaggcctgcctctgccaaacactgcaggaaactcattcacctcctgaggccagcccatagcatgtga

SEQ ID NO: 23300 - DNA, 1892 bp, Homo Sapiens
gttgcagattccctggcaaacccccttcagttaacacctatgaacagtctggccacctctgtattcagcatagctattcctgttgatggtgatgaagacagtgcatctgggggaggtgttgtagccattgacaacaaaatagaacaagcaatggatctggtgaaaagccatttgatgtatgcagtaagagaagaagtggaagttttaaaggaacaaataaaagaattagttgaaagaaactctttacttgaacgagaaaatgcactgttaaaatctctttcaagcaatgatcaattatcccaactcccaacccaacaggccaatcctggtagcacttctcaacagcaagcagtgatagcacagcctccgcagccaacgcaacctccacagcagccgaatgtctcctcagcataaagctttcttaagcctcattaagaaaaaaactgaaagcaatctatccttgtgtgccactggtgttctttccactttatacgaaagcaagtagccatgctttggttgtgtgtttggccttttcagtattagacaatcattctacaagagcttttcctctctctgagatgtcatgcagcgctgttgatgtccagttctatgtcatcagtacacaaggagaataatagatggggtttattaaagcgagcaaagtctgcattttacctggtgcgcatgagtggggtctttaagagttttggtggctctcccatgtttcctattacccatggatttaccctgagccttcctatcacattataaataacagttcatctaaagagccacttttctttctgattcagtaacatttgcctacataagttttcatttatttgtgttttatttattacagggctgctattttcataatgtacatgaacaatgtcacagaacttttttaatttttttgaataattataagtatcagtaaaggaagtgaaagacaggattgcatttaatagataaaacgtttaggcaataattgaacaaaagaatcctggcatatttctaacactaatggcaatttacttatggtatttattttcagtagtaaagacccagcttgaatgtaaattttgtatagtgtaagtatgaagaacatagtgcaactgtacaggtagtcaccagttattgtgatatgataaataattgggctattttgatgaagaaaactttgttcatttgtttctactttctaagagaaattgccacgattcctctgcttttcaacatttcgtatgacttttttttcgggtgggaataaaaagctgtgaaattgttcaacctactttgtaaccaaagaagcaaagctgtgtaatggagtttggttttttttttgttgttttttttttttttgtcttttttttttttataatgcacattctttatgtatttttatttagtgttttctcagtcacaattttctttactgtctagcatgatctgcatgacctataatctttgaaccactttcgtacctcatgtttttatccagcactcttattgtaatatgtactagtctgtgaacaatgtcaaataaaagagaacgaacaggtagtttggtggagctgagctagtgtacaatacactagttgtaaaaaaaaaaaaaaaaagtgagccatgttttgttcatttaaaatggtgttttgaattttgtatgcaggaaaggttttgttacattgcagattttaatgtatttaataaatgcaacatgcagattaagtgcagtgtatactgagtatttaaattaaaatgtacatttgataaatacagtttcaaaaggaagcatcattttgtgtatactaacacattaagtgtatgtcagaaattgatgtataaatatatattttaacattttttgaaattaaactgcagttttgttg

SEQ ID NO: 23301 - DNA, 2482 bp, Homo Sapiens
accggggggagtctctgcggggtgtagaccggaatcctgctgacgggcagagtggatcagggagggagggtcgagacacggtggctgcaggtctgagacaaggctgctccgaggtagtagctctcttgcctggaggtggccattcattcctggagtgctgctgaggagcgagggcccatctggggtctctggaagtcggtgcccaggcctgaaggatagccccccttgcgcttccctgggctgcggccggccttctcagaacgaagggcgtccttccaccccgcggcgcaggtgaccgctgccatggcttttccccatcggccggacgcccctgagctgcctgacttctccatgctgaagaggctggctcgagaccagctcatctatctgctggagcagcttcctggaaaaaaggatttattcattgaggcagatctcatgagccctttggatcgaattgccaatgtctccatcctgaagcaacacgaagtagacaagctatacaaggtggagaacaagccagccctcagctccaatgaacaattgtgcttcttggtcagaccccgcatcaagaatatgcgatacattgccagtcttgtcaatgctgacaaattggctggccgaactcgcaaatacaaagtgatcttcagccctcaaaagttctatgcgtgtgagatggtgcttgaggaagagggaatctatggagatgtgagctgtgatgaatgggccttctctttgctgcctcttgatgtggatctgctgagcatggaactaccagaatttttcagggattactttctggaaggagatcagcgttggatcaacactgtagctcaggccttacaccttctcagcactctctatggaccctttccaaactgctatggaattggcaggtgcgccaagatggcatatgaattgtggaggaacctggaggaggaggaggatggcgaaaccaagggccgaaggccagagattggacatatctttctcttggacagagatgtggactttgtgacagcactttgctcccaagtggtttatgagggcctagtagatgacaccttccgcatcaagtgtgggagtgtcgactttggcccagaagtcacatcctctgacaagagcctgaaggtgctactcaatgccgaggacaaggtgtttaatgagattcggaacgagcacttctccaatgtctttggcttcttgagccagaaggcccggaacttgcaggcccagtatgatcgccggagaggcatggacattaagcagatgaagaatttcgtgtcccaagagctcaagggcctgaaacaggagcaccgcctgctgagtctccatattggggcctgtgaatccatcatgaagaagaaaaccaagcaggatttccaggagctaatcaagactgagcatgcactgctagaggggttcaacatccgggagagcaccagctacattgaggaacacatagaccggcaggtgtcgcctatagaaagcctgcgcctcatgtgccttttgtccatcactgagaatggtttgatccccaaggattaccgatctctgaaaacacagtatctgcagagctatggccctgagcacctgctaaccttctccaatctgcgaagagctgggctcctaacggagcaggcccccggggacaccctcacagccgtggagagtaaagtgagcaagctggtgaccgacaaggctgcaggaaagattactgatgccttcagttctctggccaagaggagcaattttcgtgccatcagcaaaaagctgaatttgatcccacgtgtggacggcgagtatgatctgaaagtgccccgagacatggcttacgtcttcggtggtgcttatgtgcccctgagctgccgaatcattgagcaggtgctagagcggcgaagctggcagggccttgatgaggtggtacggctgctcaactgcagtgactttgcattcacagatatgactaaggaagacaaggcttccagtgagtccctgcgcctcatcttggtggtgttcttgggtggttgtacattctctgagatctcagccctccggttcctgggcagagagaaaggctacaggttcattttcctgacgacagcagtcacaaacagcgctcgccttatggaggccatgagtgaggtgaaagcctgatgtttttcccggccagtgttgacatcttccctgaacacattcctcagtgagatgcaggcatctggcacccagctgctataaccaagtgtccaccaactacctgctaagagccgggagcatggaacgtgttgggatttagagaacattatctgagaaaagagttcacttcctgctcccaggatatttctcttttctgtttatgaagtacaacccatgctgctaagatgcgagcaggaagaggcatcctttgctaaatcctgtttgaatgtcattgtaaataaagcctctgctctcagatgtaaaaaaaaaaaaaaaaaaaaaaaaa

SEQ ID NO: 23302 - DNA, 3972 bp, Homo Sapiens
gcggccgcagctccgtttccggtggctcgtcgcgctcgctcactccagctgcagccactctcgcccgtggctgcttcctccatcctggtattttttggagcttccatcctggttcttccaaagtgcccggacccaaaacaggaaagtgttgcggagataggaacatgggagagaaacaatctgggtaacatgaaagtgatgctggttgctaagggaaggcaacttgattctgtgggaagggctgtagctgatccatccgttgtctagatttgagtatgagcacagtggaagaggattctgacacagtaacagtagaaactgtgaactctgtgactttgactcaggacacagaagggaatctcattcttcactgccctcagaatgaagcggatgaaatagactcagaagatagtattgaacctccacataaaaggctttgtttgtcctctgaggatgatcagagtattgatgattctactccttgcatatcagttgttgcacttccactttcagaaaatgatcagagctttgaagtgaccatgactgcaaccacagaagtagcagatgatgaggttactgaggggactgtgacacagatacagattttgcagaatgagcaactagatgaaatatctcccttgggtaacgaggaagtttcagcagttagccaagcatggtttacaactaaagaagataaggattctctgactaataaaggacataaatggaagcaggggatgtggtccaaggaagaaattgatattttgatgaacaatattgaacgctatcttaaggcacgcggaataaaagatgctacagaaatcatctttgagatgtcaaaagacgaaagaaaagatttctacaggactatagcatggggtctgaaccggcctttgtttgcagtttatagaagagtgcttcgcatgtatgatgacagaaaccatgtgggaaaatatacacctgaagaaattgagaagctcaaggagaaaaaggcaattgctgcctgtttttttttcacccacagacaactgtggaccccaaaaaaaggccacactttcaaactttggctctcaaagtattgctgcccacaacttccaaaccagtcaaatgggaagaagaagaatgaagaataaatgatgaaattaaaagggagaaaacaattgaaccaaatgctgattggcagactcttgttttaggctccggataaagcatggcaatgactgggcaacaataggggcggcgctaggaagaagtgcatcttctgtcaaagatcggtgccgactgatgaaggatacttgcaacacagggaagtggacagaagaagaagaaaagagacttgcagaagtggttcatgagttgacaagcactgagccaggtgacatagtcacacagggtgtgtcttgggcagctgtggctgaacgagtcggtacccgctcagaaaagcaatgtcgttctaaatggctcaactacctgaattggaaacagagtgggggtactgaatggaccaaggaagatgaaatcaatctcatcctcaggatagcagaacttgatgtagctgatgaaaatgacattaactgggatctgttagctgagggatggagtagtgtccgttcaccacaatggctacgaagtaaatggtggaccatcaaaaggcaaattgcaaaccataaggatgtttcgttccctgtcttaataaaaggtcttaaacagttacatgagaaccaaaaaaacaacccaacgcttttggagaataaatcaggatctggagttccaaacagtaataccaattccagtgtgcagcatgttcagataagagttgcccgcttggaagataatacagccatctcttctagccccatggcagcattgcagattccagtccagatcacccatgtttcttcagcagactctcctgctaccgttgactcagaaacaataacactaaacagtggaacactacagacatttgagattcttccctctttccatctacagcccactggcactccaggcacctacctacttcaaacaagctcaagccaaggccttcccctaactctgactgctagtcccacagtaaccctgacagctgctgctcctgcttctcctgaacagattattgttcatgctttatccccagaacatttgttgaacacaagtgataatgttacagtgcagtgtcacacaccaagagtcatcattcagactgttgccacagaggacatcacttcttccatatcccaagcagaactgacagtcgatagtgatattcagtcatctgattttcctgagcctccagacgccctagaagcagacactttcccagatgaaattcatcaccctaagatgactgtggagccatcatttaatgatgctcatgtatccaaattcagtgaccaaaatagcacagaactgatgaatagtgttatggtcagaacagaagaagaaatctctgacaccgaccttaaacaagaggaatcaccctctgatttagccagtgcttatgttactgagggtttagagtctcccactatagaagaacaagttgatcaaacaattgatgatgaaacaatacttatcgttccttcaccacatggctttatccaggcatctgatgttatagatactgaatctgtcttgcctttgacaacactaacagatcccatactccaacatcatcaggaagaatcaaatatcattggatcatccttgggcagtcctgtttcagaagattcaaaggatgtcgaagatttggtaaactgtcattagaataattcttagaaataggcagttcaagcaaagaaggcacactgttaattacaacctcttcaaagaaataggagcaaacccccaagaggcttaatttaccaatttaaatagccacagtccttaagccacacacattgttgctgctatgactttttacctcctttaaacacatcatctgaggttgagttttatgacagtatgtagttgagtggaggctgggagttttaagcataaatccctgtttagtgttacatgggaataaggaatttcattcacttcagccactaagaaaagtttagaatcacgaaagcttaactgctgtggtttaaagtacagtttctctaaagatcagacatggcactgtctcctctcaagcctggttgtagttcagatgagtcttttcaacatggtcttcaacatggtctagagcttaccagtgatcttctgatcttcaagaagactaagtttgagacttgaccagcatacaagtatagagacctaggaggtggtcttgtggtggtacatttggttaacccattgctggcagtgggagctgatttaggcagggtaaacaggaaagcattaaaagttaaaattcactacaggttttttgttacttttaaagggaatatggataagcatagtaacaaaacccaccagaatctaagcagttttcaccccctcagaaaccactgtcattagtttacaaagttagcactttgaagtaaaactaaatgaggaaggaagtaatgttacctatccttgataccatgaccatttattagatgttttgctatataaattaccgagagaatagtttgtcatccacttagtgtgttagctggtggggtacaatataacctctcatctcaggctattttaaaaaaacaatatttgcttctataacaaaaggaaacaaatctaagaatcattcctgtactacagaagggttaaggcaaaggtagccttttgggctttttaatgaatatgacccctatagaaaagtcaagaaaaaaaaacccttgtataaattattttatttattattgtaattagatcttcacaaagttgtcttttcactgtgttttgtcaacgtgaaattaaattgtagttataagcaaaagttggttgcctagggaacaattgtatattcagtttaacagaaataaaagaatatttgtcttaaaaaaaaaaaaaaaaaaa

SEQ ID NO: 23303 - DNA, 3774 bp, Homo Sapiens
atgatgagcttcggcggcgcggacgcgctgctgggcgccccgttcgcgccgctgcatggcggcggcagcctccactacgcgctagcccgaaagggtggcgcaggcgggacgcgctccgccgctggctcctccagcggcttccactcgtggacacggacgtccgtgagctccgtgtccgcctcgcccagccgcttccgtggcgcaggcgccgcctcaagcaccgactcgctggacacgctgagcaacgggccggagggctgcatggtggcggtggccacctcacgcagtgagaaggagcagctgcaggcgctgaacgaccgcttcgccgggtacatcgacaaggtgcggcagctggaggcgcacaaccgcagcctggagggcgaggctgcggcgctgcggcagcagcaggcgggccgctccgctatgggcgagctgtacgagcgcgaggtccgcgagatgcgcggcgcggtgctgcgcctgggcgcggcgcgcggtcagctacgcctggagcaggagcacctgctcgaggacatcgcgcacgtgcgccagcgcctagacgacgaggcccggcagcgagaggaggccgaggcggcggcccgcgcgctggcgcgcttcgcgcaggaggccgaggcggcgcgcgtggacctgcagaagaaggcgcaggcgctgcaggaggagtgcggctacctgcggcgccaccaccaggaagaggtgggcgagctgctcggccagatccagggctccggcgccgcgcaggcgcagatgcaggccgagacgcgcgacgccctgaagtgcgacgtgacgtcggcgctgcgcgagattcgcgcgcagcttgaaggccacgcggtgcagagcacgctgcagtccgaggagtggttccgagtgaggctggaccgactgtcggaggcagccaaggtgaacacagacgctatgcgctcagcgcaggaggagataactgagtaccggcgtcagctgcaggccaggaccacagagctggaggcactgaaaagcaccaaggactcactggagaggcagcgctctgagctggaggaccgtcatcaggccgacattgcctcctaccaggaagccattcagcagctggacgctgagctgaggaacaccaagtgggagatggccgcccagctgcgagaataccaggacctgctcaatgtcaagatggctctggatatagagatagccgcttacagaaaactcctggaaggtgaagagtgtcggattggctttggcccaattcctttctcgcttccagaaggactccccaaaattccctctgtgtccactcacataaaggtgaaaagcgaagagaagatcaaagtggtggagaagtctgagaaagaaactgtgattgtggaggaacagacagaggagacccaagtgactgaagaagtgactgaagaagaggagaaagaggccaaagaggaggagggcaaggaggaagaagggggtgaagaagaggaggcagaagggggagaagaagaaacaaagtctcccccagcagaagaggctgcatccccagagaaggaagccaagtcaccagtaaaggaagaggcaaagtcaccggctgaggccaagtccccagagaaggaggaagcaaaatccccagccgaagtcaagtcccctgagaaggccaagtctccagcaaaggaagaggcaaagtcaccgcctgaggccaagtccccagagaaggaggaagcaaaatctccagctgaggtcaagtcccccgagaaggccaagtccccagcaaaggaagaggcaaagtcaccggctgaggccaagtctccagagaaggccaagtccccagtgaaggaagaagcaaagtcaccggctgaggccaagtccccagtgaaggaagaagcaaaatctccagctgaggtcaagtccccggaaaaggccaagtctccaacgaaggaggaagcaaagtcccctgagaaggccaagtcccctgagaaggccaagtccccagagaaggaagaggccaagtcccctgagaaggccaagtccccagtgaaggcagaagcaaagtcccctgagaaggccaagtccccagtgaaggcagaagcaaagtcccctgagaaggccaagtccccagtgaaggaagaagcaaagtcccctgagaaggccaagtccccagtgaaggaagaagcaaagtcccctgagaaggccaagtccccagtgaaggaagaagcaaagacccccgagaaggccaagtccccagtgaaggaagaagccaagtccccagagaaggccaagtccccagagaaggccaagactcttgatgtgaagtctccagaagccaagactccagcgaaggaggaagcaaggtcccctgcagacaaattccctgaaaaggccaaaagccctgtcaaggaggaggtcaagtccccagagaaggcgaaatctcccctgaaggaggatgccaaggcccctgagaaggagatcccaaaaaaggaagaggtgaagtccccagtgaaggaggaggagaagccccaggaggtgaaagtcaaagagcccccaaagaaggcagaggaagagaaagcccctgccacaccaaaaacagaggagaagaaggacagcaagaaagaggaggcacccaagaaggaggctccaaagcccaaggtggaggagaagaaggaacctgctgtcgaaaagcccaaagaatccaaagttgaagccaagaaggaagaggctgaagataagaaaaaagtccccaccccagagaaggaggctcctgccaaggtggaggtgaaggaagacgctaaacccaaagaaaagacagaggtggccaagaaggaaccagatgatgccaaggccaaggaacccagcaaaccagcagagaagaaggaggcagcaccggagaaaaaagacaccaaggaggagaaggccaagaagcctgaggagaaacccaagacagaggccaaagccaaggaagatgacaagaccctctcaaaagagcctagcaagcctaaggcagaaaaggctgaaaaatcctccagcacagaccaaaaagacagcaagcctccagagaaggccacagaagacaaggccgccaaggggaagtaaggcagggagaaaggaacatccggaacagccaaagaaactcagaagagtcccggagctcaaggatcagagtaacacaattttcactttttctgtctttatgtaagaagaaactgcttagatgacggggcctccttcttcaaacaggaatttctgttagcaatatgttagcaagagagggcactcccaggcccctgcccccatgccctccccaggcgatggacaattatgatagcttatgtagctgaatgtgatacatgccgaatgccacacgtaaacacttgactataaaaactgcccccctcctttccaaataagtgcatttattgcctctatgtgcaactgacagatgaccgcaataatgaatgagcagttagaaatacattatgcttgagatgtcttaacctattcccaaatgccttctgttttccaaaggagtggtcaagcccttgcccagagctctctattctggaagagcggtccaggtggggccgggcactggccactgaattatgccagggcgcactttccactggagttcactttcaattgcttctgtgcaataaaaccaagtgcttataaaatgaaaaaaaaaaaaaaaatgctgttattctctttccctgggaaggctgggggcagggcaggggaggtctggatgtgacaccccagactgcatgggactgagcaagcatcagt

SEQ ID NO: 23304 - DNA, 1689 bp, Homo Sapiens
gaattcggcacgaaggcttctaggaaaggtggagtcggtagtgagaagccggaggtgagaagacccctgagcggatggattcattcattttctgaatttcctatgtgaggacagtattagagcccagtgaggctttgagaggccccaaagatgagcgccaacagcagcagagtgggccagcttctcttgcagggttcagcgtgcattaggtggaagcaggatgtggaaggggctgtctaccacctagccaactgcctcttactcctgggcttcatggggggcagtggggtgtatggatgcttctatctttttggcttcctgagtgcaggttacctgtgctgcgtgctgtggggctggttcagtgcctgtggcctggacattgttctttggagcttcctgctggctgtggtctgcctgctccagctggcacacctggtataccgcctgcgtgaggacaccctccctgaggagtttgacctcctctacaagacgctgtgcctgcccttgcaggtgcccctacagacatacaaggagattgttcactgctgcgaggagcaggtcttaactctggccactgaacagacctatgctgtggagggtgagacacccatcaaccgcctgtccctgctgctctctggccgggttcgtgtgagccaggatgggcagtttctgcactacatctttccataccagttcatggactctcctgagtgggaatcactacagccttctgaggagggggtgttccaggtcactctgactgctgagacctcatgtagctacatttcctggccccggaaaagtctccatcttcttctgaccaaagagcgatacatctcctgcctcttctcggctctgctgggatatgacatctcggagaagctctacactctcaatgacaagctctttgctaagtttgggctgcgctttgacatccgccttcccagcctctaccatgtcctgggtcccactgctgcagatgctggaccagagtccgagaagggtgatgaggaagtctgtgagccagctgtgtcccctcctcaggccacacccacctctctccagcaaacacccccttgttttacccctccaaggttcccaccaacttttcctgcactttcctaccggggccaggtttgttccagggcaagcaatggcatactggcttctaaaattcctctccagagctactctcaagttatatccaggggacaggcccctttggctccaacccacacgcctgaactttaaggatcattggactatcttctctgtggccagcgcagctctcttctgtgttcacagaatggccactgataggcatgcctcttttcccacccactggaaggctcacaggcaaggtgagagaggacacagaaggtgccaacactgtcgctacagtaaggacctgaagtgactttgagaaattcaccctcacaaaccttccttcaggagcaggcattggtagtgcagaggcacagattccgtcctttaccagctgcagaatcttgggcaagttacatagcctctgtgagcctcatcggtaaacagtgggggttatgaaacccacctcacagggttgttgtgaggatccaatgagttgatttaggtaagcacctagcacatgccgtggcaccaagtaagcactcaataaatcactcaactcttaaaaaaaaaaaaaaaaaaaaa

SEQ ID NO: 23305 - DNA, 2757 bp, Homo Sapiens
cccacgcgtccggcgaggagctgtgccttccacctctccagccccggcaggacgggggcggccgccgcgaacccggggcggggacagcacgcagcctcgaggcgcgcacccccgcccggcagcggccccgacacccggggcgagcgggaaagcggcagcggcggcggcggcggcggcggcgggggaaggatgcaggggaagaagccgggcggttcgtcgggcggcggccggagcggcgagctgcagggggacgaggcgcagaggaacaagaaaaagaaaaagaaggtgtcctgcttttccaacatcaagatcttcctggtgtccgagtgcgccctgatgctggcgcagggcacggtgggcgcctacctggtgagcgtcctgaccaccctggagcgtaggttcaacctgcagagcgctgacgtgggtgtgatcgctagcagcttcgagatcgggaacctggcgctcatcctcttcgtgagctacttcggggcacgcgggcaccggccgcgcctgatcggctgcggcggcatcgtcatggcgctgggcgcgctgctgtcggcgctgcccgagttcctgacccaccagtacaagtacgaggcgggcgagatccgctggggcgccgagggccgcgacgtctgcgcagccaacggctcgggcggcgacgaggggcccgaccccgacctcatctgccgcaaccggacggctaccaacatgatgtacttgctgctcattggggcccaggtgctcctgggcatcggtgctacccctgtgcagcccctgggcgtctcctacatcgacgaccacgtgcggaggaaggactcctcgctctatataggaatcctgttcacgatgctggtatttggaccagcctgcgggtttatcctgggctctttctgtaccaaaatctacgtggatgcggtcttcattgacacaagtaacctggacatcactccggacgacccccgctggatcggagcctggtggggtggctttctgctctgcggtgccttactcttcttctcttccctcttgatgtttgggtttccacagtccctgcccccgcactcagaccccgccatggaaagcgagcaggccatgctctccgaaagagaatacgagagacccaagcccagcaacggggtcctgaggcaccccctggagccagacagcagtgcctcctgtttccagcagctgagagtgatcccgaaggtcaccaagcacctgctctcaaaccctgtgttcacctgcatcatcctggccgcctgcatggagattgcagtggtggctggcttcgctgcctttttggggaagtacctggagcagcagtttaacctcaccacctcttctgccaaccagctgcttgggatgactgcgatcccgtgtgcttgtctgggtatcttcctgggaggtcttttggtgaagaagctcagcctgtctgccctgggggccattcggatggccatgctcgtcaacctggtgtccactgcttgctacgtctccttcctcttcctgggctgcgacactggccctgtggctggggttactgttccctatggaaacagcacagcacctggctcagccctggacccctactcgccctgcaataataactgtgaatgccaaaccgattccttcactccagtgtgtggggcagatggcatcacctacctgtctgcctgctttgctggctgcaacagcacgaatctcacgggctgtgcgtgcctcaccaccgtccctgctgagaacgcaaccgtggttcctggaaaatgccccagtcctgggtgccaagaggccttcctcactttcctctgtgtgatgtgtatctgcagcctgatcggtgccatggcacagacaccctcagtcatcatcctcatcaggacagtcagccctgaactcaagtcttacgctttgggagttctttttctcctccttcgtttgttgggcttcatccctccacccctcatcttcggggctggcatcgactccacctgcctgttctggagcacgttctgtggggagcaaggcgcctgcgtcctctacgacaatgtggtctaccgatacctgtatgtcagcatcgccatcgcgctcaaatccttcgccttcatcctgtacaccaccacgtggcagtgcctgaggaaaaactataaacgctacatcaaaaaccacgagggcgggctgagcaccagtgagttctttgcctctactctgaccctagacaacctggggagggaccctgtgcccgcaaaccagacacataggacaaagtttatctataacctggaagaccatgagtggtgtgaaaacatggagtccgttttatagtgactaaaggagggctgaactctgtattagtaatccaagggtcatttttttcttaaaaaaagaaaaaaaggttccaaaaaaaaccaaaactcagtacacacacacaggcacagatgcacacacacgcagacagacacaccgactttgtcctttttctcagcatcagagccagacaggattcagaataaggagagaatgacatcgtgcggcagggtcctggaggccactcgcgcggctgggccacagagtctactttgaaggcacctcatggttttcaggatgctgacagctgcaagcaacaggcactgccaaattcagggaacagtggtggccagcttggaggatggacatttctggatacacatacacatacaaaacagaaaacattttttaaaagaagtttcctaaaataaaaaaaataaaaaaaaaaaaaaa

SEQ ID NO: 23306 - DNA, 10487 bp, Homo Sapiens
acgcgggggagtgcagctggcaccatgggtgtgctccagagcaacttctgcttgctctgagccccctgccctgcctcccctttcaccatgtttcctctgacaagattttaagtacagcaattcaagaagatttctcctcctaaacgacatttatctgaagtctattgcctcttgattgctggaaaagaatcttaaaatcatttcaaaagtaacttataaacaaacttattaaaagtgatgaaaggagcattgaaattaattagcactaatttttcactgtgccaaagtgtgcagtgtccttcagaggaaacaataacagatctggtgagtgtgccatgccagtggggagaattgaatgtccctcatctccctctttccctagggacattagtcatgagtgccgagtgtgcggggtcacagaagtgggtctttctgcatatgcaaagcacatttctggccagttgcacaaagataacgttgatgcccaggaaagagaagatgatggaaaaggagaggaagaggaagaagattattttgacaaggaactcattcagttaataaaacaaaggaaagaacaaagtcgacaagatgaaccttccaatagcaaccaagaaataaactctgatgacagacgaccccaatggagacgagaagaccgaattccttaccaagacagagagagttacagtcagcctgcatggcatcatcgtggacctccacagcgggattggaaatgggaaaaagatggctttaataatactaggaaaaacagctttccacattctttgaggaatggtggtggaccaagaggacgttccgggtggcataagggtgttgcaggaggctcctcgacttggtttcacaaccatagtaattctggaggtggttggctttcaaatagtggagcagtagattggaatcataatggtacaggaaggaattccagttggctttctgaaggaacaggtggcttttccagttggcatatgaacaacagtaacggaaactggaaatccagtgtacgtagtacaaataattggaattacagtggccctggagacaaatttcaaccaggcagaaacagaaattctaactgtcaaatggaagacatgactatgctatggaacaagaaatctaataagtcaaacaaatacagtcacgacagatataattggcagcggcaagaaaatgacaaacttggtacagttgccacatatagaggtccttctgaaggatttacaagtgataaatttccttcagaaggcttactcgacttcaattttgagcagctggaaagccaaaccactaaacaagcagacactgctacttccaaagttagtggaaagaatggcagtgcggcaagggaaaagcctcgtcgctggacgccttacccttctcagaagactctggatttacagtcgggattgaaagacatcactggtaacaagtcagaaatgatagagaaacctctctttgattttagcttgataactacaggaatacaggagccccaaactgatgaaacacgtaattccccaacacagaaaacacaaaaagaaatacatactggatctcttaatcacaaggcctcttctgattccgctgcttccttcgaggtggtgagacagtgccccactgcagaaaaacctgaacaagagcatacaccaaataaaatgccatcattgaaatccccactccttccatgtccagccactaaatcattgtctcaaaagcaagatccaaagaatatctcaaaaaacaccaaaacaaattttttttcccctggagaacactcaaatccctcgaacaagcccactgtggaagataaccatggtccttacatatccaaactgcgtagttcatgtcctcatgttttaaaagggaataaaagtacatttggctctcaaaagcaatctggtgataatttaaatgatactttacgaaaggccaaagaggtgctacagtgtcatgagtcattgcaaaatccacttcttagcacttctaaaagtaccaggaactatgcaaaagcaagtagaaatgtagaagaatctgaaaaagggtctttgaaaattgagtttcaagtgcacgcactagaagatgaaagtgatggagagacatctgacacggaaaagcatggaacaaaaattggaaccctaggttctgcaactacagaattgttatctggcagcactcgaactgctgatgagaaagaggaggatgaccgcatcctgaagacttctagagagctatccacttccccatgtaatcccatagttcgccagaaagaatctgaattacaaatgacatctgcagccagtccacaccctggcttattgctagacttgaaaacctctctagaagatgcacaggttgatgactctattaaatctcatgtatcttatgaaacagaaggctttgagagtgctagcttggatgcagagcttcaaaaaagtgacatcagtcagccctcgggccctctcctgcctgaactaagtaagcttggctttcctgcctcacttcagagggatctaacccggcacattagtttgaagagcaaaactggagtacaccttcctgagccaaacctcaatagtgcccgccgcattcgcaatattagcggtcaccgaaagagtgagacagagaaggagtctgggctcaagccaaccctacggcagattctaaatgcatctcggagaaatgtcaactgggaacaggtcattcagcaagtaaccaagaaaaagcaagagctgggcaaaggcttacccaggtttggcatagaaatggtaccccttgttcaaaatgaacaagaagccttagatttggatggggaacctgatctgtccagtctagaaggattccagtgggaaggtgtttccatttcctcgtcccctggcttggcaagaaagcgaagcctttctgagagcagcgtgatcatggacagagctccttctgtgtatagcttcttcagtgaggaaggtacaggcaaagaaaatgagccccagcagatggtttcacctagtaactcattgagggctggacagagccagaaagcaaccatgcacctcaaacaagaagtgacacctcgggctgcctccctccgaacaggtgaaagggctgaaaatgttgctacccaaaggcgacatagtgcacaattatcctctgaccatataatacctttgatgcatttggcaaaagacttgaacagccaggagaggtctataccaccgtcagagaatcagaattcccaggagagtaatggagagggaaactgtctgtcatcaagcgcatcctcagcccttgcgatctccagtttagcggatgcagccacagatagtagctgtacctctggtgctgaacaaaatgatggccaaagtattagaaagaaacgaagagccactggagatggatcttctcctgaactcccaagtcttgagagaaaaaataaaagaaggaaaattaaaggaaaaaaagaacgttctcaggttgaccagctgctgaatatttctttaagggaggaagaacttagtaagtcattgcagtgcatggataacaatcttctgcaagcccgtgcagcccttcagacagcttatgtggaagttcagaggctacttatgctcaagcagcagataactatggagatgagtgcactgaggacccatagaatacagattctacagggattacaagaaacatatgaaccttctgagcacccagaccaggttccctgtagcctcacacgagaacgaaggaacagtagatctcaaacatccattgatgccgcactgctgcccactccctttttcccactttttctggagcctccatcttcccatgtgtctccatcacccaccggagcctctcttcaaataaccacgtctcctactttccaaacccatggcagtgtccctgctccagactcatcagttcagattaaacaagagcccatgtctcctgaacaagatgagaatgtgaatgctgtgccaccaagctctgcctgcaatgtgtccaaggaattactggaagctaatagagagatcagtgacagttgtccagtttatccagtcatcactgctagattgtccttaccagagtcaacagaaagtttccatgagcctagccaagaactgaagttttctgtggagcaaagaaataccagaaacagagaaaactctccctcttcccaatcagctggtctttctagcataaataaagaaggggaagagccaaccaaaggcaatagtgggtctgaagcctgtaccagttcttttctaagattgtcttttgcttcagaaacccctttggagaaggaaccccactctccagctgaccagcctgaacaacaggcagaatccactttgacatcagctgagactaggggaagcaagaaaaagaagaaactccggaagaagaaaagtctacgggctgcccatgttcctgagaatagtgacactgaacaggatgttttgactgttaaacctgtaaggaaagtaaaagctggaaagttaattaaaggggggaaagtaacaacctccacttgggaagacagcaggactggtcgggagcaggagagtgtcagagatgagccagatagtgactcgtctctggaagtcctagaaattcctaatcctcagttagaagtagtagccattgattcttcagaatcaggagaagagaaaccagacagcccatctaaaaaggatatttggaactctacagagcaaaacccactagaaacgtctcgttctgggtgtgatgaagttagctctaccagtgaaattggcactcgctataaagatggcatccctgtaagtgtggcagaaactcagactgtgatctcctccataaaaggatcaaagaattcttcagaaatatcttcagagccaggagatgatgatgaacccacagaaggaagctttgagggacaccaagctgccgtaaatgcaattcagatatttgggaacttgctatatacctgttcagcagataaaactgttcgggtttataatctggtgagtcggaaatgtattggtgtctttgagggtcatacctccaaagttaactgcctcctggttactcagacctccgggaagaatgctgccctttacaccgggtccagtgaccataccatccgctgctataatgttaagagccgagagtgtgtggagcagttacagctggaagaccgggtcctctgcctccacagtagatggcgaatcctctatgcgggactggcaaatggcactgtggtcaccttcaacataaagaacaacaaacgacttgagatctttgaatgccatggccctcgggcagtcagctgtcttgctacagctcaggaaggtgcccgaaaactgctggtcgtggggtcttatgactgcacaattagtgtacgcgatgcccggaatggactgctcctcagaactctggagggccatagcaaaaccattctttgcatgaaggtggtgaatgatctcgtgttcagtggctccagtgatcagtcagtccatgctcacaacattcacactggtgagctcgtgcggatctataaaggtcacaatcatgcagtgactgtggtgaatatcctaggaaaagtgatggtgactgcttgcctggataaatttgttcgtgtctatgaattacagtctcatgatcgattacaagtttatggaggacacaaagacatgattatgtgtatgaccatccataaaagcatgatttacactggctgttatgatggcagtattcaggccgtgaggcttaatctgatgcagaattaccgctgttggtggcatggttgctctctgatatttggcgttgtagatcatttaaaacaacacttgctgaccgaccacactaatcccaacttccagactctgaaatgtcgctggaagaactgcgatgcttttttcactgctaggaaaggatccaaacaggatgctgcaggacatattgaacgacatgctgaagatgacagcaaaattgattcatgaagttttttgcctcccacgttgggaagtcattagttgaactattttcacattggccccccacacaggccactctcttccctttcttggtgaagtaaggaaggagaaagtggttactagccaggcatacccctagcataagtctgggcagctctatgggatgataaattacacttttaagttcttgctggaggttttaaatagatttagacaaatgttaaggaaccatacttctctgggacagcatggcatatagtgatatatgctatttgcgttctccagatgtttattgaagatacagatcctaattggttacccagtttgaccctaatcatatgtatattttattgatttcagtttgcaatttttaatttatgttcttatgatggtttaaacctatagtcaggcttttaagtacaagtttgtttaagtgccagactttgaggatcagttttaatttctccatttgtaatagctgggtatttaaactggaagcaaatagttttctttcttaacaattatgtgcagtgtgtgtcactgttttcttgctttatagatagagctggctttaagtgctaaaggacacagtagatttttgacaaacagtggctgctctgctgactatcttttaggaattcaggaagcaaatcacatagtgacaagtccttacagacaccacttctagtaaatctctgtaaatgtggatagaaagctcagtgtgaggcagtgcgtagacctaacgtctacctttacatctgctgttgaacctgggcactacctgttacagatcctgtcaggctgttgaactggaggtgtacctttatcttcctttctagtgtctgaccctgcaagcctaatgttggtttgaacccttttggtttgttcagttgccagcctccatctctcccactgtatggccgtgcctagaccgatggcagccatcgaatattcctctgggctcacggggtgttttccacccccctgcagcaactaagatggtgggggagagggggttagaataaagcatctgaatacagttttcaggacctcaagcagacttcctagagacttgtttctgagacagttctttgccttcacttccctgctagctgggaaagaagagtggagcagagactctgcctggccactgagaacagccaaattcacaaaccctcagtggggctttgtttttggattttctccggactcatcagtaaacctgtagaagtgtcgctttccagccttttgtttctggatcctcaaaactcagaacgtggccgggcgtggtggctcacgcctgtaatcccagcactttgggaggctgaggcaggcagatcacctgaggctaggagttgcagaccagcctggccaacatggcaaaaccccgtctctactaaaaatacaaaaagccgggcgtggtgggcgcctgtaatcccagctgctcaggaggctgaggcaggagaatcgcttgaacccgggaggcagagattgcagtaagctgagatcgtgccactgcactccagcctggtgacagagtgagactccgtctcaaaaaaaaaaaaaaaaactcagcttcttcagagagataaaattgggggaggagcccagggccacataccaagctttgggacatggtgcctcatgctctctgggattgcagaccatccaggtctgtcttcgcccctgttagtgcacatatatccactcacatgtcttccctcaggctatcgggcagggggacttcaccagggggtttatggataggcttcaagagggtctgtgagcccccagaaattgtgtgtgagactgagtatgtgttcttttttccaggaaaggctccagtggttcttacttgatccaaaaaatgtcaagaattaatctaggaggccgggcctggtggctcacacctgtaatcccagctctttgggaggccgaggcgggtggatcactcaaggtcaggcatttgagaccagcctggccaacatagtgaaaccccgtctctattaaaaatacaaaaattagctgggtgtggtggtatgtgcctgtagtctcagctactcaggaggctgagacaggagaatcacttgaaccctggaggtagaagttgcagtgagccaagatcatactactgcactccagcctgggcgacaagagtgaaactccacctcaaaaaaaaaaaaaaaagagttaatctaggagataatgaatggcctagtactagataatatatggccccacaagctcttgacttctgtccttggggaaagccattttgttaaccacactagtgagatttacatgatgcttaatggagaacagagaagatcttgttgcaaaaggtgtattaaatatttgtgctgtttctgtatgagattgagaagcttttcccacctctcacccctatttcctataaggatatccagagaagccaaactgttctgtgggtttgggaatggtcatttcccgggaaaatgcatctggatcgatgactaaacctggcccttttctctgggctgtagtgaagccgcattttcacgctggctggcagtgtgctgagagcctcgaatgctctgcggcgtagtgcccttctgccctgcctgacgatgtatcgaaaagatgagagtgaaggagactttgtgcagcaggaaacgggtaggtgaggtgttgggcagttgtgggaacttctgagagtattacagagtggtagaatcggtaagaactctgatttggacttcgctttggtggaactgtgtgcctatacctgcctgtgtgtgtgcaagtgtgcaggttcctttgtatgtatgtgtacgtgtgggaacctgtgtttgtcatatttttcttcatttcacaaaggctttttttgaagcagtggcagtatgcctttgtttcaagaacacatgaaattcttttaacaccagattagtgtgttaccccaaatgaacggttctagccctctattaagaaataaagggaccataagcattttggctgcttatggctgtgtgttactacttacaagagtcttgaaaattatacagaactttgccttctttttttaatgtcttccacaatgttgtgactgattataaccctgtttcccctcagagaagagctatggctcagggatctgtgttgactctggcatttagtggctttgtgaaggaaagaaaccattaaatgacctgacaaaaactgactcatgtctttaaagtagttgaagccacttttagaatgttactctcggttgcttttgtctaattctaatggcttaaagccaagaaaaccatagtataaatctttttgtgtacctatgctagtgtttaaatggcagttcgttgtgataaagtatcagtcacttcaagttttctgtgaaagtttttaattaggttaaaaataattttggcatacgtctctactcagtttataaagcagttccacaccatgcaaacaaaactctaacagcaaaggttatcttgacctgatgttacttgaatctgagagaaagtcattacttactactgcactcctgcttttgtgggaaaaattttcttcttccccagaagagttaacagttgagtgttcagctcctgacttacctttaatttagaggcaatattattactgtttaagtgattatttgcttaacacaggttttattttgtctttttgctggtagattatacaagggacaactttagtgatgaggcatgtggatgatttggtgggagtaggtatatacttagtggaatggtttattttatggaagagaattcattggaggtgagattgaagtatattgtgaagtgggatttgaacagcacatatgctctggtttgctcaaataactgcagtttatgcttacatctaaattttgtttctgttacctaaacgggagcttctagaattacgaaggccatacctgccacatttataaaataatggttttatccctgcccccaaatcatcaggttcctcgggtttaagagaagtggtctaatagacaggaatagaagttgtggtggaggtgatttgggatagactaggtttccttatgcaagtggatatgagctcctcatagaaaccagacctactgtattagacagtaacctctaacctcacctccaagcccaagtatatggccctgctgggttacctggtgactacatttcccagattcactctaaattcaaggtagtgacccaaataaattgggaaaggagggggtcaaggaggaaaagctgttgaaaatctttctcctatttaagagaaatatatgccctagagctgctccagcacccttggtttctgatttttttaatattgaatatggattagaagaatgaaatcagatgacacctgactgcaaaaatgtttataagcaaatagccttcttacattttggtataaagctgtgaacttcgtaactttgtaaagcaagatataaagcaaatacaagaggaaaataaagtacttttactaattgaaaaaaaaaaaaaaaaaaaa

SEQ ID NO: 23307 - DNA, 907 bp, Homo Sapiens
cccacgcagtctgttcccggcacccggtgcgtgtgaagggacttgagggcagcgagatggaatcagcaagagaaaacatcgaccttcaacctggaagctccgaccccaggagccagcccatcaacctgaaccattacgccaccaagaagagcgtggcggagagcatgctggacgtggccctgttcatgtccaacgccatgcggctgaaggcggtgctggagcagggaccatcctctcattactacaccaccctggtcaccctcatcagcctctctctgctcctgcaggtggtcatcggtgtcctgctcgtggtcattgcacggctgaacctgaatgaggtagaaaagcagtggcgactcaaccagctcaacaacgcagccaccatcttggtcttcttcactgtggtcatcaatgttttcattacagccttcggggcacataaaacagggttcctggctgccagggcctcaaggaatcctctctgaatgcagcctgggacccaggttctgggcctggaacttctgcctccttcctccgtgatctgccaggctcgtgggcactttccacagcccaggagagcttctgaaaggacagtatagctgcccttgctccctacccacagcacctgagttaaaaagtgatttttatgttattggtctaagggacttccatcttggtctgaagtcctgagctcagacgcaggtactgccagccataccttcctggtagcatctgctggacctaagtaaggcatgtctgtctaaggccaagtctgcccggcttaaggatgctggttctgactctaccccactgcttccttctgctccaggcctcaattttcccttcttgtaaaatggaatctatatctataaaggtttcttcaaatccaaaaaaaaaaaaaaaaaaa

SEQ ID NO: 23308 - DNA, 4276 bp, Homo Sapiens
agagccaccgcggagcgcgcgcggggttggttgccgcgagcgtgggggagcgtggaccgcggcgctgctcagcggtggggctgccttcccccggccctcctccctggtccctggcgagggcactggcggcggcggggccggggtccgcaaggccggagaaggccgccgggcccgggcatggtggtctggggcaacgcggaagaagctccaccatgaggcgaggtggatggaggaagcgagctgaaaatgatggctgggaaacatggggtgggtatatggctgccaaggtccagaaattggaggaacagtttcgatcagatgctgctatgcagaaggatgggacttcatctacaatttttagtggagttgccatctatgttaatggatacacagatccttccgctgaggaattgagaaaactaatgatgttgcatggaggtcaataccatgtatattattccagatctaaaacaacacatattattgccacaaatcttcccaatgccaaaattaaagaattaaagggggaaaaagtaattcgaccagaatggattgtggaaagcatcaaagctggacgactcctctcctacattccatatcagctgtacaccaagcagtccagtgtgcagaaaggtctcagctttaatcctgtatgcagacctgaggatcctctgccaggtccaagcaatatagccaaacagctcaacaacagggtaaatcacatcgttaagaagattgaaacggaaaatgaagtcaaagtcaatggcatgaacagttggaatgaagaagatgaaaataatgattttagttttgtggatctggagcagacctctccgggaaggaaacagaatggaattccgcatcccagagggagcactgccatttttaatggacacactcctagctctaatggtgccttaaagacacaggattgcttggtgcccatggtcaacagtgttgccagcaggctttctccagccttttcccaggaggaggataaggctgagaagagcagcactgatttcagagactgcactctgcagcagttgcagcaaagcaccagaaacacagatgctttgcggaatccacacagaactaattctttctcattatcacctttgcacagtaacactaaaatcaatggtgctcaccactccactgttcaggggccttcaagcacaaaaagcacttcttcagtatctacgtttagcaaggcagcaccttcagtgccatccaaaccttcagactgcaattttatttcaaacttctattctcattcaagactgcatcacatatcaatgtggaagtgtgaattgactgagtttgtcaataccctacaaagacaaagtaatggtatctttccaggaagggaaaagttaaaaaaaatgaaaacaggcaggtctgcacttgttgtaactgacacaggagatatgtcagtattgaattctcccagacatcagagctgtataatgcatgttgatatggattgcttctttgtatcagtgggtatacgaaatagaccagatctcaaaggaaaaccagtggctgttacaagtaacagaggcacaggaagggcacctttacgtcctggcgctaacccccagctggagtggcagtattaccagaataaaatcctgaaaggcaaagcagcagatataccagattcatcattgtgggagaatccagattctgcgcaagcaaatggaattgattctgttttgtcaagggctgaaattgcatcttgtagttatgaggccaggcaacttggcattaagaacggaatgttttttgggcatgctaaacaactatgtcctaatcttcaagctgttccatacgattttcatgcatataaggaagtcgcacaaacattgtatgaaacattggcaagctacactcataacattgaagctgtcagttgtgatgaagcgctggtagacattaccgaaatccttgcagagaccaaacttactcctgatgaatttgcaaatgctgttcgtatggaaatcaaagaccagacgaaatgtgctgcctctgttggaattggttctaatattctcctggctagaatggcaactagaaaagcaaaaccagatgggcagtaccacctaaaaccagaagaagtagatgattttatcagaggccagctagtgaccaatctaccaggagttggacattcaatggaatctaagttggcatctttgggaattaaaacttgtggagacttgcagtatatgaccatggcaaaactccaaaaagaatttggtcccaaaacaggtcagatgctttataggttctgccgtggcttggatgatagaccagttcgaactgaaaaggaaagaaaatctgtttcagctgagatcaactatggaataaggtttactcagccaaaagaggcagaagcttttcttctgagtctttcagaagaaattcaaagaagactagaagccactggcatgaagggtaaacgtctaactctcaaaatcatggtacgaaagcctggggctcctgtagaaactgcaaaatttggaggccatggaatttgtgataacattgccaggactgtaactcttgaccaggcaacagataatgcaaaaataattggaaaggcgatgctaaacatgtttcatacaatgaaactaaatatatcagatatgagaggggttgggattcacgtgaatcagttggttccaactaatctgaacccttccacatgtcccagtcgcccatcagttcagtcaagccactttcctagtgggtcatactctgtccgtgatgtcttccaagttcagaaagctaagaaatccaccgaagaggagcacaaagaagtatttcgggctgctgtggatctggaaatatcatctgcttctagaacttgcactttcttgccaccttttcctgcacatctgccgaccagtcctgatactaacaaggctgagtcttcagggaaatggaatggtctacatactcctgtcagtgtgcagtcgagacttaacctgagtatagaggtcccgtcaccttcccagctggatcagtctgttttagaagcacttccacctgatctccgggaacaagtagagcaagtctgtgctgtccagcaagcagagtcacatggcgacaaaaagaaagaaccagtaaatggctgtaatacaggaattttgccacaaccagttgggacagtcttgttgcaaataccagaacctcaagaatcgaacagtgacgcaggaataaatttaatagcccttccagcattttcacaggtggaccctgaggtatttgctgcccttcctgctgaacttcagagggagctgaaagcagcgtatgatcaaagacaaaggcagggcgagaacagcactcaccagcagtcagccagcgcatctgtgccaaagaatcctttacttcatctaaaggcagcagtgaaagaaaagaaaagaaacaagaagaaaaaaaccattggttcaccaaaaaggattcagagtcctttgaataacaagctgcttaacagtcctgcaaaaactctgccaggggcctgtggcagtccccagaagttaattgatgggtttctaaaacatgaaggacctcctgcagagaaacccctggaagaactctctgcttctacttcaggtgtgccaggcctttctagtttgcagtctgacccagctggctgtgtgagacctccagcacccaatctagctggagctgttgaattcaatgatgtgaagaccttgctcagagaatggataactacaatttcagatccaatggaagaagacattctccaagttgtgaaatactgtactgatctaatagaagaaaaagatttggaaaaactggatctagttataaaatacatgaaaaggctgatgcagcaatcggtggaatcggtttggaatatggcatttgactttattcttgacaatgtccaggtggttttacaacaaacttatggaagcacattaaaagttacataaatattaccagagagcctgatgctctctgatagctgtgccataagtgcttgtgaggtatttgcaaagtgcatgatagtaatgctcggagtttttataattttaaatttcttttaaagcaagtgttttgtacatttcttttcaaaaagtgccaaatttgtcagtattgcatgtaaataattgtgttaattattttactgtagcatagattctatttacaaaatgtttgtttataaagttttatggatttttacagtgaagtgtttacagttgtttaataaagaactgtatgtaaaaaaaaaaaaaaaaaa

SEQ ID NO: 23309 - DNA, 2012 bp, Homo Sapiens
taacccagcttggcacgaggcgggggtgcaaccctttgaagtgtcccctcctacttcttgctgcctcacggttgctgttgcagacccaggagtctctgaaggcttccgcggctttggggccggttgtgagatgccaggcagaggccgctgcccggactgcggctccacggagctggtggaagactcgcactattcgcagagccagctggtgtgctccgactgcggctgcgtggtcaccgagggggtccttaccactaccttcagcgacgagggcaatctccgagaggtaacatattcccgaagcacaggggaaaacgaacaagttagtcgcagccagcaacgaggtctccggcgagtgagagacctttgtcgagttctgcagttgccaccaacatttgaggataccgcggttgcctactaccaacaggcatatcggcactctggcatccgagcggccaggctgcaaaagaaggaggtgttggttgggtgctgcgtcttaatcacctgccgacagcataactggcccctaacaatgggggccatctgcacgctgttgtatgcagatttggatgtgttttctagcacttacatgcagatagtgaagctcctgggactggatgtgccatctctgtgcttggcagaactggtgaagacctattgcagcagcttcaaactgttccaagcttcaccttctgtgccagccaaatacgtggaagacaaagagaagatgctgtctcgaacaatgcagttggtggagctggcaaatgagacgtggctggtgaccgggaggcatcccttgcccgtcatcactgctgcgactttcctggcttggcagtcgctgcagcctgcagatcggctttcatgttcccttgcccgattttgtaaattggcaaatgtggacctgccctacccggcgtcctcccgcctgcaggagctgctggctgtgctgctgcggatggctgagcagctggcctggttacgagttctgagacttgacaaacggtctgtggtgaagcacatcggtgaccttctccagcaccgccagtcactggtccgctctgcctttcgggatgggacagcagaagtggagacccgagagaaggagccaccggggtggggacaggggcaaggagaaggggaggtgggaaataattccttaggtttaccccaagggaagcggccggccagtcctgcccttctcttgccaccctgcatgttgaagtccccgaagcggatctgccctgtaccccctgtcttcactgtcactggagatgagaacatttctgatagtgaaatagaacagtatttgcgtacccctcaggaagttagggactttcagagagcccaggctgctagacaggctgccacgagtgtccctaaccctccctgatggatatccactgggagcacttcatcctgttctgacagcttgataacattcctgttataaccaaggatggaagtgtacaccagtccgtaggtattgcttttcttgtttgaaggaaccaagaggggctctgccattagttggaccctgggtcctggagtaaagtcaggagtgcagggatgactataggtaggagagattcccatcccttggtgtgggagagcaagttgcctatgtccatgttctgtgagatggctttcctcatagatggatgggaaaatgtcaggctctttgctgctggtttgaattggacacactgctgcggctcctcctgcaggcctgagggggcttccctctgcttgtggagtggttggcattcccagcagtatcaaccctcagaggagcgggaactggggaattctggccctacgtgcattcacaggcaatgatgggtttgtgtgtatggtgtcatgagatcctctacctcataacaaaaggacagtgggtagactaaggcagtagctcaaagggctttgcaaaattttaatatattaaaacaagaggcatctgctagaaaacattctattgtataaaacccgagttcttaaaaaaaaaaaaaaaaaaa

SEQ ID NO: 23310 - DNA, 6589 bp, Homo Sapiens
ggagcataagctggtacaactgttctttagatttatatatttttaaggcccattggctttgcctaaaccttggtaaacagatactaaaaatctccagtaacattgcaaaattttgttctaattatcaggttcagcttcaaaacgtgtaaaatgcattgtgtactgagagtaagaggctgactctcgttagatccatttctatcagtgtgtttaaagccaaaaggaaagtaaaatacacatggctttcttctgacttgagttgtgtgattatggtcttttactcaagcttaaatgtttttatttttttgtcttccgagttcatgttgcccaaatgtcctgaggtggttccaaataccaatcccacacttcttgaccattgtcctgtggacaataacttggaataaatgtgaaactgaagtctgagtgcccatcagagagtgtcccaatccaaccagtctataagaagatctggggtgacatgtctgagagtaaagccaaaaagatagaaatcaaggacgtggatgggcagacgctgagtaagctgattgactacatctatactgctgaaatcgaggtgactgaagagaatgtccaggtgctgctcccggcagccagcttgctgcagctcatggatgttcggcagaactgctgtgacttcctgcagtctcagttgcatcccaccaattgcctgggcatccgtgcgtttgcagatgtacacacctgcactgaccttctgcagcaggccaatgcctacgcagagcagcactttccagaggtgatgctaggagaagaatttcttagcctgagtctggaccaggtgtgcagcttgatatccagcgacaagctgaccgtttcttcagaagagaaggtgtttgaagctgtgatctcatggatcaattatgagaaagaaaaccgtttagagcacatggcaaagctgatggaacatgtccgacttcctctcttacctagggactacctagtccaaacggttgaagaagaagctttgataaagaataacaacacctgtaaagacttcctcattgaggccatgaaataccatctcctccctctggatcagagactattgattaagaacccaaggaccaagcccaggactccagtcagccttcccaaggtcatgattgtggttggcggccaggcacccaaggcaatccgcagtgtggagtgctatgatttcgaggaggaccggtgggatcagattgctgagcttccttccagaagatgcagagcaggtgtggtgttcatggctggccacgtgtatgccgtgggagggtttaatggctcactgcgggtgcggacagtggatgtgtatgacggcgtgaaggaccagtggacgtccattgccagcatgcaggagcgccggagcacactgggcgcagcggtgctcaatgacttgctctacgcagtgggaggctttgatggcagtactggcctagcatcggtggaagcctacagctacaagaccaacgagtggttctttgtggccccgatgaacacgcggcagagcagtgtgggtgtgggcgttgtggaggggaagctatatgctgttgggggttatgatggagcttcccgccagtgtctgagcactgtggaacagtacaacccagcgaccaatgaatggatatacgtggcggacatgagcacccgccgcagtggcgcaggggttggagtgcttagcggacagctgtacgccacaggtgggcatgatgggcctttggtgaggaagagcgttgaggtttacgatcctggaacaaatacctggaagcaagtggcagacatgaacatgtgccggcgcaacgcaggggtctgtgcagtaaatgggctcctgtatgtggttggaggggatgatggatcctgcaacttggcttcggtggagtactacaatcctgtcactgacaaatggacgctgcttccaacgaacatgagcacggggcggagctatgcaggtgttgccgtgattcacaagtccttgtgacccaaactcctactgccaggaggtggaggaaggagcaggtgctgcctgtgactctgaacagcaggaccttggtgactggattcaacttgcttgggagggtctgtgctgctgtgagaaccgctctcctctgacttggcagactggtgttgttcatcgcagtgtggacaccattacccacccccgttcccctgaggtgctctggcctatgccctgagcaaggggggtcttgacatccccaggcagcacctttgggctttgttttggtgtttctacagggacaatacagaccctggagtgtgtgtgtgtgtgtgtgtagaccatggtgtttctctatgtttctctaagttggggggtgagcgtgtgtgacagtctactggatttctttactactgatcctttcgctgtgttaaaaatcaagtcacagagacctctcttctggatttgtcccatggggaccctgagactactaaagctgctttcttctgaaggtccagttggacagtctgggaatgtccagaaataaccagtgagaggggcagttctctggccacacccacttatgtactttaactactgtgactttgtctgcagaagagctggaaaattctcgaagctgcaccgtgtcctctgtgtgctagaataagggacaaatgggttccctgtgcttctcagctcactgtttttccttgagttctcctacaggaagcagatgagaactgcccagtcttcaggtttaggccattggtctttgatgtcatagattccaggcctgggaggtgttatgtctcttcagctgggaaaactagctcttcagagaagcctcgggtaacactgaaaaacaaaacaaaacaaaacaaaaacaggaaaaaaacaaaaaaccaaagtggtaaggattcagttcctgcctataatggtctcagagagggtcctacttttaggttttcccaggacaggacagtccccatttatacttattatcccagtttaattattcacagcaccccattttactcagaagtgttctggtctggaggataaataagaggtcaccctcctccagacccaaagatagatttgtgcctgtgttggatggggtcgtgtgtgattcagatggacattggatggcttcaaaggaatataccactagagctggcccttggcactttgtgacagtggtcaagtctgtctaatgtccttgtcttctttttcttgtgctttccccctattccagggtgtgcaccctctccccaacccccaagaaccccactactgctttccctgtgaggtaggagatatcagtgggtcttggatttgaggcttcctaagatgtgcttgcattttaaaaagggagcttggtgagagctttgctaattcacaggtaaaaattattaacaatagaacttcaagcatcttgaggagcgggcatttgagggggcatggagtaatttgtatttaaaaaaccttaaagttgtgctgttcctaaactagcaaattgctcatgctgaaatttctggcataagcaggggaagtcttgtgtctggagaatagtctcataccttgcagtctgggacaccctccctactttgagaatccacctacaggaagccaaggaactttataaatcctgatgttggacttctgatacgactgggctacttccaagcaggtgctgcaggagattggcatcccccagcccctgcagttagaaaccccgaagtcttcccagccagtgagccactttgtgtatttactgtatatttattgtgccctaaatgtgcaactctcctaaagacaaaacttctctttctgatgttaagcacatgttacttcaacaagatgcttggagaacaacaaggtacccagaatttttagaagccttcagaagaggctaaaatatccagctttgggggacctggaagaaatgtctccaaaggaagcaaggcatgttttagttgagtgctctggtctcactatgaagtggggatgactgtggcttcataactctacctggctgtgggttggaagctgatggaatgagaaatgtcctttctccttctctgaggaaattttgagacttgtttcggtgtgtctgtgtgatggggatgaggctggggttgggatctgatgtatgccattcacagaagctctcaatttcagatgataggtgaattccctgcccctcccccaccactgagaagctagactttcatgcgggagaggctacttttatgtgtcgtcttccggggaagggtccctccactgaaagctagccagtcatgttttctgtttttggatttttgcaattggtttcacctcatgtctccctccctacaaagcactgcctctactgggcgtgctgccaaggccatgtgcactccatcctcatgtatcctttttcacggggaccagaacactggtacgtcatcaccaaagccaatctgctctagctgcccacagatgccaccaaaacctgctatctcttcatcaccaggtacgattctctttccacagtggacacagcaggctattttctagtttgtgctggtcacgtggtagatgaagcctcttactgccccacttagggtggccacggctgcttgtgaatgcagctttgccagtggcatatctgtcatctgattgcggtggtgaaatggaattgaggcccaaggttagaagcagccgagacgccacttggatactgatttgaacaatgtagaagtcagattctgaattccaaagttatttctcataagtacccaatggcatctctccatctacaaagttgcagtattatgcaaataaaactgacctcattttctgctatgcaataagaatacttaattctagttcccgacaagccagttgcaatatcccctaagatgctttttgagctgtcttactttgatatctgttgtgtaacgtttgtatatttctgagccagatcctttcaaagattgcctttttataaaattgaagctatagcttttaggctaaaattttaacgtagatatttttataagatatttttttcaagagtttgaatcgctttttattgtccatggtaatgaaatgttgtgttctttgcatcattcactctcaaacgtagttcatgcctgtagctctcttccttttgtttctcacccttcagaaacatatttttcagtagctccaggtagatgagcctttttttttttttttttaaataccatattcaagggagtctgctgaattttaaaacgcagtcactggtgtttcttgaattgctagggactgatgttatgttcgactcagcacttgcccgtctgtattgattgtgtctttttttttttttttggagtctgctttctgtgggggtgaggccgggctgtctcgtggtggctcccactgacgggcactgagcctggtaccctgtggcatggagaagcctcagggaaaggcctgcccccccagcacatactcccatagtgtcctaggtccagccgaccattccttattctcttctatctccttgttgatctgaagcttccaatagcttgaggcctttgctgctggatgatgccctttttgggagcatcttgtctctaacctttaaaagaggggtcaatcctcatgatccctgtgtgttaagcatatgctttgcaggtgctcacactacacttacaacttgcttcttgagctatgtctctactccaggctctgttttgtgtatttatctgccatttgcatcatggtttttaaaatttattattattattattattgttgggacaggtgccatttaaattgcctccatgctccccatttgcacctagctggatcaagttgggaggctgagcaaactcatattccagttagttggagtttttaaaggctctgtttgcctggagaagcaaggaggttagaatgtaatttttttaagcgtttgcactatttagagtcctaagcccctcatgttcagctgtgctgtgtttctactgaccaagcaggagagccagcagcacttccagcatttgggaatggaagagatttcttctgtagtggataattacagcctcatagcccctgtgcagccttcgtcatgggactcagtgactcatggatatagcatcagccatggcaggaatgcacaggactgtggcatttgcagcatcaaatcaccctagtgccatgtttggttatgagattgtaaattattcgctcccccgtcctcccctcccctcattttcagtggcaatagaggacccttgttgtacttcttgtttaatttgcatattatgtgtaaaatgctttcgttgaaagaaaactgaagacactgaatgtgtatgtctgtgtgggtgctctgtccctgtggttgtcatagccagtcagacttgatcactgacaccccgtacaacatattgcataggtaagatcctcgatctggtgttctctgcgtggctgttagggactgtatatcttgtaaaagaacacttgtcacatgcttgatcagttacagcaatagctgaagaaacatttcctcaaatgtattattttaacaggaatcatgttctaatttcccatcctttaattttaataaaagctgaactgtgtgaa

SEQ ID NO: 23311 - DNA, 9301 bp, Homo Sapiens
ctccagcccaggcaacagagcgtgactccgtctcaaaaaaaaaaaaaaaagtgaaaggaaaatgaggggagaattctcattgataataagggtgaaaaggtttttttggcagagtaatagagttttggaaaccattgcaaagctgtcaagtgtggtgtagtttttggttaaggaaatcagaggtgtcagcagacataaaagacaggggaaaacatgggaagtgtcctacctatagtgtagaaaaagcacaactatctatgtcagaggtcgacagactgtggtccataggtcaaatctggcccacgatctgtttttgtaaataacgttttattggaacatagccacactcatttatttatatattgtccatatcttcttttgtggtaccaatagcagagttgagtagtcgtgacagagatgtgttgtgtcagctcacaaagctggaaatactctttacaaaaacatttgccaacccctgatctatgtgtttgagtgttggatgttcaacctctaatttgcctccaatgtctatatgatgatagagaatgaataaacgtcttggctctgccctttgggctggattacccatgctctgtgtacctgcagcataacacagacccctgaatatttatatcagtcagtgatggcaaggtctattgttctggagtgtactgtgtggtaactgtggtagtgccagctttacacggattagataatgctcgggcttgttttgccattttttttattgggttgtcttttacaaaagatttatttatatattctgattattaatcctttgttgttggtagatattacagatgtcatttcccagtttcttgcttattttaattttttttttttttttttgagatgaagtcttgctctgtcgcccaggctggagtgcagtcgtgccatctcggctcattgtaacctccgtctcccaggttcaagtgattctcttgcctcagcctcccaagtggctgggactgcaggcatgtgccaccacgcctggctgatttttgtgtttttagtggggatggggtttcatcatgttggccaggctggtctcaaactcctgacctcaagtgatccacccgtcttggcctcctagagtgctgggattacaggtgtgagccactgcgcctggcctgttgcttattttaaaacatctgttttaaggtgtcatttgttaaaaagttctgaattttagtatcaactttatcaatcttttcctttaagatttgcagttattctttgttttgaggcagggtctcgctctgtcaccgaggctggagtgcagtggcgcgatctcggctcactgcagcctcaacctcctgggctcaagcaaccctcccacctcccatgccagttgagaccacaggcatgcgccaccatgccctgctattttttgcattttttgtagaggcggggtttcgccatgttgcccaggctagtctggaactcctgagctcaagcagtccacaaagtgctgggattacaggtgtgagctactgtgcccagcctgcaattattctttatattctggaatacctactgttgttttcaatggttagatctttaatgtatctggaatggattcttatgtgtagtgtaaggtcgggtccagtttcattttttttccctatgtataaccagtgatcccagcatcatttattgaatggggcttgctttcaaattgtgagctctttttggtggagtctgtctgaggtccttatgaagcactgctgcttgctgattgtgtgaccttggacaaataaaacctcattgcgcctcagtctttaaggataatagtaatctcatagggttttgtgaggattaaatgagtcaatatacataacgtgtaaaacagtgcttggcacctagaacatgctcaataaatattagctgtactttagcactactgttcatttctgattcctcagcacctggtacagagcaggggctcattttgctcaattaaattgccaaattaatttggttttcaggtcaatcagaatggtgagagttgggctgagtgttgcaggagatgcttccaaggagctacttagttttaggggctgccttagattatctgctaggatagaactcttctcacgccatcacttttgcagagaacttctgtagcagaggttgcaaactggcaacctgtggttggatttgacctgtataagtattttgtttggtttacacaatatttttaatgtcttaaaaatgtacacagacctctgagtttctgacttaaccttgaaaaattggaagatctgtcaacagcaagcccatattcatttatagcggtaaccagctgaaacttttaggtcctgggaggaatggagaggggtcccactgactaacttttctgagagtggtcagagagttcttaagcagaattttgatttggctgctgggctgctaccttgaaatccaagccctaaaaatgccagcttctttggacttagaagatgacctggataaatgataaaaattaagaaagagattttgaagttttcttattgtcctcttggcatatgcttctggaataatattcaccatggttttggatgaccttccaaacttagaagacatctatacttccttgtgttcatcaacaatggaagactcagagatggattttgactctggactagaagatgatgacacaaaaagtgatagtattttggaggattccacaatttttgtggccttcaaaggaaatatagatgataaagacttcaaatggaaattagatgcaatattgaaaaacgtgcccaatttgttacacatggagtccagcaagctaaaagtacagaaggtgagccctggaacagcgtgcgtgtgacattcaacatcccccgggaagcagcggagcggctacggatccttgctcagagcaacaaccagcagcttcgggatttagggattctctccgttcagattgaaggggaaggtgctattaacctggctttggctcagaaccgaagccaagatgtgagaatgaatggacccatgggagctggaaattcagttaggatggaggcgggatttcctatggcaagtggtccaggaataataaggatgaacaaccctgccactgttatgatacccccgggtggaaatgtgtcatcttccatgatggcaccaggccccaatccagagctgcagcccaggactcctcgccctgcttctcagtcagatgcaatggatccactcctctctgggctccatatacagcagcaaagtcatccctcaggatctttagctcccccacatcacccaatgcagcctgtctctgtgaacagacaaatgaacccagctaattttccccagctgcagcagcagcagcaacaacaacaacagcagcagcagcagcagcagcagcaacaacagcaacagcagcaacaacagttgcaggcaagacccccacagcaacatcagcagcaacagccacagggaattcgaccccagtttactgccccaactcaggtgcctgttcctccaggctggaaccagctgccttctggagcccttcaacctcctccagcccagggttctctgggcacaatgactgcaaaccaagggtggaagaaggctcccttgcccggcccaatgcaacagcaactccaggcaagaccatccttagccacggtacagacgccttcccaccctccccctccatatccctttggcagccagcaagcctcacaagcccacacaaactttcctcagatgagcaacccaggccagttcacagctcctcagatgaagagtttgcagggagggccctctagggtcccaactcccttgcagcagccccacctcaccaacaagtctcctgcctcctcaccctcctccttccagcagggatcccctgcatcctccccaacggttaaccaaactcagcagcagatgggaccaaggccacctcaaaataacccacttccccagggatttcagcagcctgtcagctctccgggtcggaatcctatggttcaacagggaaatgtgccacctaacttcatggtgatgcagcagcaaccaccaaaccaggggccacagagtttacatccaggcctaggaggaatgcctaaacgcctcccacctggcttctcagcaggacaggccaatccgaactttatgcaaggtcaggtgccttcgaccacagcaaccacccctgggaattcaggagcccctcagctgcaagcaaatcaaaatgtccagcatgcaggtggtcaaggagctggtcctcctcaaaaccagatgcaggtgtcccacgggccgccaaatatgatgcagcccagcctcatgggaattcatggcaacatgaacaatcagcaggctggtacttctggggttcctcaagtgaacctcagcaacatgcaaggccagccccagcagggcccaccatctcagctgatgggcatgcaccagcaaatcgtgccctcccagggccagatggtccagcaacaaggaaccttgaaccctcagaaccctatgatcctttcaagggcccagcttatgccacagggccagatgatggtgaaccccccgagccaaaatcttgggccctcgccccaaaggatgaccccacccaagcagatgctttcccagcagggcccacaaatgatggcgccacataaccagatgatggggcctcaggggcaggttttgctccaacagaacccaatgatagagcagattatgaccaatcaaatgcaggggaataagcagcagtttaacactcagaaccagtccaatgtcatgccgggaccagcccagataatgaggggaccaactccgaacatgcaaggaaatatggtgcagtttacgggacagatgtcaggacagatgctgccccagcaagggcctgtgaacaacagtccatctcaggttatgggcattcagggacaggtcctgcggccaccagggcccagcccacacatggcccagcagcatggtgatcctgctactacagcaaataacgatgtcagtttatctcagatgatgcctgatgttagcattcaacaaaccaacatggtcccccctcatgtgcaggccatgcagggaaacagtgcctcgggaaaccacttctcaggccatgggatgtctttcaatgcacctttcagtggagctcccaatggaaatcagatgtcctgtggtcaaaatccaggcttcccagtcaataaggatgtcacgctaacgagcccattgttggtcaacttattgcagagtgacatatctgcaggccattttggggtaaacaataagcaaaataataccaacgcaaataaaccgaagaagaagaaaccccctcggaagaagaaaaatagtcagcaagatctaaacaccccagatactcgcccagctggtctggaagaggctgatcagccaccgttgcctggagaacaaggaattaacttggataactcaggccctaaactgccagaattttcaaaccggccaccaggttatccttctcaaccagttgaacagaggccacttcagcagatgcctcctcaactcatgcagcatgtggcacccccaccacagccaccacagcagcagccacagccacaactgcctcagcagcagcagccaccacctcccagtcagccacagtctcagcagcagcagcagcagcagcaacaaatgatgatgatgctcatgatgcagcaggatcccaaatcagttaggcttccagtctctcaaaatgtccatcctccaaggggccccctgaaccccgactcccagagaatgcccatgcaacagagtggcagtgtgcctgtcatggtcagtctgcaaggacctgcctccgtgccaccatcacctgataaacaaagaatgccaatgcctgtgaatactcccttgggaagcaattcaaggaaaatggtctatcaggagagcccgcagaatccttccagctcgccactggcggagatggcctcactccctgaagcaagtggcagtgaagcaccatctgtcccaggaggcccaaacaacatgccttcacatgtagtacttccccagaatcagttaatgatgacagggccaaaacctggaccatcgcccctttcagcaactcaaggtgcaactccccagcaaccccctgtaaattccctgcccagctctcacggccaccacttcccaaatgtggctgcgccaacccagacatctaggcccaaaacaccaaacagagccagccccagaccctattatcctcagacacccaacaaccgccctcccagcacagaaccttcagaaatcagtctgtcaccagaaagactcaatgcctccatagcaggactcttccctccacagattaatattcctttacctcctaggccaaatttaaacaggggctttgatcaacaaggcctaaatccaacaactttgaaggccatcgggcaagcaccttcaaatcttaccatgaatccttccaattttgctaccccacaaactcacaaattagattctgtggtagtgaattctggaaagcagtctaattctggagcaacaaaacgggcaagtccaagcaacagtcgcaggtctagtcctgggtccagtaggaaaaccactccaagccctgggaggcaaaattcaaaagcccctaaacttactctggcctctcagacaaatgcagccctattgcagaatgtggagttgccgagaaatgtattggtcagtcccactcctctggccaatccccctgtacctgggagctttcctaacaacagtgggctgaatcctcagaattctactgtgtctgtggctgcagttgggggtgttgttgaggataacaaggagagcttgaatgtgcctcaggacagtgattgccagaattcccagagtaggaaggaacaggtaaacattgaactaaaagcagtccctgcccaagaagttaaaatggttgtccctgaagatcagtccaaaaaggatgggcagccttcggatcctaacaaacttcccagtgtcgaagagaacaaaaatttggtgtctcctgctatgagggaagcaccaacatcgttaagtcaacttcttgacaactctggagctcccaatgtgacaattaaaccccctgggcttacagatctggaagtaacacctccagtagtttctggggaggacctcaaaaaagcatctgtcattcccacactgcaggatctgtcttcttctaaagaaccttctaattccctaaacttacctcacagtaatgagctgtgttcatcccttgtgcatcccgaattgagtgaggtcagttctaacgttgcaccaagcatccctccagtaatgtcaagacctgttagctcttcctccatttccactcccttgcccccaaatcaaataactgtatttgtcacttccaatcccatcacaacttcagctaacacatcagcagctttgccaactcacttgcagtctgcattgatgtcaacagttgtcacaatgcccaatgcgggtagcaaggttatggtttctgagggacagtcagctgctcagtctaatgcccggcctcagttcattacacctgtctttatcaattcatcctcaataattcaggttatgaaaggatcacagccaagcacaattcctgcagccccactgacaaccaactctggcctgatgcctccctctgttgcagttgttggccctttacacatacctcagaacataaaattttcttctgctcctgtaccgcctaatgccctctccagtagtcctgctccaaacatccagacaggtcgacctttggtccttagctcacgagccacccctgttcagcttccttcccctccttgtacgtcttctccagttgtcccttctcatccccctgtgcagcaagtgaaagaattgaatccagatgaggctagccctcaggtgaacacctcagcagatcagaacactcttccctcttcacagtcaaccacaatggtttctccccttttgaccaatagtccagggtcctctggcaaccggcgaagcccagtctcgtctagtaagggcaaaggaaaagtggacaaaattggccaaattttgttgaccaaggcatgtaagaaagttacaggctctcttgagaaaggggaagaacaatatggtgcagatggagagactgaaggccaagggctagacaccacagctccggggctcatgggaacagagcagttatccacagagctggacagtaaaaccccaacgcccccagcacccactctgctaaaaatgacctctagccctgtgggcccgggcactgcctcagcaggacccagcttacctggcggtgctctccccaccagtgtacgctcgatagtaaccactctggtaccctccgagctcatctccgccgtaccgaccacaaaaagcaatcatggtggcatagcatctgagtcacttgcgggtggcctagtggaggagaaggtgggatcccatccagaacttctacccagcatagccccgtcgcagaatttagtctcaaaggaaacttcaaccacagcactgcaggcctctgttgccagaccagagctggaggtaaatgctgccatagtctctggacaaagcagtgagcccaaagagatagttgaaaagtccaaaatcccaggccgaagaaactcccgaactgaagagccaactgtggcctctgaaagtgtggaaaatggacatcgtaaacgatcttctcgacctgcttcagcctccagctctactaaagacataaccagtgcggtgcaatccaagcgaagaaaatccaagtaaacaagcaggactgcgacttgatacttggaaatgtgtgtgacttttacaaagagcaattttgagctgtgacttttttaaatcaatttctgtacagttagtaattttaataatgtggcccttttcctagtccctgcaacctgtttcataaagtgcaatggggaaagcaggactgttgagcccttttggtgttgcgagttgaagttcaaggtttctaaaatgttgtcttgtattgaaaggagctaatgccattataaatgttactagttttcacatttcctaagcagcctagagtacagggtgagcatttttagatctcctaatgatgtattgtgccgtggaagtactgtgtgtgaatagcagtagtgggggcaaaagcaatcttctcatttggaaatgttgtaaataattttattatatagtgttttggatgtatttgttgtagaaatggaccagtgaataaagagaatctaaggatttgtacaatgtgaaataacgtgttaaataaatgtcattgtcatagaacataaaaaaaaaaaaaaaa

SEQ ID NO: 23312 - DNA, 4000 bp, Homo Sapiens
cggccgcttttttctcaagatggcagattcccactgaggctgagggggccgagctcgcgcgccgcgttcccttctccgttgccatgaaccgcggacaccccggccccgatggcccccgtgtacgaaggtatggcctcacatgtgcaagttttctcccctcacacccttcaatcaagtgccttctgtagtgtgaagaaactaaaagtagagccaagttccaactgggacatgactgggtacggctcccacagcaaagtgtacagccagagcaagaacataccaccttctcagccagcctccacaaccgtcagcacctccttgccggtcccaaacccaagcctaccttacgagcagaccatcgtcttcccaggaagcaccgggcacatcgtggtcacctcagcaagcagcacttctgtcaccgggcaagtcctcggcggaccacacaacctaatgcgtcgaagcactgtgagcctccttgatacctaccaaaaatgtggactcaagcgtaagagcgaggagatcgagaacacaagcagcgtgcagatcatcgaggagcatccacccatgattcagaataatgcaagcggggccactgtcgccactgccaccacgtctactgccacctccaaaaacagcggctccaacagcgagggcgactatcagctggtgcagcatgaggtgctgtgctccatgaccaacacctacgaggtcttagagttcttgggccgagggacgtttggacaagtggtcaagtgctggaaacggggcaccaatgagatcgtagccatcaagatcctgaagaaccgcccatcctatgcccgacaaggtcagattgaagtgagcatcctggcccggttgagcacggagagtgccgatgactataacttcgtccgggcctacgaatgcttccagcacaagaaccacacgtgcttggtcttcgagatgttggagcagaacctctatgactttctgaagcaaaacaagtttagccccttgcccctcaaatacattcgcccagttctccagcaggtagccacagccctgatgaaactcaaaagcctaggtcttatccacgctgacctcaaaccagaaaacatcatgctggtggatccatctagacaaccatacagagtcaaggtcatcgactttggttcagccagccacgtctccaaggctgtgtgctccacctacttgcagtccagatattacagggcccctgagatcatccttggtttaccattttgtgaggcaattgacatgtggtccctgggctgtgttattgcagaattgttcctgggttggccgttatatccaggagcttcggagtatgatcagattcggtatatttcacaaacacagggtttgcctgctgaatatttattaagcgccgggacaaagacaactaggtttttcaaccgtgacacggactcaccatatcctttgtggagactgaagacaccagatgaccatgaagcagagacagggattaagtcaaaagaagcaagaaagtacattttcaactgtttagatgatatggcccaggtgaacatgacgacagatttggaagggagcgacatgttggtagaaaaggctgaccggcgggagttcattgacctgttgaagaagatgctgaccattgatgctgacaagagaatcactccaatcgaaaccctgaaccatccctttgtcaccatgacacacttactcgattttccccacagcacacacgtcaaatcatgtttccagaacatggagatctgcaagcgtcgggtgaatatgtatgacacggtgaaccagagcaaaacccctttcatcacgcacgtggcccccagcacgtccaccaacctgaccatgacctttaacaaccagctgaccactgtccacaaccaggctccctcctctaccagtgccactatttccttagccaatcccgaagtctccatactaaactacccatctacactctaccagccctcagcggcatccatggctgcagtggcccagcggagcatgcccctgcagacaggaacagcccagatttgtgcccggcctgacccgttccagcaagctctcatcgtgtgtccccccggcttccaaggcttgcaggcctctccctctaagcacgctggctactcggtgcgaatggaaaatgcagttcccatcgtcactcaagccccaggagctcagcctcttcagatccaaccaggtctgcttgcccagcaggcttggccaagtgggacccagcagatcctgcttcccccagcatggcagcaactgactggagtggccacccacacatcagtgcagcatgccaccgtgattcccgagaccatggcaggcacccagcagctggcggactggagaaatacgcatgctcacggaagccattataatcccatcatgcagcagcctgcactattgaccggtcatgtgacccttccagcagcacagcccttaaatgtgggtgtggcccacgtgatgcggcagcagccaaccagcaccacctcctcccggaagagtaagcagcaccagtcatctgtgagaaatgtctccacctgtgaggtgtcctcctctcaggccatcagctccccacagcgatccaagcgtgtcaaggagaacacacctccccgctgtgccatggtgcacagtagcccggcctgcagcacctcggtcacctgtgggtggggcgacgtggcctccagcaccacccgggaacggcagcggcagacaattgtcattcccgacactcccagccccacggtcagcgtcatcaccatcagcagtgacacggacgaggaggaggaacagaaacacgcccccaccagcactgtctccaagcaaagaaaaaacgtcatcagctgtgtcacagtccacgactccccctactccgactcctccagcaacaccagcccctactccgtgcagcagcgtgctgggcacaacaatgccaatgcctttgacaccaaggggagcctggagaatcactgcacggggaacccccgaaccatcatcgtgccacccctgaaaacccaggccagcgaagtattggtggagtgtgatagcctggtgccagtcaacaccagtcaccactcgtcctcctacaagtccaagtcctccagcaacgtgacctccaccagcggtcactcttcagggagctcatctggagccatcacctaccggcagcagcggccgggcccccacttccagcagcagcagccactcaatctcagccaggctcagcagcacatcaccacggaccgcactgggagccaccgaaggcagcaggcctacatcactcccaccatggcccaggctccgtactccttcccgcacaacagccccagccacggcactgtgcacccgcatctggctgcagccgctgccgctgcccacctccccacccagccccacctctacacctacactgcgccggcggccctgggctccaccggcaccgtggcccacctggtggcctcgcaaggctctgcgcgccacaccgtgcagcacactgcctacccagccagcatcgtccaccaggtccccgtgagcatgggcccccgggtcctgccctcgcccaccatccacccgagtcagtatccagcccaatttgcccaccagacctacatcagcgcctcgccagcctccaccgtctacactggatacccactgagccccgccaaggtcaaccagtacccttacatataaacactggaggggagggagggagggagggagggagagaatggcccgagggaggagggagagaaggagggaggcgctcctgggaccgtgggcgctggccttttatactgaagatgccgcacacaaacaatgcaaacggggcaggggcggggggggggggggcagagggcagggggacgggtcgggacaccagtgaaacttgaaccgggaagtgggaggacgtagagcagagaagagaacatttttaaaaggaagggattaaagagggtgggaaatctatggtttttattttaaaaaa

SEQ ID NO: 23313 - DNA, 2529 bp, Homo Sapiens
cggagttgtcgtgtgttctggattcattccggcaccaccatgtcgaaggtttcctttaagatcacgctgacgtcggacccacggctgccgtacaaagtactcagtgttcctgaaagtacacctttcacagcagtcttaaagtttgcagcagaagaatttaaagttcctgctgcaacaagtgcaattattaccaatgatggaataggaataaatcctgcacagactgctggaaatgtttttctaaaacatggttcagaactgcggattattcctagagatcgtgttggaagttgttaatatctgctacttggaacatacgattgcctttcagaataaatattggtattttttgttgttgtaaaattgaaatcaggcatttaacatactatgaaaacaccaggagtcaatgattaatgaaaggtgactcatctgtccctttttgttgtccatactcttcctatgaagagggaatgcgtatgaattaaggctactactgtcacagaagatcatagtctttgatgctacctcacaacacaaacaggtagttcgttgggggcaaatgaattagccaactgttaactggaagcttttgataatttttttttttagaacaatttggaacattaaaatttactgaatcgtatatattcatctgagataaaaatataaaaagaattatggaccctggatggcaatttgcttgatagcatctgatttgcagactcataatttgatttttaattaaatatataggttatgatgaagtgaatagacatatcagtgaacagttaactatattaaatttttatcatttactttttttaagattcagacctcagttatataaatttcagtttaatatcaaccaaaaaattaaaattttaatctaacccttatgtgtataaattggtgtcccataccagcttttaatggtggacctatagaatccagtacttttaatggtgggaatttacagtagaagcatcctttgctgagttatacattcctttatcaatctcttttgatacaacatttaaaacaagtagcttcaagaaaccactggtgttttgaggatagtatttctaaatagcattcaggaacagagtattattgcacagatctgaagatcaaaaaaaagctcaaggaaatacagatcggaagtgctgatgagttatatttattgaaaacccaacttttaaggaagtgctaagatcagtcacccatgtgaataagaagccaggaaaggaaagatggggaagcccagatcaccaggcttctattaaggaggaaagcaacagaggaaacagtgaaggggaacagaagggggtagcaaagtgttacagaaaagcggactggatagacaaaactgcagaaggtgtatgttggggagaactgaaagggaaaacaaaatacttgacatagtcttaagtagaagaaggcagttagagaaaacaaagtatctactggccttgtcaacatacagacttcaaaataccccttatgagaatccaaagaatgatgtgtgtaagggaagattttatttgcccttccggaagaaatcagtatctatgcaaatcttgaaagacgaaatcaaagcccattaatgattcagaatcagtgcttgacctcctgtattctgaatggtgaactctggaagcagggattgtgtctggctctttttagagctggaagtgtagtggctttcattaaatacttgctgtaaagtctttctaagaccaattattatcttagcatgtttcagtatcttctctatcataggccctaagttcattgggggaaaaaaaataagaagattcaacagaatcagcatttgaagtgtaccattggtagttgtttatgaaattaccagatattcataaatgtgacaaatgaacagcaggattatgaattatcaaaggaaaaagtatttgctgaggtgaaaaaatctgatgtttgaggaagtttttatttttatttatttgttttgtttttttttttttttgaggcagactctctgtcgccaggcttctcctgcctcagcctcacgagtagctgggactacaggcatgcaccaccacgcccagctaatttttgtatttttagcagagacagggaggaagtttttatttttataaacaaaatctgatgttcagaggccccgtttcttacaataaatgttgagtcttagttaagcaggaatttatgaacacccatttcctgactttttgctttaatttagatttttctccatcctgtttctagcacaaaaatttgcctgctgtgttacaaaaataaatttatgttgtcctgtgccataaagtgatatatttaatatttttattctttggttttgaacattgtaagttcctaaaaacattttattaaacaagtagacattttgttattaaaaaaatgtgatctgtaatttctttgtgcagaatgatttgaagtattgtattcagtttacatgcattattggtttataattaatatctaatgaaaatacatgttgttatattgtaaaaaaaa

SEQ ID NO: 23314 - DNA, 2286 bp, Homo Sapiens
aactatgtggactccattttgaccagttaacccattctcgtggctttgggagtatccttctggtaacatgaagactcagcgcagaggaagtcagccatctactcctcgtctgtctcctacatttcctgagagcatagaacatccacttgctcggagggttaggagcgacccacctagtacaggcaaccatgttggccttccaatatatatccctgctttttctaatggtaccaatagttactcctcttccaatggtggttccacctctagctcacctccagaatcaagacgaaagcacgactgtgtgatttgctttgagaatgaggttattgctgccctagttccatgtggccacaacctcttctgcatggaatgtgccaacaagatctgtgaaaagagaacgccatcatgtccagtttgccagacagctgttactcaggcaatccaaattcactcttaactatatatatatacataaatactatatctctatatggactcgtaaaggcatgggtataatggtaccccccagtaaacttcctaatgatttcttatgactgttatcaggctttattgggattaggctaaagttgttagtaaacttataaaaggctgctatggtaacactaaacctaagtggtctcttgtctattagtttggtttgaattattagtactatcctgtagacccagagacatagtttatataagaattgctaaagctgaagttcaacttggctgagtgaagataatcataggttgtgtgagcctatgaaaaagtgtatacgtctaagatttcaaaacaatgggtcccaaagcctaaccactttaagagtttatggagggtacttggcattacagacgattcatacacttccagtgctgccttctttacactgccagttttgacaaaacaggtttgttttttattttacaacaacatatgcctaattctgcaggattgcaagtaactttttaatgcattgtgattacttattggtaatgatagggctgatggcagtttactagatcactggttataatttgggacaaaaactgtacatcaactttcatctcgcccagagtgtcaaggctggtatgatcagtggatcaggaatgcaattgtgaattcctgcccattgcctctcttggtgaatgtggaaatggccacctgggttttcccatatcaggaagggctttgggatagcacctatattggctgataattgaggatgcaaacattccatcattagtgtgatcgagctgttaatttttagactatagatcaaaatgtgaaacattttatgttcaatccatatttgtcttgcacattataaatatatttttattttttagtaatttaggggagggaggagggagaaagggataatgatgcccttggcataatttcacaaaagcagctgtgacaacctccaatcagtttacttcatttcaaaactatttccaatcacaaggaaagatttatttaaaatatactcgtacatttcacctgtggatgtctataacttcatcctcagtatgttcccaaatctgtgctggcattgaaaggacaaaacattatactagtgggtttttctactaattattttttgaagcattattttcccaacacaaaagagcttttttctcggtataatgaaaattgaaatcctatgtgtattcaatagtaaatagacaaattttattttttatttccacttgaagagttacatttcgtataaaagtttacaaataacggtttttattttgattttttcagtataaaaaaagttgccttgatggcatattatgatgtaatgctaattgcttgtaggatagtaaatggtcagtattgaaacctaatctctagctgccgtcttgtagatatgaacgaatgttcaccaagcatgtattttgtattttgttgcattgtacactgcaactaataagccaaggaatcgacatatattaggtgcgtgtactgtttctaaaaaccacaaactaagaatgataaattatcaatatagtttagtatttgctaattttactacactcttttgttatgtatatgtagggaagtcatagggattataaattcaatttgagtaaaatttaaaaccatatattttatgataaagggcctttaacttaagatggccaaagcactgatattatatatttgctgtaaagagaattataagagttttatttttctgatattaaaagttacttaataaagacttgtttccattaacttgaaaaaaaaaaaaaaaaaaaaaaaaaaaaa

SEQ ID NO: 23315 - DNA, 1945 bp, Homo Sapiens
gataatcaaggaaaccttttccgggtggggatctctgaaattactcagatacagtgctgtgccaaaaacctgtggattttctctacaaaaattattgagcaaccctaattaacctgattttttgctgataatcactctcaatggaatcaaatcacaaatccggggatggattgagcggcactcagaaggaagcagccctccgcgcactggtccagcgcacaggatatagcttggtccaggaaaatggacaaagaaaatatggtggccctccacctggttgggatgctgcaccccctgaaaggggctgtgaaatttttattggaaaacttccccgagacctttttgaggatgagcttataccattatgtgaaaaaatcggtaaaatttatgaaatgagaatgatgatggattttaatggcaacaatagaggatatgcatttgtaacattttcaaataaagtggaagccaagaatgcaatcaagcaacttaataattatgaaattagaaatgggcgcctcttaggggtttgtgccagtgtggacaactgccgattatttgttgggggcatcccaaaaaccaaaaagagagaagaaatcttatcggagatgaaaaaggttactgaaggtgttgtcgatgtcatcgtctacccaagcgctgcagataaaaccaaaaaccgaggctttgccttcgtggagtatgagagtcatcgaacagctgccatggcgaggaggaaactgctaccaggaagaattcagttatggggacatggtattgcagtagactgggcagagccagaagtagaagttgatgaagatacaatgtcttcagtgaaaatcctatatgtaagaaatcttatgctgtctacctctgaagagatgattgaaaaggaattcaacaatatcaaaccaggtgctgtggagagggtgaagaaaattcgagactatgcttttgtgcacttcagtaaccgaaaagatgcagttgaggctatgaaagctttaaatggcaaggtgctggatggttcccccattgaagtcaccctagcaaaaccagtggacaaggacagttatgttaggtatacccgaggcacaggtggaaggggcaccatgctgcaaggagagtatacctactctttgggccaagtttatgatcccaccacaacctaccttggagctcctgtcttctatgccccccagacctatgcagcaattcccagtcttcatttcccagccaccaaaggacatctcagcaacagagccattatccgagccccttctgttagaggggctgcgggagtgagaggactgggcggccgtggctatttggcatacacaggcctgggtcgaggataccaggtcaaaggagacaaaagagaagacaaactctatgacattttacctgggatggagctcaccccaatgaatcctgtcacattaaaaccccaaggaattaaactcgctccccagatattagaagagatttgtcagaaaaataactggggacagccagtgtaccagctgcactctgctattggacaagaccaaagacagctattcttgtacaaaataactattcctgctctagccagccagaatcctgcaatccaccctttcacacctccaaagctgagtgcctttgtggatgaagcaaagacgtatgcagccgaatacaccctgcagaccctgggcatccccactgatggaggcgatggcaccatggctactgctgctgctgctgctactgctttcccaggatatgctgtccctaatgcaactgcacccgtgtctgcagcccagctcaagcaagcggtaacccttggacaagacttagcagcatatacaacctatgaggtctacccaacttttgcagtgactgcccgaggggatggatatggcaccttctgaagatgcttttttaaatttaagaataagacacacaaaactctatt

SEQ ID NO: 23316 - DNA, 82011 bp, Homo Sapiens
tgataggtgcttgtaaactgtgcttaacgaaaacataccgtgtgctgtagggacttaactcttgtttatatcagttagcctggtttcactatacagtacatcattttgcttaaagtcacagcttacgagaacctatcgatgatgttaagtgaggattttctctgctcaggtgcacttttttttttttttaagacggagtctctttctgtcacctgggctggagtgcagtggcgtgatctgggttcactacaacctctccctcctgggttcaagcaattcttctgtctcagcctcccaagtagctgggattacaggcaccccccgccacacccggcttatttttgtatttttagtagagacagggtttcactattgttgtccatgctggtctcgaactcgtgacctcatgtgatccacccgcctcggcctcccaaagtgcagagattagagacgtgagccacatggcccagcaggaccactttttagcagattcagtcccagtgttcattttgtggatggggagagacaagaggtggcaaggtcaagtgtgcaggtagagacagggattttctcaaatgaggactctgctgagtagcattttccatgcagacatttccaatgagcgctgacccaagaacattctaaaaaagataccaaatctaacattgaataatgttctgatatcctaaaattttaggactaaaaatcatgttctctaaaattcacagaatatttttgtagaattcagtacctcccgttcaccctaactagcttttttgcaatattgttttccattcatttgatggccagtagttgggtggtctgtataactgcctactcaataacatgtcagcagttctcagcttctttccagtgttcaccttactcagatactcccttttcattttctggcaacaccagcacttcatggcaacagaaatgtccctagccaggttctctctctaccatgcagtctctcttgctctcatactcacagtgtttcttcacatctatttttagttttcctggctcaagcatcttcaggccactgaaacacaaccctcactctctttctctctccctctggcatgcatgctgctggtaggagacccccaagtcaacattgcttcagaaatcctttagcactcatttctcaggagaacttatggcttcagaatcacagctcggtttttaagatggacataacctgtacgaccttctgatgggctttcaactttgaactggatgtggacacttttctctcagatgacagaattactccaacttcccctttgcagttgcttcctttccttgaaggtagctgtatcttattttctttaaaaagctttttcttccaaagccacttgccatgccgaccgtcattagcgcatctgtggctccaaggacagcggctgagccccggtccccagggccagttcctcacccggcccagagcaaggccactgaggctgggggtggaaacccaagtggcatctattcagccatcatcagccgcaattttcctattatcggagtgaaagagaagacattcgagcaacttcacaagaaatgtctagaaaagaaagttctttatgtggaccctgagttcccaccggatgagacctctctcttttatagccagaagttccccatccagttcgtctggaagagacctccggtgagtagcttcctgcttgctggctgggttttccccccacggaggagtcctctcactcagcacctccggcagctcagctgtgcacatgggcactgggggaaggatcctggcagcagctctgctgggctctgtctttaagtgtgaagcagggaggagaggaacaggtctcagatatttcaccaaatctcagcaaaatccagagggagagcgcaggaggtggggctgattcttatgctctggctctttctctctgaaaaaaaaaaaaaaatcttgctttttataaaagtgggtggaactcagtttaattcatcctgtaaaaataaatattcctttctcagaacaaattccagacagcccagatgtacctgttcgttttaaatattattcatctttgtaagattatttcagtttctctggctaaaatcatgatgttattcttctttaatttaccaatggccatatctttctgaaacacagaaaccctagaaagagaagagtcataggcaaggaatattttttcatgcataaaatgttggggttaaagagagagagacctagcaatcgcttttgtccacctacctcacctcataagtgaggagtcaaggcacactagagtgaaatatatctagtgggcacatgacagagcccggattaaaactttctgttttaggaaactctcccagcctctgggtttcatttacagtgatcgccaggagggaaatcacattcccctggctcacctctctgatcatccctccagtgtgactcttgttcttaattcgagaaatatttattgagcatctactagtgccagcactgggcaagcaactggggggacagcagtgagtaagaaagaccaaaattccagctgtcttggaacctagggtcctgaagggaagatgggcattgaacaagagtgacattgtcaggagacgatgttctgggtgccacaggatcatgtggcaaggagagctaacctggtccagggagacaaaccctctctgaggaaatgatgacaagctgagacccaatactattgattagccatggttttctttaacctaaggtgggccaggcatggtggctcatgcctataaacccagcattttggaaggcccaggctggaggattgcttgagcccaagagttagagaccagcctgggcaacagggtgaaaacctatctcttttgtactaaaaattcaaaaaattatccaggcatggtggcacatgcctgtggtcctagctactcagaggctgaggtgggaagatcacttgaactcggggagttgaggcagcagtgagccgagatcatgccactgcactccaggctgggtgacaggagtgagacccagtctcaaacaacaacaataacaacaacaaacctgaggtggagtactagacaaccctgtatattccataggggctcttcttggttctatggtaaggcccataactgtcctgaaggccttcagtttagaagataacactactctgctatcagagtagttggacatgtcacaaccccctgctgaaatatcttcagtgacatccctctctcggcccccactgccttcaggacaagtccaaactccttagccaagccataggcccttctcagctggtccctgcctacctgtccaggcccatgtccatcctctttccccagatcctgacacaccagcagtgcttggacatttagctgctctgtagttccaagtcttctcacaccggaggcctttgctcatgctgtctgtctgcctgacatgccttttttgttcctatctgaacctctgctcaggtgtcacttccttcaatctttctcatgactgatttcctctcactgagagcagaaatccttcctgttcatctttgaggccccctcaccaagctcaggccagtcccatagtgggtactcagctgatgctggtgagtgaaaacccacgcccaagggccttgaccagtgagacaggataggcctgcgttcccaggcagggagttcctaaaagccctttcttgggccagacatggaggctcatgcctgtaatcctagcactttgggaggcagaggtgggagcatcaattgagctcaggagttggagaccagcctgggcaacatagtgagaccctatctctataaaaaaagtttaaaaaaataaaagctctttctcagaatggggaaaattaaaacctacaaatactgttttcagtgaaatcattggtggacttgagtcttcaagcgagacttacaaattaataaaaattctttaagggcctgttatgctctaggtactagattgggcagtgtccatgtttgaaatgaggggtgcagaagacttgtctgttctaaattgtgcccccaccaccaccatcaccaacaacaaagatcctggattttccactgtttgagtcactaaaggaccagataacaaaggccactcttggataaaatgcccacatgttcccctggggttaagatcacaggaacactgcccattgggttcactagcataaatgagaaatataaaattagagatggtcagagttggaatgattcttggagaggtgctccagtgtccttgctttataggtgattaaggcccagaaagggcaaatgacttatctacagccacacaagttgacttggaactgaaaaactgaaatgactccagaactttctgactgtaaagcacttcttggagacatcagttctccataaacttcttcagatgtagtgacctttgccagccctatgcagtctgaaaagactgtgtcctatcaggagaagcaccacacaggtgagtaaaggccttcctgcttttactgtctaaggcacagaacctttggaaaccaatctgaattttttttcgaccatcaagtattatttattataattacagtgataatgataataatgataaagggagaattattcctggccaactataattctagttaaaatagcatgctgcactttcagcctttccctcttaaaagaaaacaggctctggccgactgttcccagctcacctgtaatctcttctcttactcaccagtgctacctcacagactttcttcctctactcgggaacatcatgcattgagtttccagggcaaacaatctggttcctctagactttccttatatgatctatttctaggatcagaaagcaaacaaattattcaacacttctcaactgttaaggcaagttttcttgatgacagatcccagggcagaatagaatgggttctagaacagggcttctgggatgctggtgcccaatatactagggataggttggggatgggagggcaggtcgtgtttcattccatggggtggaaggttcaattgcaccacactcctggcctgtctccttcccatggtgggtttgtaaagagaacttgacctgtaaagcccagttcttggcttctgtctttctctgggaagcaagctgcctgcaagaagcatggcttctgctctctgccctccttgcagtaagttttctggaggcaagtccccatggggagtcatgcaggagtccctgggccacctggtaatgtgtggttaacagtaaagataatcgctaatcttgagtgagaactcaccacatgccagtaactaaatgctttccatatgttaattcatttaatcttcacaacaatcctgtgaggaagtaccattattgtcccactttacaaaggagggaactgagtctcagagggattaaataactcgcgccagatctcccagttagtgagggttggagctgggatttaaacccacacaatctggctctagagccccaaatctatctaattctgagatttagatgtcaatatccatttttattaaacaataaatgtgggattttggactcccacctgccctgcacttttgtagtattcctttattggctcaaaactcatgcatggaagtaaggtgtcatttattgggcctcctcaagacacaacaggcattgagtgacaccccaggggttgcccctgaaagcatcagcctctataagttggagatggaatggcacagtggctaagagcccaggctctgaggtcagataacctaagttcaagtctgggcctgctacctaacacttaggtaatcttggtcacatacttaccctcattttgccacaggttctccatgtgaaaaatggagaaaaaccataattgaagaacccatctcttaattaattgaggattaaatgagttaatgcaggctaaaggcttaagaccagcacatggttgagtgctcagtaaacatagactactcttattactgcctacaagcagctatgcagtctcttaaaagtggcaacatcataaacatttttccagcttaatttgtgcctatgaccagtcaagatattagctacagcaatgtgtttgagtacttcatgcctggtctaaatgcatccatccatctcagcatgaggatgtgtgtgtgaatgctcccctcatgggcaggggactgcttgtcctttagggcaattctagttatctacatcaaatataaaatgtacatttggttgtgaaaatctgagtgtatcatagagccaggaaggagactacaaaagagggatcacacttggctgggaaacttggcaccttgcccagtgattggctttaaaggctcactgagaccaacttgctgagcaagggcttcgtttttcccatctgcatgtgcctcagtcatgccaggtggagagttcttaagcttcttctctctcatctcctgcaattcccaaagcaggggcaacctagatccctgcttcttttggagggatgagaagtgaagggccagttgcaggaccttgtgatgaaaaggtatctggtcctctcctcacccttggtaacatgggatcccagaattgctccacagggccctgccctgcaccatcagctcagctggccagggcttccagcagtggaccctgacaacaatgaggttcctgggctcctcctgtctctggtgctaggtggagtcacctttctgtaaattccatgttattccagacccaccctaacctagagcttggagaaggaagggcccaccgtatttagcagctggattaacccagacttcaggttaaacttccctccatcagcatggtctcagtgtttcttggctctgctaggagaggttatttctggttgggcctccagttcacagccctgaatcggagtcaaaactgcatcattgatatacagccacctccagcttaacctccagctccttccctaggaaatccgttctcccttcctccactgtcctccaagctccttgggctgatagctgggccttgcagtttctcatcgcaaccttctgcttagctctctcctctatttgctgttgggagttgggggagcttgccaccttcccacttaactccagatccagtgccttctcacttgctgatggtggctggagctccagctatgggtcttttcccctcaccttttcccctcacctctttccctcaactcctgtccccacctctctgtcattacagggccccacccgttcccagctcagagctgggtctctacttcagccacatttctctggtgtttgcctttcttcctgccaggtattactatcatacccatatccatctgtgctttgcccagtagtccaacctcacccttagccctgctcttcttcactcctggggccagctagtgccctccaccaacacctggacctgtggacacctctttcccagacagacggcagcagcctcttagtcctctgaatagatgactttattccttgtattctggtacacagaaatctcttgaattaggcttattttaagaatagagtttagataagtttcccaagctataattcatcatgaaccttattttcccaagtctagaagattctcaatactagtactttcttgatcttatcagagggtgtccatggaaggtcatgaccatcacccagctgagtgcagtagaaggaagctttctaatgtaagttgcatcacagtttcagagatgtgagagaaattcagaaatgtgagggaaattgtgaaatgtaaaacgtgagggagaaaagcattcagaatggaaaaataagacaaagagtcccttcccatctaactcacaaccctgccatccccaacctattccttttcccaggctctttctttcttccgtgctgtctatcgacatggacccagccacaccggctggtttttgctgctttctgtatgacctggtctcttgccccttcccaaggtcctcatcatccaggcagaaccaacttcttccttgtgccagggctgttacaccaggagaaaaaaaagtatgacattcttcagggtagatcttcttactactgtggaattattgtcaagtctttaaatttatttcgccaaatgtgctcactttctgaacccttaacatggcagaaacatcttctctcttctcgaggaaaacctgtaagaaaaaatcagaaagattattataattacagaattacaataatctctggggtgggggaaggagaattaagtatgattgttttcgaggaagaaaagaaagaaaaacacctgcccgtttacttacaagagggaggagagctagaactgaaaggaaaatggagtggaggaagcaacagggcttgtgacgacccctaacctggtgttcttcctctccacgacccgaccctcacagaattcttttttttctttttttttttctttttttttttgagacagggtctcgctctgttgcccaggctggagtgcagtgtctccagctcagctcactgcaacctccacctcccaggttcaaccaatcctcccaccttggcctctctagttgctgggactacaggcatggtggtgtctgggtgcctgtaatcccagatatttgggaggctgaggcgggagaattgcttgaacccaggaggtggaggttgcagtgagccgagatcatgccaccgcactccagcctgggtgacagagcaagaccctatctcaaaaataaataaataaataagtaaagtcattggttttcaactttagtggacataagactctcctggtgagcctattcaaaatgcagagtcccagacccctaccaaatcctcaggtctgggatgggccctgggaatctgtattttcaactggcagaccagatgattctgatgcatgaagttcaaagatcacactttgagaagcacagagtagacaaaggccatcaggcattcatgagcagacagggagactgggtgtcctcctagcgggcaagctgccaggcctgagtttcctcccatgtcagctccctgctcttacattagagctgcctatttaagcacagtgaaagttgaaaaggctgggctttcttatgaatataattcccacatgacacacattcatctgctttccccatccaccacattctctgccctaaaggtcctgaatttgcaacagtggatatctgctcactgccactgggacctactctaacagggacttccatctgcagtcaagttacctaccctctgcatcattttcacagatgagagtccctaaatgactggtcaaggtctttgaggggtgggccagggacatcaggagtgtgaaggcgtcattacccccaaacaatggcatggagcagattcctcctatgcattcagtagcctgtataggattagtatatcagaaggccccatgctatagccctttgatcaccagtgtcaaaggcatgaacatcttttgctgagacaaagtaagcctctctgtaactatagtaatattttctttttagaggaagaatcccagcaaagggtgatgaaggttccctaaaggtcctcagaccactgcggtctgtcctgaggctgtccttggaactctctctcccctccctggctccctctcacagagttgcccctagaccacgggctcaggggcctccagtcaaagctgctgactctgaccatgcatggtgctgctgagggtggaagagctatattaggctccagaccattcacaagaggattaggcgtggactgagggtgcagtgggaaagaggcagcagggaaggcccagctctactcccagagcattcgccatgccctacctgctgtcaggattcttctgtgactgtgtgatccaagagagggacaggagaaatggagagggcaccatcgcacagcccctcaagtttgaggggcaggattttgtcgttctcaaagatgtctggcccagaagtgcctctttgaagattgtgtgttcctagcaggtgttcaggccctggcctcccatgagctgagccacaaaaccaagatttaggccatcacatggaaaaggccaaaggtagggatggaggggatgggacttcaggagccagctcttggggaacaagaagccaagtgatccagagcctgaggccatggatccctcctctgggcaattgacttatcaagggtctctttatccaaaatacctttctgctccttcctgaaactggagatgttattttctattcctgagctagagattattataatactttatgggtccctgaaatcgtaaatatttttagggagctaatgcattgtaatcgaatatcatgtctctttttttttttttttttttttgagagagagacttgctctgtcacccaggctggagtgcagtggcttgattatagctcactgcagcctcaaccccccaggcccaaacagtgatcccacttcacacctcagccttccaagtagctgggaccccaggcatgtgccaccacatttttatttgtttaaataaaaatttatttatttatttatttatttatttatttatttatttatttatttatagagatggggcctcactatgttgcccaggctggtctcaaacccctcggctcaagcaatcctcttgcctaggcctcccaaagtgctgggactacaggcaagatccatttcacctggtctcatgtgtctttttcagagcaggtgttttggggtgggagagtagagtggttagaagtactaaggctcacagtttccgggagagttctgtggaaggtggtgaacagtaaagaaatggaaggatggagacctgccttcttaatctttcacctaaggcttgttcattcatgtgctgtcgcttctgtttaaacagaaaggtccgtgctgagcagccagactccttacgggatgaagcagtttgtgtcaggctaccttatggcgcaaccgagaagccccttgtgtcaacttgagtgggtgaaagtgcttgggagtgtgtagcacaaggcccttcttcctgcttggagaggctcagagctccaaaaagggttcactgcatttagagcaggcaagaaactctctagaccagtaggctctgaggagggcatatacagcccagtagatctgcaagatgatccattggagtggatgaaaaaactattagaagtatttatatctattttttaaataaactgtaaatttcagaatggttttagatttacaggaaaaaattgtgaagatggtacagagttctcatataccttgcagccatttcttcctattaccaacatcttgcattagtacagtacatttgctacaattaaattagccagtgttaatatattattattagctgaagtccatacttttccttagttttttgtctgatgtcctttttctgttccaagatcccacccaagatatgacattacatttagtagtaacgtctccttagccttctcttggctgtgacagtatctctgccttctctggtgttttatgaccttcacagttttttaaagagtactcgtcaggtattctgtaacataatgaccctcaattggcatttgtctgcggtttttctccttatgggcttaagggtttgggggaggaagaccacagggtaaagtgccgtttttgtcacattatatatcaaggatgcgggcaataaacatgccttctcattgtggtgttgaccttggtcatgtggctgaagtagtgcttgtcaggtttctttactgtgaagttacttcttcccctcttttcatactatactctggaagcaagacactaagcataagcccatacttaagcaagggggaattgtgctctgccctcttgagggcagagaatctgcatcaattattgggaatcattctgcatgggagctttgtctattctccccatttgtttatttattcagtcacttgtttatatcaatatggactcatggatcttgatttttattttaagtcgtaatccaatactgctttattttgttgcttaggttgtcccagctttcttcactgggagctctcagttggctcctgtgtctatttaacataccctaattgtttgtgggttttttttttttccttgagcactttcttactttctggcactaccagctcataatgtgtatctcctgccccaatcctagaatcagtcatttctccaaggagcactggtttcttttattgaaaaaggtattagatatcaagatctggttgctaagtctgctcattgctaccggagtgtgattgcttctgttcctctcagcttgtagagaaaggagatatgtgtgtgtactaagccagctgtatacacatatctataatatttctatgtataaccatctcacatatctgtaaatatttctatataaagccatttgtatctatactaagctaaacatgagttcacactgacataactaaatatttcttggcttagtgtgttaatataaaaggaatatttttaaatttcgaattccagttgttcattgctggtatatagaaaactaattggtgtttatatactaacttggaatcttgcaactgagctatactcacttattagttcccagtggatttttttgggtcatttgtttggaattttctacatagacaattgtgtcatctgtaaataaagatagttttttttttgtttccaatatttatatctttcatttctttttcttatcttgttgcattagctaggacttccagtaggacactgaataggagtggtacaggaggacatcttgctttgttcctagtcttaaggggaaagcatctagtttctcacccttaagtatgaagttagctgttattatttttgaaagtggatgatcgttaccaagttgaggacattctcctctcttcctagttagctgagaggtttttttaaatcatgaatgggtgtcagattttgtcaagggcattttctccatcaattaatatggttatataattgcttttcttagcctgttgatgtggtaaattacattaattgatttttgaatgttgaacaaaccttgtacctcaaataaatcccacttggtcatggtgtctgtttatacattgttgtatttgagttgctcatattttgttgaggattttgcttctatgttcataacagatattggtctgtagttttcctttattagagtatcttttactggcttgcatattaggataatgctggcctgatagaatgagttaggaagtgttccctctgcttctattttatggaagatattgtggaaaattcatattatttcttccttgaatatttggtagaattcattagtgaaaccatctggttctggtgccttcttttttggagggttattaattattgactcaatattcttgataggtatagtgctattcagattatctaatcctcgaatgaattttggtagcttttgtcattcaagaaatttgtcagtttcacctgttatcaaatttgtgagcatggagctgtccatatattcccttattatccctttaatgtccaaaagttcagtagtgattgcaggagtctgtcctgcagaccccagctcgtgcgacggatgaataacataccaagacaccaatatttagtgaaagagcagctaggggtccaagccgctcacagatactaaggaaggtgctgtgaagagtcagcagccacggccctgactagctagccctgtgggcatttatttagcacagttttaatgacaaaggctttgagtcaacacacctgtgggtaattaatctggttgcccccaccccggggggagctatcctgccgtgagtgatcaaaagttagttttaggaccacatgagtaaacaagctctttagataaactcctctacattcctatgtatctgtgccctaagctattaagtggattcggctgccttcagccaaacactttatgcaaacctctaggccttccaagagggtttgtgtttatatcctataaattcatcttaaaatttttgccaccagcctgactgaactcccaaaagtgataacctctccttcatttttaatattagtaatttgtgttttcatttttcttgtttagcatggctaaaggtttatcaattctattgatctttccaaagaaccatttttgttttcattgactttctattgttttcttgttttttatttcattcatttctgctctgattttttattgtttcttttcttctgcttgctttaggcttaagtatctcttctatagtgtactaagatggaatattgcttattgatttttcttttctttcttttctaacttatgcatttaatgctataactttccctttaaacactgcttttgttgcatcccacaaattttgatgttatatttttattttcacttagttaaaaacattttgtaagttcttttgaaatttcttctttgacccttgtgttatttagaactgtgttgtttggtttccaaataatttgggatttttcaactatctttttgttattgatttcgagtatcattccactgtggtctgtgaagacactgtaggctttctattcttttaaattggttgccggacgcagtggcgcacccctataatcctagcactttgggaagctgaagcaggtggatcatgaggtcaggagttcgagaccagcctgaccaacatgatgaaactccgtctctactaaaaatacaaaaattagccaggcatggtggcatgcatctgtaatcccagctactcaggaggctgaggcaggaaaatcgcttgaaccgggaggtagaggttgcagtgagccaagatcgcaccactgcactccagcctgggtgacagagagggactctgtctcaaaaaaaaaaaattggttaaggtgtgttttatggctcagaatgtgttctgtcttactgacttgttacctatgaatttgagaaaatggtttgttctgctattgttggatgtagaattctattaatgtcaatttgatccagttggttgatagtgttgttcaggtcaacaatatccttattgcttttctgcctgcctgcttgatctataattactgaaagagagtgttgacatcaccaactataatactggatttgtctatttctcctttcagttctatcactctttgcctcatgtattttgacactgttgttaggtgcacacacatttaagattgtatgtcttcttggaaaattgaccaattgaccttttcatctatatgtaatgcctctccttatctctgataattgtccttgttctgaagtctgcagtttctgaaattaatacaactccaactttcttttgattattgttagcatgatatatccttctttatctatgagtttttatatttaaagtgggtttcttggccaggcatggtggctcacgcctgtaatcccagcactttgggaggccaaggcgagcacatcacctgaggtcaggagtttgagaccagcctggccaacatggtgaaaccccatctctactaaaaatacaaaattagccgagcatgatggtgcatgcttgtaatcgcagctactcaggatgctgagatgggagaattgcttgaaaccgagaggcggagactgtgccattgcattccagcctgggcgacaagagcgaaactctgtctcaaaaaaataaataaagtgggtttcttgcagacaacatatagtcgagtcttgtttttatccactttcacagcctttgtcttttaattggtgtattttgatcattcacatgtaagtgattataatatagttagattactacctacatgtttataactgatttccatttattgcatttgttcttgtccctgcccctttttctggcttctctgatttaactgaaagttttatattttatcctattttatccttttacctcttcttttttgtctttttttttttttttttttttttttttttgagacagggtctggcttctgtcacccaggctggagtgcagtggtatgatcttggctcactgcaacctctgcctcttgagctcaagcaatcctcctatctcagcctcctgagtagctgggactacaggtgcatgccacaatgccaaactaatatgtttgtatgtgtgtgtgggtgtgtgtgtatgtgtgtatgtatatatatgtatgtgtatatatatatgtatgtatatgtgtgtgtatatatatatatatggccccattcttctcagcttcatggagtcttggcattcctgtgacacagttcaaacggggtctctccccccaccttccccatatatatatatatatatatatatttttttttttttttttttgtaaagatggggttttgccatgttgcccaggctggcctcaaactcctgagcttaagcagtctgcccaccttggcctcccaaagtgctgggattacaggtgtgaaccacggcacccggccttatctcctctcttggtgtatcaattatatttattttttcaattctagtggtcatgctagagtttccagtatacgttttcaaccaagtccaccctcaaataacactataccatttagtttgtactctaggtactttataacagagaacaaagtattaccatttccttcctttctttgcttatgacattactgtcatttgtttctcttatctgtatgctataattgcccaatacattgtttttattatgatttaactaagttaccctttagattaagaatttaaaatcaagattttattttatcttcatttatttatttcctctccagtgctcttcctttctttatgtgggtccaagttcctgacctgtatcatttttcttctccctaaagaacttcttttaacatttcttgcatggcaggtctgctggcaatgaatttcctctacttttgtttgtctgattaagctgcagaataacaatattaataatatcactaccaaaataattcctgaaaacagtttacagtctttccataggctttcttctttctcctttgatttaaaatggttttaaatagttgttcattgcccgaacactataggcaatatattacatactttacatcctccctttaatcatcaggtactttgttgggtttttgttttttctgagacagagtctcactctgtcgcccaagctggagtgcagtggtgcgatcttggctcactgcaacctctgccttcaggctcaagcaattctcctgcctcagcctcccgagtagctgggactacaggcatgagccaccatgcctggctaatttttgtatttttagtagagacgaggtttcgtcatgttggccaggctggtctcgaactcctggcctcgtgatccgcccacctcagcctcccaaaatgctgtgattacaggtgtgagtcattgcacccggccatcatgtaattttaaatctacaaataacgaaatactgactacttattctcagtccttatgttagtgtccttctatacctggttgtctgaaggttattctctagtatattcctcaggaagagctcgtgggaacaatattccctgaattcttatgtattagaaaagtttgcccacatcccttattcttgaaatgaataaaggaagtcatattgtatatacatccttggttcacattttctttccttgagcatcttaaatatactgctccaatttcttctggcataaaaaggccttgctactggaaagtctgataataatctaatgttttccccttaaaagtcacttgttctttctccctagatgtccaaacaatgtttttttttttctttgaatcccagtaattttctagaatgtatattcatgttggtcattctgggtcaatattcaatttgccctttcaatcaatatgtagtattaaatatgtgtttttatttaaggaaaaatattttcaaattatagtggggttttttgtttttgtttttgtttttttgagacagagcctcactctgtcgcccaggctggaatgcagtggtgcaatcttggctcacggcaatctctgcctcccaggttcaagcgattctctcacctcagcctcccaagtagctgggactataggcatgcgccaccatgtccaactaatccttttaatctttgtagagacggggtctcactatgttgcccagactggtctcgaactcctggcctcaaatgatcctcccaccttggcctctcaaagtgctgggattacaggtgtaggccaccacacctggacaatattattatttcttatggttcatatttcttagtatcttcataacattcaaggttcatatttctttatggttttggtttttgtccttaggatatattccaaaagggatagacagccaaaatgttacattttaagtgacttgaagtaattatttttctgtgaatggttatgcagttaggtccctttgcttcggtttgctttcagcttttacagatggctttttaaaataattttttctttaattttggctcttaattatttaaaactttacatgattcctaagtcaaaactatttttaaacagttatattcagagttctacttccatccctatttctaccaccttattccttccctccccatataggtaaacgtttttgaaaacgattgttttggtttatccttccattccactcagagttgcagatgggacgcatgctgtggggtgtagcataagcaagactttccatctactaggagtatacacccctgagtgcaggagcttcagctcacttgggtatattgggttgttgtgatgggggttgggggaaggtggagagagagaccctgtttgaactgtgtcacaggaatgccaagactccatgaagctgagaagaatggggctaaaaccagatcactagcctggcgcggtggctcacgcctgtaatcccagcactttgggaggccaaggctggcagatcacttgaggtcaggagttcgagaccagcctggccaacatggcgaaacctcatctctctctactaagaatatggaaaccacccatggtggcacacatctgtagtcccagctactcgggaggctgagacaggaaaattgcttgaacctgggaggcagagtttgcagtgagccgagatcgcgccactgtactccagcctgtgtcgcccactgcactccagcctggcgacacagtgagactctgtctcaaaaacaatacaaaacactgaatctatattttatttatttttattaatttattattattattattattttgattctcctgtctcagcctcccaagtagctgagattacctgtcaccacgcctggctaatttttgtatttttagtagagacagggtttcactatgttggccaggctggtcttgaactcctgacctcaagtgatccacccgccttggcctcccaaagtgctgagattacaggtgtgagccaccacgcccagccgacactgccctaactctcaagttgcatccttactcgaatagtatgacagtgtgggaagcagcatgggacaatgtaaaaaggaggcatgtttctggcttctgctacttactagctgtgtgtctttgcacgagtttcttaacctctctgggcctcagtttccttatctgaaaaataacaatgatagtattcccttcacagggccaaatggaatactatcaggaacactacataatggaactcaataaataatagctactgcggccgggcgcggtggctcacatctgtaatcccagcactttgggaggccgaggcgggtggatcacaaggtcaagagatggagaccatcctggccaacatggtgaaaccgtatctctactaaagatacaaaaattagctgggcatggtggcgcatgcctatagtcccagctactcgagaggctgaggcaggagaatcacttgaaccccggaggcagaggtttcagtgagccaagattgcaccagtgcactgcagcctggcgacagagtgagactccgtctcaaaaaaatacctatctatctatctgtctatctactgttattcttacctggtcatttcctttttgtttcacaggaaatttgcgagaatccccgatttatcattgatggagccaacagaactgacatctgtcaaggagagctaggtaggaaagtgcctcaggtcagatcctgccagatgatcaaggggtgattacaaggtgtgatccccttccaggaggtaaagggacaatctgtgcttgcttccagtaactttttggaagattttttataacagttgctttatggtcgtttatctacatgctggcgattgcttcatttcctcctacatgcctctttagcactctgccatgcatcacagggggtatctgcatcctgtggcctcctctccagtatctcaaggacacttacataccccactcagcatgacaaaagccctgcttttcactgtatcgtctttcttggaagacagctctgtgactgtgcaccaagcatgccccttgggcatggagattctagatacacacacaaaaggcatcgccaaggaaagcacttgtaactggaacccttgtttaaattgccccagcatagctccatcttaaaagagtctttccacaaagatggcatccgccatgtggatgagcatccaattttctctttgattggttagcttgactgctccatctgatcttcctctctctcgacctcttgttcagaaagtattgtctttggtgtggactataagcaagctctgtgaagtaaaattggagagaacaccaacagaaacaatttaaatttgaggaaaagggggcacctaagaccaaaggaatttggcttatttcattccagaaggggaggctgagaataaatcagatgaatatctgggttcctgcacctgagggaaggcttcctgcagagccctgggcataataatctgggaccttcaaaccaataacctctttccaaggaaagactggctgcttccaaggagggtaggggagagtcgggctgcaggcagctctcagtctcccctgcacactctcagttgcatttcacttaacccatcctccttagaaggcagctctgtgaccaggtacaccccctattatatatatatatacacacacagagagagagagagagagagagagagagaaagagagcaaagtgttacctccaactacatacagtactctgtcagaaaagaggttcagagaataagaaaacgtcccgagctcattccgttgccagcaatgtcttactgccccctatagacgggttccagggcagctgcctacctggccttccttccaatacaaatcatcttggtggatggttctctgaggctcagtcttcgctgaagtcagaagaggaattggactcacattgcaaaggcacagggcagggcagatttcctacaggtgttaggaagaacaacccagttatgatcacctactgctctgtctccattgaggcctaaaaaggaagtgagtttatactgcagttggaggaactgcctgcagccttgaggaaaatgtctagtcacaagggagtaagttacctgttgatcatattgtcaaggaattcctgtccaattctccttccctgggttgacacctctgtaaggtcagatctggaagtaggagagtgggcaccaagggagtccccgttcagggaagtggagtggctggctgggattggggctttttcttcccaggaggagcaggagtgctcacgatctgtgccctgtgtctgcctgcaggggactgctggtttctcgcagccattgcctgcctgaccctgaaccagcaccttcttttccgagtcataccccatgatcaaagtttcatcgaaaactacgcagggatcttccacttccaggtgaggtaatgagagtgtagttaagagggccagcggcaggccacccaccgctggtctcctggccttgacttcccagaagctggaggaaacttcccacccatctacccgcagcggcaacagtcggcatggacccccttaaggcttcaagcctgggaggaagcagttgcttatctctggctccctaatccctcccccaccaccttccactatgtcccagaaagacaggaagacatcctgtttactgtgggtctatttttgtctttgcagctgtctggctgcttttattgcctgcagcccttctcaagtaggtccctaagatattagcactgtgacaccacaggacccttcaggttgtacaggaacccctgtccagggctcctgtatacttcttcctctctaaggcatggcggtaccaaggctatcactcctctcttccaagccctggaagaagagtctgcttaacctggggatcaggcttcttgtttgccctagaactgaatctgatggttctagaatccatccagctactggaaattttctgggtcccagtcaccttggcatagagctggtgctagagcagaaccaaactgaattctacctgtgagggtctcgtagcttccgggatgctggggagtcagcctgtctccagcttcaaaggctccctcatgtcccaggatgacccacattatcagttcttgctccccgggtcttgcacctcagcacggaaggcctcagaaaaggtctgtctccaggctcagactccccctcctgccgccttgggaacatggcatatttaaagggtctcagatctaaagggccttacatacaaatatcagatagatttctgttctcatttcaatgagggagaaagtgccattgaaaaggagactaaaccacatttggcccttttcagttcaaactgattcattcaaaaaagagcgacatccaaacttgaaatgattgaacaatgttcctgctacagctagaatagattctgggtcactttgttcctccgtttcaatccttgttcttcagtttggcatcaagaaatacctaaatcagcacagtgccttcactgcatagttcccaatcctggccacattgaatcagctgggggcacctgagagtgctgacacccaggccctgccccagacctgctgagcaggagaatgaaaatcttacatcctaagacactcatggagcacctactctacccattactgggctggactctgtggaagacatgaagtatatgtaactcacttccagctctcaaaaagcacccagtccagttagagacagatttacacaccccaaacacaaaataggatgaacaggcacccagatgcagagtccaggaaatgatgctgctttgggattcaagaaccccctgaggaatgtggaggaaggacacatttcctaacagtaatttgagtatgtgactctgtgcgtgacgcttctgtgcagttctggcgctatggagagtgggtggacgtggttatagatgactgcctgccaacgtacaacaatcaactggttttcaccaagtccaaccaccgcaatgagttctggagtgctctgctggagaaggcttatgctaagtaagcaacactttagaatgtgaggtggggctagaggtgagaaagtgggttgcaaaatccagccgagacctcactcacaggaagaggcatgtgcctctatacgtgcatatgtgtgggcatgcaagtccaactgtgacccaaagttagagatcagttccaggcaacaacagctctaactaaaaacattaaatttaagagtagaaatgaagatttgcatagaagacctttagctttagcttaccatagcgagttctttcattgcacctccatggtggcattgcaagtcttggatcagagcattgttatctctggagctcagatcccagggtctcgcttggctcaacctcatgtgcttatagcagatttataaagccatgttgtctctcaacttaaaagctccaccccagatgctaataatggattttttaaatttttttgaaacaaggtctcactctgtaatgcaggctggagtgcagtggtgcagtcacggctcactgcagcattgacctcctgggttcaaggtgctcctcccacctcagcctcccaagtagctgggactacatgcgggcatcaccatgcccagttaatttttgtatttttttgtagagacggggttttgccatgttgcccagactggtctcgaactcttgggctcatgcaatccaccagccttggcctcccgaagcgctgggattgccggtgtgagccaccacaccggcagctgctaatggctttaatgcagcccttcctcaacgttcaggatgtagtggaaagagctctcaggaagtggggatagctgggtttcaatcccagtgcttctggctctctgtggtcttgggtgggtcacttagcctcttgagctcagtttcttcattatgaagaaagggaatcattgtttccatcccatgagctcatagggttaatgtggaattgatgaaagaacatcacagcatccaagaggtaaagttctggtggcagtggtacctgggttttgttccctggaactctgtgaccccaaattggtcttcatcctctctctaaggctccatggttcctacgaagctctgaaaggtgggaacaccacagaggccatggaggacttcacaggaggggtggcagagttttttgagatcagggatgctcctagtgacatgtacaagatcatgaagaaagccatcgagagaggctccctcatgggctgctccattgatgtaagtctggggtgtggggcacagggtggggagctccaagtgtcaggaagccttttacccaatgaagggcagcatagagcttttgtgtgggacagagcgaatgttttgtttgaggaagcaggaactggctctcaactttgaggactgggaatttctcaagggagaacagttcttccggattttcaataaagacactggtcaaggacatttcaagccctggaatgtcagtggaaatcagtccagaggcctgtgtcagtggaggcctcccttgctggtgctcctcagtctcagcacgctcccattaagctggccacgtacttggctgtggacctgagcccaccatttccctaagaaagcctcccagtcactgggctttcaccacacctccccgcttgagacgtgggctttgtgttgttacctgggagaagctaagcctgcagcacctttcagtgcaaagaaatgctgtgaactgagacaggagccaagggtagggagatggccgcccatggccaggcctccttcagggggcatgccttccctgagggctgctcagtatattgatatgataatcttagtggtttccattggggaggatggggctgaagctgaattcctgccccttcttctcccaacacgcccaatggacagcttggaaggtcagttagcacacaacaccatggatgaactttttttctgtatcacttttctccgtctttcctccattcgtgctctgttgatctctcctctctccctttgtctgtcccatctctttctcctctctccttccctttccacccttctgtgtttgttctctccctcccctgtgttgttccctacattctccatcgggcctcaggatggcacgaacatgacctatggaacctctccttctggtctgaacatgggggagttgattgcacggatggtaaggaatatggataactcactgctccaggactcagacctcgaccccagaggctcagatgaaagaccgacccgggtgtgtacacctccgattatcagaactgaccatccctccaacccacatgaccccgccctattagtgtcagactcccctcagcagccagggccttacccacacacccccacctggcacctcccaagggtctgggttgaaataacttgctcagccaaggctcctgaagagggtgcaagaaccaggattttggagggaatctctgctggagtttctgcatattccatggtccaggcagttcctctcataacgaactatcagacagaaatacttgtaaagatacttcatttattttgaaatatttttcctcttctaatgtattcatttattcattcaacacttatttttgagctcctactatgttccaggcactcctctagcaaacaaagcaaattctctcctctttttcaatatttgtggaaaaagcaaggtctccctcttgtagagtttatattctagtattttcataagttatacctgctcactggagaatactgagccatacagaaaaacacagaggaaaatttcacttatatttttccccatgtaaagataaccactcttaacatctagtatatgttcttccaggatttttctatgcacacactgaatctgtatttttatttttaaaatgttatcatattgtatgtacctctttgcagcctgcttttttcagttagttttttttgtttttttgttttttttttttttttggaaaccaagtcttgctctattccctaggctggagcacagtggtgccatctcggctcactgcaacctctgcctccaaagttaaactaattctcctgcctcagcctcccgacatagctgggattacaggcacacaccaccacacatggctaatttttgtattttttagtagagacggggtttcaccatgttggctggaatggtcttgaactcctgacctcaagtgatccacctgcctcagcctcccaaagtgctgggattacaggtgtaagccaccacacccggcctagtttgatattcttaatgtgcccaaagtattctcctgtaacattttttaatagctacacaatattcaaacacacagatatgttataatttatttacccaataccctattattggaaagttgagttcttttttttctttgttttgttttgttttgctactattctaaaatgctataacgaacatcccaatagatacatctttgtatacatccatggtgacttccataggacagattcccagcagtagaattgctgggttgaatgatatgcttagggtaatgacagaagagtcatttcaagcagcttcctaggtctagaactaaggattaatgagtcttcccgccccctcccagtctattcagcatgatctggatcatgaggactgagatctggaagagactgagatctgggagaggctgagataccaaaagccctggctccacccatacccctcgccctgaaaacagctctaggaattccgcggcctagcaaggctccgggaagctccttttaaagctgttacgttagtaggcacatggaagccatagagagcctatccagggctcatgggactttagtgatcctgcccttctgccaaggatcccccatggctgcaacttggaaatttctgcaaatggaagagctactccttaggcacggtcatgtctgagcagggatctcctcgggctttcttagaattctctccctgggcactgggactcttgatttcttgaatattatgttccaggtgggtgtggaggaggtgaggggatgtaaagaaggctagacttggccaggcgcagtggctcatgcctgtaatcccagcactttgggaggctgaggcgggtggatcacctgaggtcaggagttcgagaccagcctggctaacatggtgaaaccccgtttctactaaaaatacaaaaaattagctgagcatggtggcacgtgcctgtaatcccagctactcgggaggctgaggcaggagaatcgctggaacacgggaggcagaggttgcagtgagccgagatcgcgccactgcactccagcctgggcgacacagcaagactctgtctcaaaaaacaaaaaagaaagaaaaaaaggaaaagctaagacttacatgtgtcacttaaccccttttctcaacctctttctcttccaggaatagtcaacccctggatggcttcaggggaagggggatcctgaagcccagggcagcctccaactctaccccttcctcctttgaaggatactaaggggtccagaaaggaggggcaggacactgttacccaccccacatcccagcatccacattgctctctgatggtcaggacagagccttctcagggagaccagcctgtctggagctgtgtctcttggcactcttaaagggccactgaaggtccgttcgtggtcgtgaggcacactttcagggagcagagtggtctgtgtcttcacagagcccggaaaatgaactagtatgaactttgcctccaagcagcagaacttctgttcccccgcccctaatgggttctctggttactgctctacagacaatcattccggttcagtatgagacaagaatggcctgcgggctggtcagaggtcacgcctactctgtcacggggctggatgaggtaagcctggtggggcttggtggggcaagggcaccctcctgggttaacctcatgaagtcaggacttagctgttggggccccttccctgtctgcagagcttgcctccaatcaggacattcagttcaaggtccaagccacgcctgggagcagaggggcctgtgaaactggtagaggtggatcctgccacagttggtgcacagtttatctttgcttttcgtgctaaagatggcaatttttccaacatttccaatgaacaaattgaaatatcacttaactttgcttttacaaagttggtttcatgtgttcttgagcttcctgttctctcgtgttcagatagctacagttgtctctgggtagccacggggactggttccagaagccccaacagtaacaaaatctgcagatgctcaagtcccttctgtaaaatggagtagtatttgcatataacctatgcacatcctcccatatactttaagtcatctctggattacttacgatacctaacacaatggaaatgctatgtaaatagttattgcactgcattgggtttttttggtattattttctgttgttgtattattattttttctttttttgaatatttttgatccacaattggttatatgccaaagccatggatacgagaggctgactgttctgttttgctccttctgggacttctgggttttcctggaccatgtctgagacaggaacgttgtaagacctgttgcacacagttgggcaggttgtgccctgtacagagggatgggctgagaggggcagttgcctgcatcacccattgcagcagactggagggagtctgcttgtttgtagttcctcagtcagcaggggccttttgtctttctttctttctttttttttttttttgagacggagtctcactctgttgcccaggctggagtgtagtggcacagtctcggctcactgcaatgtccgcctcctggattcaagcgattttcctgcctcagcctcctgagtagctgggattacaggcgcgtgtcaccatgcccagctaatttttgtatttttagtagagatgggggtttctccatgttgatcaggctggtctcgaactcctgacctcgtgatccgcccacctcggcctctcaaagtgctgggattacaggcgtgagccaccacgcctggccagcaggggccttttttctaatttatatgaagacacctaatttatatgtgttagcagggccctactgtttatgcctcacctcctcccccgaagctcataacggcaggatgttcctgagaaaattgcctcttagaagatagagaggagatggccaagccctaagttaggcagactcaggaggaaaggtctgacccaccccctgccattccccagcacacttgtgattaatctccttggccagagccaggcagaacaccctcgcgtaagagatttgccccccagccccgtcccagccctcagcaagacagaagattccctttccagagaggctgcagagcatgagagctctttctgtgtgcttaaggtcccgttcaaaggtgagaaagtgaagctggtgcggctgcggaatccgtggggccaggtggagtggaacggttcttggagtgataggtaggtgaggggaccccacgggattggcggtggcggggaacagggtccgggacaaggctgtgttgggaactgagccatgagagtattgaagatgcttggtataaaatcaccctcaaaaccaatgatccgcagagaagaggggcacaggtgttggctccagggaagggccaggagtggaagcggggtgctggggacccagagaggttgctgacaaccattggctggaaaggaaggattccagaaagcgtggggaaggtccaggcaggaaaagcgtatgaatgcagggttctgggctagagaagtgacttcccttcttggggtcttgtgttgcctttcctgtgaaatgggaacagtattattagcacttaccttgtgggctgatatgaggagtaaatgggactgtttttggcaagtgctgagccattgctaagattcccttacccgtgctgtccctgtataaaggcacaagggccctttgaaagaattttactgcttatcattgaaaggaatagactgggggcaacaaaaataacaaacatgcgaagttattatgaaggctccagcacatttgcaaaacctccatggtcctactggttcctgattacctccactgaatgagaggcaattcattactgaatgagccataagcgcctcttatttcgagagggggatggcaggactcagtagaggagaaggaccgcacccaggcagcctgggcccctcggctcctgtacttatatactgctgggtacttcttagcccagcatgtaattactggttcgttcagtcattcgtttagcaaatgtttcttgggcacctactacataggaggcacaggtcaaggcactggggatattctgtgaacccatagcctcccttgatacactgtgattaggggctgatcctcatgtcctgactgcctcctgcagacattctcatgccttccttcacctatgcacgctacacctatccttacttcctcagtgctgacttctgccaggccctaggctacccacctggggatgtagaaatgtagaaatgaacacagacacgtgggccctgtgcctgtgggtttaaggtccggggaaggacaggcaagcacacactaataattgagatgagtgccacagtaaggatcacaaagagggggcctctgcacctagtttgggtgggaggggaggcgtagagaaaggttacctggagggagtgacattggaactgtgctctgtgctctgggaaggccctcagtgactcctcagttgtctacttcactggcccaagtcacctgcagggacgcttgctgtgttctccagcctcagagcttggtgtgcagccctgccctgcttaccatgatgctgccatcacaggggctggagacaagtggacccaacgctgttcactcaaggagattccctttgctgcatccctcctcctggtctcaggaatctccatgtcccctgcagtgttctctgactgactccaagcgcttcctccaccccttacctttccagggagcacccagtttagttgaattctcctctgtgagcctgaaacacacatgcactttattgccaccatagtgaggagagagagtgtgaaaactgcccagcctttagaagcacaatgcttgattatttcccagcacaggaaaggagatgtttacagacttggcctttttccttagtaaatcagagtttcttattatatgacagacactatgctaacagctttgcatgcattattgcatctgcccatcccagccctgtgaacaggtgacataatcattttccttttgcaattgaggaagcagagtctgacagaggttaagtgacctgcccaaggttgcatagctagccctattattaaacggaactcccagtttgtctatgtccagaacccatttttttttttttttttttgagacggagtctcactctgccacccaggctggagtgcaatggcgcgatcttggctcactgcaacctccgcctcccgggttcaagtgattcttctgccttagcctcctgagtagctgagactataggtgcccgccaccacgcccagctaatttttgtatttttattaggacggggtttcaccatattggccaggctggtctcgaaatcctgaccttgtgatccgcccacctcggcctcccaaagtgctgggattacaggtgtgagccattgcgagcagcccagaactcaattcttaacctttaaagtatgatgagaagaaggatcaagccctcaccagcccatttaaggagtttaggctcagtcttgaggatgtgagaagtcattgctattgggtttcacactgaggttaacaggtgaagtcagcattttggtagttcacagcagctgcaactctttgtatttctctgatacctcctgtcccaacctacatcaggccttcccttcttcctgcttccttaattcctccattttcccaccagatggaaggactggagctttgtggacaaagatgagaaggcccgtctgcagcaccaggtcactgaggatggagagttctggtgagtccagaacccaggaagacccagaagggtaagggtggggaagagaggggaaatctcagacctcagtccccagctaaggttatcagattccagcccttgggagatctgggctgtgttctcctccagcccaaggcccagcaaggatgaggttctgagaggagccttccaggccacagggacaactgagcccaggaccaggccaacatgacatggctcttgcctcctgtgtgcccctccgccacacactctattccagccacaggcaccctggccttagcacaattcttttctgagcctaggaagctccacttaccctgatcttccaacgtcaacctcaccctctctcaggttgtttctattcaggcttcaagtctcagcttaaggagaattttcaagtctcagcttaaggagagccccctaagttccccgaggactgggattaatttatgatgctcatcacccttaaaattgtttgcttaagccgggcgcggtggctcacgcctgtaatcccagcactttgggaggccgaggtgaacggatcacgaggtcaggagatcgagaacatcttggctaacacggtgaaaccctgtctgtactaaaaatacacaaaaaaagtagccgggcgtggcagcgtgcgcctgtagtcctagctgctggggaggctgaggcaggagaatcacttgaacctgggaggcagaggttacagtgagcccagattgcgccactgcactccagcctgggcgacaagagagactctgtcttggaaaaaaaaaaaaaaatgttgtcttagtttaatgtcaagggaaaggttttgggtgtttttattactttattttttatttaaaaactataatagagacgggcctcgctatatttctcgggctggtctcaaactcctgggctcaagcggtcctcccaccttggcctcccaaaatgctggcatgtgggcctggtcaacatatgggaccccaactctacaaaaaattttaaaattagccagatgtggtggcgtgtgcctgtagtcccagctacttgggaggctgaagcagggggtcacttgagcccaggaggttgaggctgcagtgaactatgattgtaccactgcagtccatcctgggcaacagagcaagacactgtcttaaaaaaaaagtgctgggattacagatgtaagccaccacacctggccttctattttttatggatatatcatagctatatatatttttggggtacatatgtacccatattttgggggtacatatgtacccatattttgggggtacatatgatattttgatacacatatacaatgtgtaatgatcaaattagggtaattgagataccatcatctcaaatatgtatcttttctttgtgttgggaacattacaattcttttcctctagttattttgaaagatatataggctgggcgtggtggcttatgcctgtaatcccagcaccttgggaggctgaggcgggcagatcacttgaggtcagaagttcaagactagcctggtcaacatggtgaaaccccatctctacaaaaatacaaaaattagccaggtgtggtggtgtgcacctgtaatcccagctgctcagctggctgaggcaggagaatcccttgacctcaggaggtggaggttgcagtgagccaagatcatgccactgcactctagcctgggcaacagagcgagactctgtctcaaaaaatacacacacacacacacacacacacacacacacacacacacacacatatatatacacacatatatatacacacacatatacacacacacacgtctgtatatatatgtgtgtgtgtatatatacacacacacactattctatatattcttgtagagctatgtgtgtctcctgtgctattgagcatgagccctttttttttttttttttttttgagacagagtctcactttgtcgcccaggctggcatacaatggcgcaatatcggctcactgcaacctccgcctcctgggttcaagtgattctcctgcctcagcctcccaagtaactaggattacaagtgcccgccataatgctcagctaatttttgtattttcagtagagatggggtttcaccatgttggccaagctggtctcaaactcctagcctcaggtgatccacctgcctcagcctcccaaagtgctgggattacaggcatgagccacagcaccctggtgagcactagagcttatttcttctatctaactgtatttttgtatccattagccaccctcttttcatcctcccctctccttcccttcccagcctctggtaaccactgtctgctctctacttccatgacatatgctttgttttagctctcacatatgagtgagagcatgcgacatttatctttctggccctggcacatttttgaatcattgttagaaaagatgatggtttggagtagatacatcagaagtgacagcgtttgccctaaaaaggaaagacaggctcctctgggaccctgaccaagttcctgtgaactattttattattgtgctgtgttagtcctggggtcttccgttcccagccctcctcacctgctcccatatggctctctctcttcttccaacctctcaggatgtcctatgaggatttcatctaccatttcacaaagttggagatctgcaacctcacggccgatgctctgcagtctgacaagcttcagacctggacagtgtctgtgaacgagggccgctgggtacggggttgctctgccggaggctgccgcaacttcccaggtgggagatgctcttgatggggggagggtctaagccgaaaaagttccaggcagaagaagcctaactagtgcttattaagtctctctgttccagacgtccactatcttattaaaccttccctgttttactgagaaggaaaccaccatgctgagaagtttgcaatagggagctggtagcaactttgaagcaggaaactgtgggaacaatgcagatgctgcttgacttacgatgaggttatgtccagataagcccatccatctttgaaaataccctaagtgaaaagtgcattcaatatgcctaacccaccaaacatcatagcttagcctggcctaccttaaacatgctcggaacactgaccttagcctaaagttgggcaaaatcatctaactcaaagcctattttacaagaaagtgttgtaatatctcatgtaacttacttaatactgtactaaaagtgaaaaacagaatggttgtacgggtactcgaaatccagtttctactgaatgtgcatctctttcacattgtaaagttaaaaaattgtagccgaaccatcctaagtcagggactgtgagtactgtgtcagtaacagtaagggcactattggagaaccaagttagcagctgctgcaatagttcaagtcagagatgatgaaaacctagaccaagtcagtagcagcagagatggaggggagacagcagatttagggagagcatattgggtgatgtagggaaggaagaagaatgatgtcaagattcccagttggggacctgacaacattgcaacataagacacacaagaagatcgggtgggtggctcatgcctataatcccagcactttgggaggcagagccaggaggatcacttgagcccaggagttcaagaccagcacaggcaacatagtgacacctcatcgttacaaaaaataaaaaaaaaaatgaggtgggaggattgcttgagctcgggaggttgaggctacaataaactgtgatcatgccactgcactcctgcctgggtgacagagtgagaccctgcctcaaaaaaaaaagacacacaagagaaaaatatcagcgtgttgtttgtttttggtggagttaattgtggggttctagggaaaggaatttagcttgggacatggaaagtttgaggttcctgtaaagtgtcccagtgaagatttgtaatagagcatcggatgcgcatattagatggcacttggtgatatgataagaactcaaaaaatatttgaggaataaaggaaagaagaggccagacgtggtggcttatgcctgtaatcccagcactttgggaggctgaggcaggcggatcacttgtggtcaggagttcgagaccagcttggctaacatggtgaaaacccatctctactaaagatacaaaaattaaccggggatgatggtgggtgcctgtaatcccagctacttgggaggctcagtcagaagaatcgcttgaacccaggaggcggaggctgcagtgagccgagatcgcgccactgcactctagcctgggcaacagagccagactccgtctcaaaaaaaaaaaagtgagagagattgaggctgggatatatggctcaggcatcatgcgcgtgtagggggcagttaaaaagcagaagtaagaaagattgcctagggaggcaggaagggtgaggtgagaggagaagaggcccaggaccagattctagtcaccaacagcgtttaaggggcaggtaaggaaaacaaaaccatcagcaaagactgagaatgaaagcccagagaggaaggaaaagccacacatacaatcagtacagctccatctgaataaaggtagcgcccccccccccccaaatcattagagaaatgcctgaatcgtgttttctgttgatatttcctaagcacctagatgtagggaatagaaataaatggctccctctgtctcatccccttcctgccctctgagaggcagctgtgaatgcgtgcttcctttctgggggtgcagatactttctggaccaaccctcagtaccgtctgaagctcctggaggaggacgatgaccctgatgactcggaggtgatttgcagcttcctggtggccctgatgcagaagaaccggcggaaggaccggaagctaggggccagtctcttcaccattggcttcgccatctacgaggtgtgcagtcctgattggctccagcccaggaaacatactttcccagagaggacgcttccaggggcttctagaggggccctctggcttcctcaatacccagtgacccacagagctcctggtatcaggaccacttgtgtttgtaacaagcaaaaaataccagggggggcattagagaggcagtggagcgggcctggcagaacaggtgcctgggggtcaggcttccgcatgcgggctgcagttgctggcattgccttccgcaggctcctcatcctcattcacatctgaagcatcttcctttctgtttcttctcaaggttcccaaagaggtatagcagcagcagcggccagcagttgtgtgcagcactacccagggggccccgagtctgtctgtggctcgtcgagaagcttcctggtggggtttgtgggcaggactgtgataggagagggccttgcctgtgttatttccactgcagagcaggtgcctcagggcattgcatgacccatgactaccacccccaggatgtgcactttctccctcgcaccagacactgcacgtcacacacatgcctttgcacactcaccctcctccacgcttacagccacacacacagtcacacagacgcgttctgagggtggctgcccgcttgggatggaggaatcacttccctcagaacccagccaagtcctctaggcctccttgggggtccttccagcctgaggggcttcggagctgaggagcagctgttctggtaagtgtccctgagtgtggggatgacacatttgccattcactctgaatcacaacagaaaaggaagaggaagtgaggtagggaggctatttaagccttgggagtcggaagtagggaggttgaaactgtgacatgggtgaccagggagttgggaagggacccttggaggtggctgtggcaggacaggacgttcctcccgaggggctcatgtgccctgggctctccccatctctcagatgcacgggaacaagcagcacctgcagaaggacttcttcctgtacaacgcctccaaggccaggagcaaaacctacatcaacatgcgggaggtgtcccagcgcttccgcctgcctcccagcgagtacgtcatcgtgccctccacctacgagccccaccaggagggggaattcatcctccgggtcttctctgaaaagaggaacctctctgagtgagtgctggcccagctttcccacgtgtttctaaaagctcacatggcccactccagaggttgaaggcatgaggcagctagacacgtctcctccagggtccttctgctgctcctgagccactggccacattacccccattcattcattcatccattctgtgatatttattgagcacctactatgttccaggcactgtcctaggcactaaggatagagtagtgaagtaaacagaaagaaatccctgccttcatggagcttaatattctaacatgagacaataatggataggaaaaacatatgtagcatgttagatttggagaggtgatatggagcaaaaataaagtagggaagagggataggaggtgttggggatgcttgaaattttaggttagcatggccaggaaagccacatcctgtccctggccaccacagatgagctcatagcccctgccactctgatctctgtccttggaagatgcaccaggtccatgggtaggtggctgggtcatgcctttggggggctctgagcaatactaacaagaacctgcgtgcctgggcttggctgtcggggatggtgctgacatggggctggttcctggggttggggtgttccaggggttctctagaggctggttctggcttggctgccaggaagccgtgcaccagagcaaaccgtccacgggcctcctgcttgcttctggtgacactgagaccccacatgtctgtattcctcacagggaagttgaaaataccatctccgtggatcggccagtggtgagtggtttagatcttctgtgcgaaaagtccagagggtccccttccctgaccatgcaggggacagatggtgcaggggagaatgggcactggcagagggaatgggagtctgggctgtgctgagcagtccctccttggcactgcaaatcctactttggcatggccagaagtaatcggccttaagcaccgggggccattgaggcagttcaggggctgggaaatatggaagagggtcctggaaaggagaagcaatttgaacaatcggagggaacaaggccacaggaagggatgacaagagccgcagcgaacactggattctgagactggataacattggatttcacacatagagaaaagaaagtaagctggtgccggacctggtgttgacacttggatcctccacttaccagcggggtgacctggacaatttctgtaatccctctcactcagtttcctactcagtaaaacggggatgataatgtgccttgcaaggcttttgtgaggcttcatcaatgaggtgatgtatgtgaagtgtctggcacagcatgggcactcaaacagaggtgctttttcacactttacaccttacaaggtacttttcacatgtgtcatcgcgatacttgcaaggttgctgagaggtagatggggttataatccctggtgttcaagaaaggaagcagaggctcaatggggttgaatgacttctctgagttcacagagctcagtaagtggcagggttggaactcacattcagactctctgactccagacttaggtttttccgcacctccacgctgaggccagccccaggcagtgagaagcccaaagtccgaagcacagagtgctgtgtgttgggctctgtgtgttgaggagtcttgtgactgccttggggctttgggctgtagtcagctgacagtcctttgtgctctgtggggatgacgtaggccaatgggaggacaaatgcccctctgaactgtcttctgggcagtgacagtcatggtcataatcctgaccctgagccagtgccaggtctccaagtgccttctgaatgaccacaggcgattggttttagtggtaggtgtgtggggatctgttctggtcatctggatgctggtcatcggtgtgcagtattgatcaggacctgcaaacccaaaagcttatgggagctggcacgtcacgtgagtagagcaggcaggtgcaggggtttttgatgtccctgcactgacacagttgtctgcagttctcaattgacatttggctccagtgtcgagggtcaacaggaatgttggggcgtggggcaatctggaagacacagggagcagggcccttggctcagctgatagttgccgcagggattacaggcccagggcagcctgccacagctggggcttttaccaaagaaaatctccctatgttaaatgcttgctcaaaaatttttaaaaaatattctgtaagtcaaaatccattgttaggtcagtttgagagagccatgtttttggtgttttagtaaccaatttcatttttttattatttatttatttgtttatttttgagacggagtttcactcttgtcacccaggctggagtgcaatggcatgatctcagctcactgcaacctccgcctcccgggttcaagcaattctcctgcctcagcctcctgagtagctgagattacaggtgcccaccatcacgcctggataatttttgtattttttagtcgagatggggtttcaccatgttggccaggatagtcctgaactactgacctcagataatccgcccacctcagcctcccaaagtgctgggattacaggcatgagccagcacgcccggccaccaatttcattttttaaaaaaggaagaaagaaaaccttagccagaagatctttttccttgccatatgcagtaagagtagattataaaaacaaagtcagagcagtcactggtgtctgggcatggaggagaaagaagaattctcttctcccttcaccctccatgcccctttttggctccatgtgattcagatttctggaccctggagccccaccccaagctaaagaccaggatacagggaagccaaaagccactggcggttctgagaacttacttttcacttattctgcatttactgtttccttttcttatgcagaaaaagaaaaaaaccaaggtaggtgtgtgggtagagagcatgaagtgtgtgtactcatgcatatgtatgtgcatgcatgtgaagtgtgcatgtgtgagctcatatgcatccatgcaccagacttgcctcttcctccccctccttcctgagcttctgctggggccgagcgtgcagtaatgacaactacgatttgctgggggaaggctacgtgccaagcactcttttaggtgctttccatgattaattccttcctcacaacagccctatgagattagtactataactatccccattttcagagggagaaaaggtacagacttgactaacttgcccaaggccacacagccagagaggggcagagccagtacttagagccaggcagtctgggtccagagtccgtgtcctgaaccacaagaggccatcatacgccatcagatttggtgctagcatttctggtggtgcctggtggtgatggatccatcacaggggtcctccaggtactggtgctggcccagaccagagctgacactcctcaggcactaccacattccaggcactgtgcttggggtcagtccctctcttttttttcccccccaattataacagtatctacaaagtaggtgctgttatttttcccctttcacaggtgagatagactcaaagaagtgaacttgcccaaggaacagaactaatgagtggggaaaatggaactggaaaccatgtctgtttactccaaaacctgtgtttcttgccctctttctctgatgccagccccctacacttcaaggcctgtgttgtccagacccacactcgggcctgccagtgtgtgcctggcagggatgctccatggccacaccatatccatcctacacatcccccctcagactgtgacctccatttgctctgggatccccacaagcttcagctgcttgagcaagacactgcttagaaggcagagcaagccaaggcctctggggcctgctgggagccaaagctggggagccgtttccacgggtctatctgcttgagctgtcctagatgagcagcatggaagggcagtggtgcatgagtccaggcgggctgcttttctgctccgagaggctctgcctgcccagttgttctctgcattgcagcctcaatccccacagccttgccttcccccggctttccctacaggtgcaccgcatccacagtgttggcaccatgcagcagccgctctccgtccttttcatatccttgtcacttgcacgagcatgtcttgaaaatatcccttgtttgtgtagcatcttaaatgtttttgcagtatgattttgcattcagtatctcatttgatccccacaagagccctatgaggagggaaagcagattttaccattaaaggatgagtaaactgaggccagagaggatatttttggttttttttgagacagtctcactctgtcacccagcctggagtgcagtggcttgatcttggctcactgcaagctccacctcccatgttcacaccattttcctgcctcagcctcccaagtagctgggactacaggcacccaccaccacacccagctaatttttttgtatctttagtagagatggggtttcacccagttagccaggatggtcttgatctcctgaccttgtgatctgcctgcttcggcctcctaaagtgctgggattacaggcgtgagccaccgtgcccggccagagaggatatttcttatatgaggggcagggctgggattccagcccagtgttctgatggctcacccactgaccatgccactaatccgtgtcctttttcaatctatactttgcagggttgtagaggttcctttgaggtgcctcagtagctgccatggtgatgtggggtgctgagggcaaagagctctgttctcattaatcagagaagcttgtgtttttatatacaccatgtttctgcaggaaatttaatttgaacagtgtttccatctggaaaaaaaaaagtctacaaaatacttgacaatcactgcactagatcatgctgcttttagcattcttagcatttcacgtgctgagctctcaatactctaccatgaggagggatggagtgggtatgaaaagataaagaactgaagtcacacggcttgtcagtggcagagatagagcttgaaccgaggttgaagagctcccgcctattcctttcctcttctcactggataaagctgctccaagagaggtgctgcctcagtgtgcctgttcagactgtaatcctcccttccttcctgcctcctccctcctctctccagcccatcatcttcgtttcggacagagcaaacagcaacaaggagctgggtgtggaccaggagtcagaggagggcaaaggcaaaacaagccctgataagcaaaagcagtccccacaggtgtctgggcatgtggcatgggtggggtggccagcacgctacaggggcttcctatgcgcttgggatacacaggggctggaggcttcccaggagtttgtcttgaacatctggaggtttgaatttgtcccactgaccttttctttcagcaagttcccctgaaatttgggctgctgcttgggtgaatatcccaggatgggggttccattctaggagtggactggcaggctgagcctcccatggagctgatccagccaggatacagagaaggggaggcaaaggctgagacagaaccagcttgagagcggaggcgcaactcttgtctcctggtggccttgagcatttcacaatagggggataaaggataggagcagaaaagtggggctgacttcagaaatggggtcctctagagctcacgggagggtgttagattggagtgggagcttagtggaggtgagccttagaggcaaaagtctccagaccaatccagggcccctcttctatccgggggcccctcttctatccagggcccctcttctgtctgggagcccctcttctatctggggcctcatgcagtggggcctaggggaggttctctgaggacttggccttgatgacagggtggctggaggaatcagaacggtcagaccttctttgacctgcgggcacctttagttggaatgctcaggcctgggatggtggagggggctcttgcaggtggggactggggtggcggggaggaggctgtatggccgccatatctcctttggctgggggcgtcagggctggagaggtgtgaagagtccctgaggcctcgatgcatctcactccagctcaccaggtctgcatttgcccgtccccagctcctgctgccacctccggccgttttaggcacttggctcccttggcccagaggagcttgcctcacaggcctgtgcacctctgacccctgtgaaccagttttcctttgtgcctccacagccacagcctggcagctctgatcaggaaagtgaggaacagcaacaattccggaacattttcaagcagatagcaggagatgtgagtacctccaagcccaggacgcccacaggtgcttccttctctcctggattaactgctcagattaccaattatttcattattgtttggtagaggtcactttggacttcggtggagccaggggatgtgtgcgtagcacacaaatccacaagcccttgagttttggactgccacgtctgctggggggctcagaggcctttttgctctgagctgcccacggtggtcctgatagctgaggtgcagtatctggccccctgtcttcctcagaaaagccccagcttcccatgacataatagcaccgacagggattttacaaacacagccaggtggaatttgttttgcaaagtgtccgcgccaggagctgctgtactcctgaaccatgaccctcctctcccttcctcctcaggacatggagatctgtgcagatgagctcaagaaggtccttaacacagtcgtgaacaaacgtgagttgctcaaaccaaatgggggtggggtgggtggggagtcccgttgtctcaaagcagctcctcactcttctccatccccccagacaaggacctgaagacacacgggttcacactggagtcctgccgtagcatgattgcgctcatggatgtatccttcctgccgccccttcccgaccctctgtcatcagcccacgggggccaaggcaacatacagggtgcccagtcaggcaaagggccctaatttgtgcccagggaaacttaaggagaccctgattcagaacatcttggatactcgtctgaaaggggttgttagaggcggaaggggaggatgttgggttgtaactgccctaacccctgtgcttctctcaggcctgggatcctgcccaagcaaaagtggtccttaggagagcggctcctgggttacagagtaggcgcaatctctgactggtggtggagtggaggggagggttaaatagtacaacagggcagtgggtaggacagcccggagtctcctagaccctccctccaaatccagggggattttgctgtgtgctgtgtagccctgacctccctcctccagacagatggctctggaaagctcaacctgcaggagttccaccacctctggaacaagattaaggcctggcaggtgggaagagaaaatgaagcgtgggagtcaagaatggggttgatttggagattcagtgtgtgacctccatcctcaaattttctattgccagaaaattttcaaacactatgacacagaccagtccggcaccatcaacagctacgagatgcgaaatgcagtcaacgacgcaggtgctgagaaggaaggggtggcagggatgtggacccgagacggtgggagcaggaatgggaggggactaggctactagggccccactagagaaaggagagggaaagggcttctcactttcccttcccaggtcacagagtggccgagaggcagggaaaatagaaggcaggcccaaggcctccagctccacgtccacctctaacatggtcccctccacaggattccacctcaacaaccagctctatgacatcattaccatgcggtacgcagacaaacacatgaacatcgactttgacagtttcatctgctgcttcgttaggctggagggcatgttcagtaagtgggagaggggggctgccctctgctctcttgcaggggcagttgtggcaacaggcatctcacctgataatctccagtctgctccatccaggctgaacaagggccaatgacctctttaggcccagaatgggatggcaaagggagggttactggtgattctctgcctgcacatctttgtgctgatgagggacagcactgggcacacggtcctctgaggggaagttacagtagtagaggcggagtgcgcctgtaactggcctctggcctgtgcattctttcacaggagcttttcatgcatttgacaaggatggagatggtatcatcaagctcaacgttctggaggtaaagcataggcacagcacattccccctacacattaaaactcaaggtggaggggtcaacggggcggactggacccagggtgtgctcctcatttccacacagtggtggagggaagggataggaacagaacatggagggaggctcagcaggctcccaggacacatgcacttgaggcccaaaaggacctctgctcccccagtcacttgatgcgggaaaacatgcaccttcttagggaagatctaggagaaaggaaacagtaagccactgcttcttggaaaatcttctgggggtctgacctgctgggactgttccctttcctcttgccccgtaagattcctagggcgggggggggggggggtcactcttttctgatctacattctgatcttgggacttctttcagtggctgcagctcaccatgtatgcctgaaccaggctggcctcatccaaagccatgcaggatcactcaggatttcagtttcaccctctatttccaaagccatttacctcaaaggacccagcagctacacccctacaggcttccaggcacctcatcagtcatgttcctcctccattttaccccctacccatccttgatcggtcatgcctagcctgaccctttagtaaagcaatgaggtaggaagaacaaacccttgtccctttgccatgtggaggaaagtgcctgcctctggtccgagccgcctcggttctgaagcgagtgctcctgcttaccttgctctaggctgtctgcagaagcacctgccggtggcactcagcacctccttgtgctagagccctccatcaccttcacgctgtcccaccatgggccaggaaccaaaccagcactgggttctactgctgtggggtaaactaactcagtggaatagggctggttactttgggctgtccaactcataagtttggctgcattttgaaaaaagctgatctaaataaaggcatgtgtatggctggtccccttgtgttttgttgtctcacatttagatatcagccatgcatgactgaatggcttccaatcatatactcacctatcacctacaagagaacaatgaaaaacacacacaaaaacaaaatcttgaattttgtaatcatgcctattgctatttcttgagcataagaatggctcagatactttccaagacataaaaggaaggcagaggaatagttgttgctgtaaaagacatcaagaataaatgggtcatgtacaacgggaggggccggttacctgaataatggagtggagattgagctatcctagctcctctgctcactaactgacctgtcgcatgaccgtggacaaaaccctgaacgcagctgtttgtttgctaaacttctctggaccatggcctgcggcatatctataggcatcctgtgttttccacccagtttccttcttcctcgctaagccaacgtggaaagggctggccgtgaatatgcagacaaggtaacgaaagtaaaccgtcaattagtaaaagtactttattttcctcttgtatttgctttatatcttgctttacaaagttacgaagttcacagctttataccaaaatgtaagaaggctatttgcttataaacatttttgcagtcaggtgtcatctgatttcattcttctaatccatattcaatattaaaaaaatcagaaaccaagggtgctggagcagctctagggcatatatttctcttaaataggagaaagattttcaacagcttttcctccttgaccccctcctttcccaatttatttgggtcactaccttgaatttagagtgaatctgggaaatgtagtcaccaggtaacccagcagggccatatacttgggcttggaggtgaggttagaggttactgtctaatacagtaggtctggtttctatgaggagctcatatccacttgcataaggaaacctagtctatcccaaatcacctccaccacaacttctattcctgtctattagaccacttctcttaaacccgaggaacctgatgatttgggggcagggataaaaccattattttataaatgtggcaggtatggccttcgtaattctagaagctcccgtttaggtaacagaaacaaaatttagatgtaagcataaactgcagttatttgagcaaaccagagcatatgtgctgttcaaatcccacttcacaatatacttcaatctcacctccaatgaattctcttccataaaataaaccattccactaagtatatacctactcccaccaaatcatccacatgcctcatcactaaagttgtcccttgtataatctaccagcaaaaagacaaaataaaacctgtgttaagcaaataatcacttaaacagtaataatattgcctctaaattaaaggtaagtcaggagctgaacactcaactgttaactcttctggggaagaagaaaatttttcccacaaaagcaggagtgcagtagtaagtaatgactttctctcagattcaagtaacatcaggtcaagataacctttgctgttagagttttgtttgcatggtgtggaactgctttataaactgagtagagacgtatgccaaaattatttttaacctaattaaaaactttcacagaaaacttgaagtgactgatactttatcacaacgaactgccatttaaacactagcataggtacacaaaaagatttatactatggttttcttggctttaagccattagaattagacaaaagcaaccgagagtaacattctaaaagtggcttcaactactttaaagacatgagtcagtttttgtcaggtcatttaatggtttctttccttcacaaagccactaaatgccagagtcaacacagatccctgagccatagctcttctctgaggggaaacagggttataatcagtcacaacattgtggaagacattaaaaaaagaaggcaaagttctgtataattttcaagactcttgtaagtagtaacacacagccataagcagccaaaatgcttatggtccctttatttcttaatagagggctagaaccgttcatttggggtaacacactaatctggtgttaaaagaatttcatgtgttcttgaaacaaaggcatactgccactgcttcaaaaaaagcctttgtgaaatgaagaaaaatatgacaaacacaggttcccacacgtacacatacatacaaaggaacctgcacacttgcacacacacaggcaggtataggcacacagttccaccaaagcgaagtccaaatcagagttcttaccgattctaccactctgtaatactctcagaagttcccacaactgcccaacacctcacctacccgtttcctgctgcacaaagtctccttcactctcatcttttcgatacatcgtcaggcagggcagaagggcactacgccgcagagcattcgaggctctcagcacactgccagccagcgtgaaaatgcggcttcactacagcccagagaaaagggccaggtttagtcatcgatccagatgcattttcccgggaaatgaccattcccaaacccacagaacagtttggcttctctggatatccttataggaaataggggtgagaggtgggaaaagcttctcaatctcatacagaaacagcacaaatatttaatacaccttttgcaacaagatcttctctgttctccattaagcatcatgtaaatctcactagtgtggttaacaaaatggctttccccaaggacagaagtcaagagcttgtggggccatatattatctagtactaggccattcattatctcctagattaactcttttttttttttttttgaggtggagtttcactcttgtcgcccaggctggagtgcagtagtatgatcttggctcactgcaacttctacctccagggttcaagtgattctcctgtctcagcctcctgagtagctgagactacaggcacataccaccacacccagctaatttttgtatttttaatagagacggggtttcactatgttggccaggctggtctcaaatgcctgaccttgagtgatccacccgcctcggcctcccaaagagctgggattacaggtgtgagccaccaggcccggcctcctagattaattcttgacattttttggatcaagtaagaaccactggagcctttcctggaaaaaagaacacatactcagtctcacacacaatttctgggggctcacagaccctcttgaagcctatccataaaccccctggtgaagtccccctgcccgatagcctgagggaagacatgtgagtggatatatgtgcactaacaggggcgaagacagacctggatggtctgcaatcccagagagcatgaggcaccatgtcccaaagcttggtatgtggccctgggctcctcccccaattttatctctctgaagaagctgagtttttttttttttttttgagacggagtctcactctgtcaccaggctggagtgcagtggcacgatctcagcttactgcaatctctgcctcccgggttcaagcgattctcctgcctcagcctcctgagcagctgggattacaggcgcccaccacgcccggctttttgtatttttagtagagacggggttttgccatgttggccaggctggtctgcaactcctagcctcaggtgatctgcctgcctcagcctcccaaagtgctgggattacaggcgtgagccaccacgcccggccacgttctgagttttgaggatccagaaacaaaaggctggaaagcgacacttctacaggtttactgatgagtccggagaaaatccaaaaacaaagccccactgagggtttgtgaatttggctgttctcagtggccaggcagagtctctgctccactcttctttcccagctagcagggaagtgaaggcaaagaactgtctcagaaacaagtctctaggaagtctgcttgaggtcctgaaaactgtattcagatgctttattctaaccccctctcccccaccatcttagttgctgcaggggggtggaaaacaccccgtgagcccagaggaatattcgatggctgccatcggtctaggcacggccatacagtgggagagatggaggctggcaactgaacaaaccaaaagggttcaaaccaacattaggcttgcagggtcagacactagaaaggaagataaaggtacacctccagttcaacagcctgacaggatctgtaacaggtagtgcccaggttcaacagcagatgtaaaggtagacgttaggtctacgcactgcctcacactgagctttctatccacatttacagagatttactagaagtggtgtctgtaaggacttgtcactatgtgatttgcttcctgaattcctaaaagatagtcagcagagcagccactgtttgtcaaaaatctactgtgtcctttagcacttaaagccagctctatctataaagcaagaaaacagtgacacacactgcacataattgttaagaaagaaaactatttgcttccagtttaaatacccagctattacaaatggagaaattaaaactgatcctcaaagtctggcacttaaacaaacttgtacttaaaagcctgactataggtttaaaccatcataagaacataaattaaaaattgcaaactgaaatcaataaaatatacatatgattagggtcaaactgggtaaccaattaggatctgtatcttcaataaacatctggagaacgcaaatagcatatatcactatatgccatgctgtcccagagaagtatggttccttaacatttgtctaaatctatttaaaacctccagcaagaacttaaaagtgtaatttatcatcccatagagctgcccagacttatgctaggggtatgcctggctagtaaccactttctccttccttacttcaccaagaaagggaagagagtggcctgtgtggggggccaatgtgaaaatagttcaactaatgacttcccaacgtgggaggcaaaaaacttcatgaatcaattttgctgtcatcttcagcatgtcgttcaatatgtcctgcagcatcctaggaatgaagggaaaagggcccatgagagagaagtcgatagtaagacaggagaaagtcaaagccaaggaaagccatgtgggtccattccacctaggatccagacaggaaaggcagttaggagccagcactttgctaacttacgtgaaaccatgtacttaaaggtgagctgttgtctcagcacaagagcactgtaataaatctccaggttcagttactggatttgaaacatctgaaaacattctctttaggccctttctcaaaaatgacctaattcttcatttgcaacttcattaagctaccccccaaatctctgaatcataaaaataaaaaaccctaggccctccctatatatggcaattctcaataataaaaaaggtttgctagcccctgctctgagcagtctactgaatcccaggcaaacctcaagtcccactaatgtacctgtttggatcctttcctagcagtgaaaaaagcatcgcagttcttccagcgacatttcagagtctggaagttgggattagtgtggtcggtcagcaagtgttgttttaaatgatctacaacgccaaatatcagagagcaaccatgccactggagagaaagaaaatgaggagactcggtgaaaaagggtgcagtgaacgtgaatcagaacagcccccagctggatcccataagcactatggaagcaaaaagccagccccttatttcaaatttattcttggctagaaaagacaacaaagccaaggcaaccaaaatatcagtataatgaggaaccttgaaaatactggaaaaatcttttgatattttgagagggcacagcactaacgtagcaattacaacttcttaaatcaggaaaaggccagcaaatgtttatgggtaaattaccatgaaattctgtttaaactgtattttttgatgttgccatcataaaattgagtttctatcttagtttattcaatacaaaaggcaaatacctttcctataatatcgaaagggctttttttttttttttttgagatggagtttcactcctgttgcccaggctggagtgcagtggcacgatctcggctcactgcaacctctgccccctgccccctgggttcaagcagttctgctgcctcggcctcccaaatagttgggattacaggcgtgcaccaccacggccagttaatttttttttttttttttttttttttagtaaagacagggtttcaccatgttggtcaggctggtctcaaactcccaacctcaagtgatccgcccatcttggcctcccaaagtgctgggattacaggcgtgagccaccgcaccccgcccgaaagggctatttttaacaattctaagaactgttgaatgtaaatgtgaaaataaaaatgtctgataaagaaaactacatttgtggaaatatttattgtagaatactgtgtttgccatggaagcctgactttactcacaacctttgtcacttgaatctcaatcttatgaatacctacttatttttttaagctataattttacttataaacgtggcttaatttcatgtattagaaagcataagctagtgtcttatgcttcctaagtggtggctcagtgggattacaccctgtaatcccagcactttgggaggccgaggtgggtggttcacttcagcccaggagctcgagaccagcctgggcaacatagtgagaccctttctctaccaaaaaaaaaaaaaaaaaatacaggccgggcgtggtggctcacacctgtaatcctagcactttgggatgctgaggcaggcggatcacctgaggtcaggagttcaagaccagcctggccaacatagtgaaacctgactctactgaaaatacaaaaatcagccaggcgtgtggcatgtgcctgtaatctcagctatccaggaggctgaggcaggagaatcgctggaacttgggaagtggaggctgcagtgagccaagatcgcactccagcctgggtgacagagcgagactctgtctcagaaaaaaaataaataataaaaataatacaaaaattagctgggcatagtggcacatgcctacagtcccagctaccagggaggccgaggtagggtgattgctggagcctgggaggctgaagctgcagtgactgttgtgaccacaccgctgcactcccgcctgagtaacataacaagaccctgtctcaaaaaaaaaaagaaaagaaaaacaaggaagcacaaagactctctgtcttggcttttccctacaggcttgttggtaaagtcttgtgattctaattcgaacacatgtttatttcttaaaagtaatgcaggccgggcactgtggctcacgcctgtcatcccagcactttgggaggccgaggcaggtggttcacaaggtcaggagttcaagaccagcctggccaacatggtgaaaccctgtctctactaaaaatacaaaaattagccaggtgtggtggcgggcgcctgtgttcccagctactagggaggctgaggcaggagaatcgcttgaaccagggagtcggaggttgcagtgagccgagattgcaccactgcactccagcctgggcaacagagtgagattctgtctcaaaaaacaaaacaaaacaaaaaaagtaatgcaaagttaagtttttcctctgtcagtactactccatccttctctctataaagccagaggtatcttccccatttctctctatagattaactctatttgtgtactctggatcctgtcgttcagtagtgcctccttatccatggtttcactttctgaggttttagttacctgtggttaactgatcttcaaaaatattaattggaaaattcccaaaataaacaattcttgagttttaaattgcacattattctgagcagtgtgatgaaatctcctgccatcccactccatcttgcccagatgtgaactgtccctctgtccaacatatctacattatattcgctaccgcctgttagtcacttagccctcttgattattacatcaaaaaaacatagaccatatcccccttggataaagaggaactgcactagattctgcttgccttcactgagaaaattaaaaagcaaagatagtaatatgtaaagagctaaaaagtcactaagctgtgggcaagcgtaaagtcgaattttaaaatggagagtgtcaagttcacgccatcaatgctgaaaaggatcttagggttttagggaaaagctaccattgttagaactgacgaaaaaaaaattaaggcttataagaaatagtgtgaaaattttaagggttaatcatcagtcctaaccccaaaataaaaaccacacaattcagcctgatgaactaaggtttagaacttacaagaccttaaattttttttatttgcctattcctcaaaaaccaatgaggacacaaaccaaaccattaacactagtaatctctgatgagcgggagtagagggggcagtgccattaccaaaataagcacttccgctttttatttcatatatttctgtactgttgttttctaagcatgtattgattttataataaaacaaaaccaccaccgaggagacaacctgtgatctacagtgtaaggcataaagtagatgctaaaatataaaaatgctacactgatgataatgaagatctatcaattagcctagggtgaagcaacctatagaagtccagtgacaggaagagtttcactccttacccaacagcggtaattctgcatcagattaagcctcacggcctgaatactgccatcataacagccagtgtaaatctggagaaagagaggtttataatatcagaccaaaatacatacaaactacaaaacaccctcaaaacaagagtcacaagctccttgcagcagctacaagaaaacaaacacctaaatcaaaaccagctccagagcaggagaatgggaaagtattttccagatcttctagtctaggtattttgcagctgtgctccttagaaagccacttgggaccagggcagagaggagtggcagggctcagaggcacccacttgtcctttatactttaactggggtagccctggtttctatcgggtgctctatgttaggcacctgtatttccctggaaaagaaaggattctactactcagagtctgaaaaacatccattctggttcaactccataacttaaaaataaaaaaaacaaggcttagcagggttacgtgagttggtttctacttttaggtctgctgtaaccatgccacactggccaaatctcctgactccattccagtgttccattcagatcatgtctctggaaaaggcaccactcaattttttgaagcatcttaaatttaccttctattaaactgtagttgatactaccatttttattgtaataattttggctattaatagacaatggaatattcaacactgtcccctggttacttccctattatgccaagagatgggaaggtacttaacaatgaggcatatcagaagcagatgtcacttttggaagtgacaagaattttttagcaaacacattcaaaagcaaatatcttacatgacaaataacactcaccatgcttttatggatggtcatacacataatcatgtctttgtgtcctccataaacttgtaatcgatcatgagacttaggcagaaaaaaaaaaagagaattgaagttatttataccttgcgtttaataagtacagtccctaaaggcctttggcaggtttaaaaccacacctgaggcgccaagtggaagcaccagtagcattctaacagaaatataatctaatggcaatttttcttttacattctactactcaaggagggagctggtaattagaagtaataaaatcaattttgttagaatcagagtttcaaacttgaaactgcacacaaggagaactagacaggttttaagagactggagttgctctccagaaattaagttttgacacccatgacccagatcaagtatcttagagtggtttctgaaagctgcagtccacaggccagctgtttcataattatctagaatgcttgtgaaaatacagattcctgggttccatcccaccttactgtatcaaaaatcaacactaaacccaaatagacaatctccccaaatcattcaagcaaaatactgaatctaaattctacctgtaattcatagacacgaacaaatttatccaggcaagcagtcaccatcacttttcctaggatattcaccacagtcactgcatgattgtgacctttatagatccgcacgagctcaccagtctatgtcagaagagaagtaagagtcaccagactgactttcgagactccttcctggttataattctataattctaagaggcataattctgaggatactgtacacatataattaatacaattaattgtattaactgtacaaatacagttaatacaactgtattaactttaatagcagaagtatcccacaatcatttattacatatacaaaatatatggattgtatcctgatggaaagactctaatattagtcatggaaagaaagcggccaaaactctatctgtatttatagctttccaagtactttcacttttttcatttcactggatctagaccacaagtctatcaggtgggaattattctgaggttatgaaccaggaactgagcttcaaaaagctgcctctatgacctgagaacagtctctcagctgtttctgttgttcatttttttaagagatggggtctcacaggccgggcacagtggctcacacctataattccaaaactttgggaggccgagctgggcagattacttgagctcaggagttcaagaccagcctgggcaacatggcaagactccatctctacaaaaaatataaaaaaattagccaggcatggaggctcacgccattagtcccagctacttggggggctgaggtgggaggatcccttgagcctaggaggttgaggctgcagtgagtcaagatcgcactactgcactccagcctgggggacaaagtgagacccctatctcaaaaaaaaaaaagaaagaaagaaagaaatggggtctcacttggtcacccagggtggagtgcagtggtgcaatcacagctcactgcagccttgaactcctggggccaaataatcctcccacctcagcctcctgagtagctggaattacaggacgcactgccatgcccagctaattaaaaaaaaattttttttaagagatggggccactattttgcctaggctggtctcaaactcctggcctcaagtgatcttcccacctcagccttctgagtagctggcattacaggtgacagccattgggcccagctctcagctgtttttactagttctattttaactacatatcatatccactttctggaagcctcagctgctcagtttatttcaagtttaaatgaggcattcaaactaaaccttacataaagcctgtctgtccaccattaaaaactttgatgaggtagaatttctaaattacacaatattatccaagagcatatgcacagggatgattacgaatcccttcggtggataaagggcttaatttaaattgcaagaggtttaagaaaaccatcaagctttaaccattattttattcacagtttctttacacaacaccaacacagcttacgtgaatgttgtgagcatggactgactgatcactggagccactgaacacgagatcattcaccaccttaaagaaaaaattaaacaagtcagattctgtatacggttcttaattttctctataacttgtaatacacattggcaaattctaatttccatcctattttgagatgagcacgatgaactaggtataaaagtttctcagatgaattttctcagctgaaacttacacccccctaccaagcatgctaatgaactgacaatgtattattacgtttgttacctttccagaatgattatgaagcagcctagaagggcattcgagtatacccacagtataacaaaatacactcattgtttctcaaatgaaagtgcatcacttggtgatgttggtgtaaagaaaaggtttgcaatctccttgctctttccaaggtggtgcttctaaatgatgcatgagacaacacgggaaatgccatttaaaacccttctttgttttgttttgctttgcttgagtcaaggtctcactctgttgcccatgctagagtacagtggcacaatcatggctcactgcagcctcgatctttggtgctcaagtgattctcccacctcagcctcataagtagtacaggtgcacaccacaacatcccgctaatttttgtatttttttgtagagatcgagttttgccatgttgccctggctggtctcgaacttctgagctcaagcgatccccctgcctcaccctcccaaagtgctgggactacagacgtgagccacctcgcctggcctcaaaacccttctatttgtgccagacaactccgattctcttgcactgtacttgccttcatgcaaagaatggttttgctatggccctccagagttctgaggagcagtccattccgggcatcgcgtacactaattgtgcagtcataagaccccacgaccagcagttttcgggcaccttcctgagctgtagcaagacagctgactgcccgagggccatggcattcaaagatctcaagtcgtttgttgttctggaaaataagccaagattacagctaaaaccaacttagctggaaaattcaactaaccaacatcattaccttggtacaaactcatttctgtcacctgtactcaaattttcatacccactctgcagccttaacttatccatctccgctatttcccactccaaccctttttactgaacctcccccatcccctgatctgaggagggcaaacgcttacattataaactcatttataacttcaacccacaccatctccatcctaattagaaactggttctctttttatgctttctttcaccacctgtaagttaataataatgaagggtgaacctttttttttcaaactctagtgcatattccctgacaccgacccaggaactatttctgtcatccaaaatttaggcaatctatgtgtcatgctgtttccaaaaatctctatttagaattaccttcctaggtaatttcagtaagtctcaaattctccactttttttttttgagacggagtctcgctctgtcgcccaggctggagtgcaatggcgccatctcagctcactccaacctccgcttcctgggttcaagtgagtctcctgccgcagcctcctgagtagctgggattacaggcgcccgccatcacacctggctaatttttgtatttttgtaaagacagggtttcaccatgttggccaggatggtcttgaactcctaacctcaggtgatctgcctgcctcagcctcccattacaggcgtgagccaccacacctggcctaaattctccaccttattatgatgttcttctggcacctggttccatgtcatctctcacaacatcatttagtagactatagaagcctaattatatcagagtggtagggtcacatcctgaatcccaaaacattcttttatctcagattttagacttctttccttcatcccccagccaaccctgttcattaagcctcccacttccacagaagttttttaggtgcatgcctggagtaaggctcctaaaactaagcagaaagcgacagctgggagcctacattgctgagcaatgatttcaacagtgttgaagtgctagggagacagactgaaaggaggtcaggacccaaaggtggaccggccctggtaaacagtcctggctctctgttgtgactccagaagcactacattctaagagtatgggcaacctaggaaaaagcccagccctcatcttcaaaattcacatctatgcagagattctcaaatgtctgtctctaggaccatcttctccagggcttttcaatcctttaaagaacttttccatttgaatttcttgtcatcatctcatcattttgcctcaagattgtcttgctccttacttctgtctactacttaaaaaaaaaaaaaagagagagagacagggtctcactctgtcagccagtcttgagtacaatggtgtgattatagctcactgcagccttgaagtcctggccccaagcaatccacctgcctcagcttcctgagtagctgggactccaggcgtgtgctaccatacttagcttttttttttttttttttttgagaaacagaggtcttgctttgttgcccaggctggtctcgaacttctgggctcaagcaatcctcctacctcagtctcccaaagtgctgggattataggcatgagccaccatacccatccacttctgtctacttctgataatctcacgaaagagaaggtaattaggcaattatcacgttttagcctttaaaatattttaaatttactttcctctccatttctattgccctaatccaatttaatcagacttagaacttgtctgcatctaaaatgcaaaaatcttcactaattgcccttctgtgatgtatcatatcgaacagaccaaatcacttggcacttgattatatacgtgctaaattcttctcacttgatcttaagtttcctgtaggcagaaaccatgacatatttcaatgcacaccttctgttagttccagctagcatgcagcctatgaatgacactgtaatagtaccattctaacacatggttacaagatgaccagaggatatggtgccacaactaattagcaatcaaacctatcgattctacctcttggattatatatttcctccattcccttctcttcatcctgtttaacctttttcatgtcagcttccactacaaaacctcctaaatggtctccctgcctttgctaataccaatctttcccaatcttatcaactccagtgactttttctaaaatataatgggatcatgtctctcatactttacagcctgtaagatgaagtccaactaccttaacaaagcacacagggccatcaaaaactaaaccttatcctggggcctagcacataacagatgctcaataaaggctaggtcaacaaatgaatttatctctggtttaggaaagaatgaagccatatgggcattacagcaaacctcttagttcacctcacagatgggccgccctcatgaaaccctaaaccagtgccaaaccacaccaatgtcatactcaacggaatttaagttcatttttcttcattttttttaaaatatgtaatgcttcatgaatttgcgtgtcatccttgtgcagggaccatgctaatcttctctgtatcattccaattttagtgtatgtgctgtcaaagtgagcacttaagttcattttttatgatgtcattcttaaattgagacagactagtttaatacatgactcattatttggccccaaatcttcagacttggtttaatttagtggagttacattttggtcctggaacatttgagtagaagcagagagaatggaggatcttgtttcacttacatcagaagataactgtgtttgagtagtggctaattctgctgcttcctcacagaagaaaataggaaaatccctgcctgctacttcttcccacacatgctcacactgttttcaagtgcatgggaagtaagccttttctcctccaaccactaacctttatgttgaaggtgaccacagtgccatttgccagtcccgcatagaggattcgccatctactgtggaggcagaggacccggtcttccagctgtaactgctccacacactctcggctctgataaaagcacacaacctttaatcagcagagggtactggcaaatgagatgtcaaaaacaattcctccagaaagcagactttaaaatgactcttatgcggaagaaagtgtgacatcctctattttgtaggggactatcttagatctgtttctcctttgaaatatgaggcctaagacttccaagctgtaggtaatatgaaaaataaacataaattctagtaatgttacccatgtttctaacttagaatgtagaaattcttcaaagggtactatgagttaggtcttagcctcttaaattaagaggccaaatataaaagacaaagctctattttgacatctaaagaggaaaatcaggattatagttatatatttgataaatgcactaatcaaatatgtggttttccgcacatgattctctatttcaatagctcccaaatgtctccttcaaactggtgccaggttagctgggctaaattactcaagaggcttttaaaatacatagaacccaagctccaaccccatccctgagactcttaattcagtgggctctagaatctgtgttttaaaaaatttccctagtaattcagatgcacatgcagatttaatacccactgtttgatctgaccttcaaaaaacgatttctttttgagacggagtcctgctctgtcgcccaggctggagtgcagtggtgcgatctcggctcactgcaagctccacctccccggttcacaccattctcctgcctcagcctcccaagtagctgcaattacaggcatgcaccaccatgcctggctaattttgtatttttagtagagacagggtttctccatgttggtcaggctggtctcaaactcccaacctcaggtgaatccacccgcctctgcctcccaaagtgctgggattagaggcgtgagccactgagcccggcctacatttttctctttattctatctaggattagttttgacatatgatatgcataacatttatggcaaagaccaaggaaggtatattattaatagtaggaagtgaaaaaatactggtggagagagacagaaaatatggtttatgtgtaagtctcatatctacctagggctacaacaatgtgctaaacattgtttagaagcaaaaaggagatggtgggtagaatgaagcgtctgccacagtgtctccactccacacagtaaatacaaaggcgactcaatatgaaccactttggatttctctggacccacctaccttaacattatagcagcggatggtatggtcactggacccggtgtaaagggcagcattcttcccggaggtctgagtaaccaggaggcagttaactttggaggtatgaccctcaaagacaccaatacatttccgactctaaagtttaagcacagaccagattattacttatgagatataggaggattagataatatatttcctcaacaaaaagatgctaaaacattcagttcactgctgtatcctcatgtctaaaacagcacctggtacacaaaagatgctcagtaaatgtatgttcaccaagtgcctagcaaacagtcacaggcaatgaggtatctgaaagtatatgttagttgagccataccagaaaatacttatggcaacactgtaagacagccagaattttaattaacgtttagggcaaagctttctgacatatggaccaaggacctagcaaatccaaactgcagctaatttcccacaaaagatgagcatttgataagcagtttgtgagaatgcaccatggtattcaaaaacgtcaggtgctatcacaggtctagtggttctggtgttgtttcttttttttttttttttgacagagtctcgctctgtcccccaggctggagtgcagtggcgcgatctcagctcactgcaagctctgcctcctgggttcacaccattctcctgcctcagcctcccaagtagctgggactacaggtgcccgccaccacccccggctaattttttgtatttttagtagagatggggtttcaccatgttagccaggatggtctcaatctcctgacctcatgatccacccaccttggcctcccaaactgctgggattataggtgtgagccactgtgcccggccactggtggtgtttcttatgggtacattccaaatgttatctcagtgcacatactgagatctatttagaatgtacatatatacatacacatacatattttgatatcctgttcccctagatcttacacttatacatcctggtagcactgcttccttttttcagtcattcgtgttaatcctcatatcattaagctaaaggaatctacacacctgttgcctatatagcaaacacattttcctggtccatcatctaactttttaattttcactgactctagcaattttaaatattttcatggtattcattcagacatcatgttcttcaaatttcttaagctttcattgttcataaacataattagtttattaacaaattcaaattcaaaactcaaaagttcattcttttgagagtaataagcatcagataatactaagtgtgaggcagtggaaaagtgttgctctccttaataacttgaactctgtaatcaatcacttgtcagggaaaatacctcctccagtacttccccatattcacttcatccctcctctattatgtagctgctatgcaagtgaccccattaccaactccagcattgggacctgaacagtccaagaccactggtgtaatcccaaccccctttgccacaggcaaaggtgatcgttcagggagtaaaacacaggacccttctgtgctggtgggagggaaaaagagactccagtggctcctgacatttaccctgtaagcaggaggggaactagctttcaggaagaggtgataccagagaaggcagagtagggagacaaaaagaaattaagtccccagtgaccttgctgagcttctggattaaatgcatctaaagtcaatctcaggcccaccccttccttcagacagccaacaaattccctttattgtttaaaaaagtataaactggattttccaaaacctgcaaccaaaaacattctacatgttctatcaacttaccaccagattataaacccgaacagttttatctgctgaacaggtatatagcaagttcccaaatatctgaattgcatttacggcagcttggtgtccctcaaagcttccttctgtgggttcatcatcatctcctggctctgaagatatttctggaaaacaagaataggtttcagagacatgtctgctagagtctgaaaagatactcaaaaatcagaactattatacaatacagtagtccctagattaaaccaaaagtagatcccttaaatcttagttcccctatcagactactacaattttcaatacccatcttcactatgaagactgcatgataagcaaaggcagagaaggcctttcacttaggaaaaagatagataattatataatgagcttttgggccaggcgtggtgactcacacctgtaatcccagcactttgggaggccaaaatggacggatcacctgaggtcaggagttggagaccagcctagccaacatggtgaaaccccatctctactaaaaatacaaacattagccaggtgtggtagcgtgagcctgtagtcccagttatttggggaggctgaggcaagagaatcacttgaacccagaggcagaggttgcagtgagccaagatcacaccactggactccagcctgggcgacaacgactccgtctcaaaaaaaaaaaaaaaaagaaaaagagctttgagtgatacttggaaggtatccaatctctcccacacttccaaaaagttatttctttgagtaatgtagtattccttaagcagttccttctgaaagcaaatatccttagagccaatgaaaccttaatactaattagttgaacagataagggagccggataagacagatgagaaaggccaggcatggtggctcacgcctgtagtcccagcactttgggaggacaaggcaggaggatcacttgaggccaggagttcgagaccagcctggccaacatgacgaaaccctgtctctactaaaaatacaaaaaaaaatttgccaggcgtgatggcgcgcacctgtggtcccagctatttgggaggctgaggcaggagaactgcttgaacctgggaggtggaagttgcagtgagtagagatagcgccactgcactccagcccaggtgacagagcaagactctgttacaaccagtcaatcaatcagatagatgagaataagaatctgaaagaccaggatttgaggttttaagaatatcagaactgttgatcaaggcaatcctcttggtgataaacccctccccattctcctattctataaatatatttaagtaggtttaaatcctggctttaatatttacaaggcttttaattctgtggttaacttaaataaaactgaacagcaaatacctgaagaattctttgatccttttatggaggagatcacagtctgagtttctgccacactacaaaataatagcaaaagtgttctcagcatctgtgtgaacagggcaggtagtaaaagtaaaaatttctgactcaaaggatttttctaaacaatgggcaaagtagcaatgatataagagattagattttccatctgaaatttcttaatgaagggaaataaaagcagagtgaatatttataacacagtcaaaagagaaagcagaaaatctctactgctgagctttaatttttccatatccacaatctctactgcattcacataaagtttggtttttaaagaaattctgattcataatttcaaattctatttaaaaaaataaagttggtgaaagttgttctgactggaccaatacaatattcttaccttacagggatgccatctttatagcgagtgccaatttcactggtagagctaacttcatcacacccagaacgagacgtttctagtgggttttgctctgtagagttccaaatatcctttttagatgggctgtctggtttctcttctcctgattctgaagaatcaatggctactacttctaactgaggattaggaatttctaggacttccagagacgagtcactatctggctcatctctgacactctcctgctcccgaccagtcctgctgtcttcccaagtggaggttgttactttcccccctttaattaactttccagcttttactttccttacaggtttaacagtcaaaacatcctgttcagtgtcactattctcaggaacatgggcagcccgtagacttttcttcttccggagtttcttctttttcttgcttcccctagtctcagctgatgtcaaagtggattctgcctgttgttcaggctggtcagctggagagtggggttccttctccaaaggggtttctgaagcaaaagacaatcttagaaaagaactggtacaggcttcagacccactattgcctttggttggctcttccccttctttatttatgctagaaagaccagctgattgggaagagggagagttttctctgtttctggtatttctttgctccacagaaaacttcagttcttggctaggctcatggaaactttctgttgactctggtaaggacaatctagcagtgatgactggataaactggacaactgtcactgatctctcctgaattgagaggaaaaaaattattgcatccttttttgtgtttgctgcaatttatcactgactgaaactctaccaaatatttcaatgatatgttcagaaaaccatgactgtttcagctggtatctcacccctcagtttcccatcacctacatacactcctatgacaacacttactaccctctgccttgcgtgaatctcacaaacactgtgtgtcttattccctacaaaagctccttgtggggagggattgtttctatcaatcttttttcttgttttaaatgtccacacatttaacattgtggtttattcttagtagacacttaaatgtctacttagctgaagtccttttacttttatttctttgaagttttcattatccacacccatccaatttagctacagcttagtagttaaaaaaatttgctgacttagaaatgtcaatttcctttgacttagttacttcatgtctaggaattaaaagtgatgaaataatcacagatgtactcaaagacatatacaatgcagtgttacacagaatatgaaaaaagttagaaaactaaatattcaaaaaagattcaccacataaattattgtttagccagattatgcaactattcaaatattatgcaacttgtaatataaaatactttagataaattatttttacaacagaaaaatcattatatattaaatggaaaaagtcaggttatatatgactgctcctttgtacaagttctacatgtaaacacaaaaatatgatttaagaaagattgaaataatatgtaatacgaaaaataatagtaccaaaatatttcatgtaatccataaatatatacacctactatgtacccacaaaaatttaaaataatttttaaaaatatgctaggggctgggcaaggtggctcatgtctgtaatcccagcactttggaaggctgaggcggtcggatcacttgaggtcaggagttcaagaccagcttggccaacatggtgaaagcctgtctctattaaaaatacataaattagctgggcatggtggtgggcgcctgtaatcccagctattcgggaggctgagacaggacaatcacttgaacctgggaggcagaggttgccgtgagccaagagcatgccattgcacaccagcctgggcaacaaaaagcgaaactctgtctaaaaaaaaaaaaaaaatatatatatatatatatatatatatatatatatatatatatatgctaagtcacgcgcagtggctcacacctgtaatctgagcactttgggaggccaaggcgggtggatcacttgagcccaggagatcaagaccagcctgggcaacatggtgaatccccatctctacttaaaaaaaaaaaaaaaaaaaattagccgggcatggtggcaggcatctgtagtcctagctcctctggaggatgaggtgggaggatcaactgagcccaggaggtcaagcctgtggtgagctgtgattatgccaccatactccagcctgagtgtcagagtgagactctgtctcaataaataaataagctatatatttgatactaacatctagattaatattgcaacatagtactggtagtaaaatctagagtaattttttaaactttttgcttttgctcaggaaaccacacaatgccagtttgttggacttaattttcaaatacagcaccactgtggtaatgcaaacttctaacaggattttacatagcttagacgtattctcaaatgataaccaggtaagtgttattttttgaaaagagtgaaaaccctggctatttctcaacagcaagttcttagtagatgattccaaaccccatcatggccacctgcctctcacgcttatattaatcctggtttgtatttgagattatatagacagtaagtgcaaagaaattcagaggatagaccttattcagaaaattggctgaattaacttcaaccccatttatttcacacgaaacaaattttgtacttatcctaataaatggaaccttgtgggtgctaatacaaagtcaactctaaccctagattagaggaaatgaaagaaaatgactgatatttaaattacattctctaaaatattttaaaagaatcctcctgtatatatgaagagaattccagtgacaaattagttgtacttgctcattttagttttaatgagcaagtatggcttatatcactcatataaaaatgccccagtctcactactgggatgcccttaacccagagaaaagcttacatactattagcttccagtaattccttggacacattgcaggcagagcttggtggcacagcattcacattctcatcttgttcaggagacatgggctcttgtttaatctgaactgatgagtctggagcagggacactgccatgggtttggaaagtaggagacgtggttatttgaagagaggctccggtgggtgatggagacacatgggaagatggaggctccagaaaaagtgggaaaaagggagtgggcagcagtgcggcatcaatggatgtttgagatctactgttccttcgttctcgtgtgaggctacagggaacctggtctgggtgctcagaaggttcatatgtttctagaatgggaaacatacatacatagaaatgcaaaaatgttatctgaaaagtcatttgtgtctgagctaatttgtatttttaaacattagaaaagaattataaataagtatattagtatagtccctcataattctccgaaatatggagaatataatctctacaaccaccaaggatacagagagaataggcatcaacattcttttttttttttttttttttgagatagggtctcgctttgtcacccaggctgcagtgcagtggtgcaaacactgctcactgcagccttgacctcctggactcaagcaattctcctgcctcagcctcccaagcagctgggattataggcacatgccactatgcccagctattattgttattatttttttgagacagagtctcactctgtcacccaggctggagtgcagtggcgcaatctcggctcactgcaacctccacctcccgggtccaagcgattctcctgcctcagcgtcctgagtagctgggattacaggagcacgccaccatgcccagctaatttttgtatttttagtagagatggggtttcaccatgttggtcaggctggaattattattattactaataataattatcaataatttttgtatttatttgtagagacagggtttcaccacattgcccaggctggtctcaaacttctgggctcaaggaatccacctgcctcagactcccaaagtgctgggattacaggcatgaggcactgtgcctagcaacattccaatttttcaaattttaaatgacttatccaaagttatataggctactaatggaagggagaagatttgaacccaggccttttgattcctaatcaaaactctttccataacatattgtctgttgctaaacatttttgggatgcacagtttacagacctttctatagaaggaagaaactggccaggcgtggtggttcaggcctgtaatcccaaccatttgggaggtcaagttaggaggactgcttgagcccaggagtttgggactatcctgggaaacactgggagattccatctctataaaagcattttttaatttttataactttttataattttatataactttttataacctttaaatttttacaatttaaatcataattttataaaattaaaagttagaaattttaataaccaggcatggtgacacacgtctgtagtcccagctactggggggagtgaggtgggaaaattgcttgagcccaggaggtcaaggctgcagtgagccatgatcgtgccactgcgctccagcctgagtgacagagcaagaccctgtctcaaaaaaacaaaaaaaaaggatgaaaccaaggagacaggagagaaataacatgaccttttcatgactacttttcatcccctcaaagagaacaaaaaggcctggtgcagtggctcatgcctgtaatcccagaactttgggaggctgaggcaggcggatcacctgaggtcaggagttcgagaccagtctggccaacatggcgaaccctgtaaccctgtctctactaaaaatacaaaaattagctgggggtggggtgggcacctgtaattccagctaatcaaatgctgaggcacgagtatcacttgaacctgggaggcagaggttgcagtgagcagagattgcaccactgcactccagcctgggaaatagagcaagactctgtctccaaaaaaaaaaaaaaaaaaaaaaaaaagcagagaaaacaaaaaagtaacacgctatagagggcccaatccatcagatgccctctgaataccttgtaatccctgtagaatctgtattctatgggtcctcagtgcactcatctccatagttatctaaaaataaagtattttattaagcattttgaaatccaacttgtaaggtcctctaggtctccccatttttcttctatgtcctgaccaaaaatcagagtgtcttgactgctctgtgacccagccagccgcaggttttctccagcaggcttgaaccctacctggggccttgaagattcccaggcactgataaaagtatctaggttgttgcccaaaacactgaaagaaattggccctggccctgagccaaattccttaaaccctcatataaactccacatcccgccccctggctgtggatatacctagggagaacacccttgtggggactgctgcagcctactctgtaagtaagctctcctaataaatgctttggactcatcaccctggcatttagtgcttctttctttggaatcctaactgtcccccattaggcacagtctggggcacttcccttgtggaaactcccctgccattgcttttggggtgactccagacatgggtttggcagcacaaaacaagatttcggagatgatccatttttattaaatcctccacatgctgttacctgctgcttgagcataagtagcctctgaacttccacataagctgtctgaagggctgcacgggcttgcagaagattgttatccatgcactgcaatgacttactaagttcttcctcccttaaagaaatattcagcagctggtcaacctgagaacgttctgccaaaagaaatcataaggttcaggttaatacgagagatttccctctcatcacacagctcagaagactaaactatacccattatttaggataagactttatgttctcctcagtaggtcattggaaattcataaaacatttagtcaagcacaatgatatcaaagctaggaaccaaaagtgagaactgctaagatggaggtatctcataagctccagtgtaccatcacatcattctgtctcatctaatcaccgccttctaccaccacctttccaggtgaaatctgtcccatgcaaaccacctgttctaggactcgtttcccattcttcctttatctaccactgtcttcacacaggacttttgcttagattggactctagacctagactgcttgcactctctttccaatccatatttagtctgttagttgacttaaaaattgtttttattagagaagacttcctgaagaaaatacagctttgaaatagtacatttaacttagtttgaataaaatgttctgtgtatgtatttaccatcattgtgtttgtctgtttcctattcaatatgccaggacctctcccttaagctccacacccacatatccaactactgactatgatatttctagctaggttatctcaaaggtcctttaagtcaaagaatccctgagggaattcatcatctttctctattctcaatctgctcctctcatggagttttctagctctacatatgctccatctggttggcccagccagaaatgtgggttgtccttgactcctcccttatccatcacatccactcactcaagcctcatccaatcacttccaggactagcccttatactagaactgggttagagtcaaggaaaagcaagaatcacagaaatacatcaatgagggagcaatgttaataacttctttccataattcactttagaaaagcaaccaaggaagggagtgtggaggtggggcagcggggaagcaaccaagatgcctcaaaaactgaaagtgagagaaatggctatacatgaccaagagggccaacacatttcatcccactgaaaaggctcaaggaaacttcctggctttatattgtccaagtggtatactaaccttggcttacaagtctatgtgacatcatatatttcttctacagttgttaactggatgtattaggaaatcaaacttttctttcctcttaagcaaggcaacaaaaatgtccaaaaaaagtaaatggacaatcagtgtttgataaatgacaagctatgctctgtgtcaagctgcacaaacgctgaactgctacaagaacctcttggggctgggcacggtggctcacatctataatcctaacactttgggaggccaaggtgagaggatcactggagtccaggagtttgagtccagcctgggcaatatagctagaccctgtctctacaaaaaaataaaagaattaatgtagtgtcacataccagtagtcctagctgctcgggaggctgagagaagaggattgcttgagcccaagagttggaggttaccaaaaacccgcaccccccaaaaaaaaccaaaaaacaccaacttctttcttccaaaatattctgcaccatacctttttttcctttaattttccttcttttattttttctctcaagacttgggagttcaggagaagatccatcctggaaggataaagaaaactgaataaaatccaatgtgtaaaagccattatccaagaggagaaaaaggaatcaattctaagatagccatacactgttcttcactattgctaccatctctaacatgatcgtagaagtctcacgcacgtggtaccaacgcaaactttagttgaataaacgtatctgatttaaaaaaaaagaatccagggtgaagtgcctcctagcatcctagaggtaggaaagcccatggaggtcagggaaagcatttcatcttggtgtagtaaggcacaagtagaagtatagacaaagccagtaaaataaatatatctgatttataacttggcatagtttctactttaaatttcagcaagaaaacctttacaacaaaaagcttaacagtccatgagacaagctctttgtcataggacaatccctcagcttgaagtgtattttaagtcatccagtaacatccactacatatagcatctagctcaaaggagcagaattgcaatttgaagcaagtctaaaattcatgaccttaactactatgcttatcacctcagtattaaatgagagaagcccagcacagtgacacatgcttgtagtccccgctacttgggaggctgaggcaggaggactgcttgagttcaggagttccagagcagtatggacaacattgtgagacctcatctctaatataaattttaaaatattataaaataaataaataaataatgaagagaagaacccattttttttcacattgccagatcccagactgtatcactaccagcaactctttcttttcagaaagggatactgagagggttaagccaatattagcggcagaaatgccggaagagcagaagtggtatcagtgaaataaaagactcttaaaggccagggtgggtaactgaaggacgaaggacagagttacacagactaaaaatatttctatactctgctcatatatatgcactctaatagtattaaaaccatcttagtgttaagcctatcactcctgaatccagcaatcatccatgccctacaagtgcaacagtagaacgcctttcttcagtagcagtgcagaacgcatctatgaaaacagattgggttacagctgaatatgtgacttatccttggtcaggtgatacaaagaatcattggcttggacactggttttagatatgacttcatattttcctggtactgtacattcatattagattacatttaatttagcagaattactcagtgtaagaaaccagtaggatgaaagtaagaacctcacaattcttctagaagttgagagaatcacaatcccagatacccaagaaaaacagttgaaccttttttcataagcaaccaacttgccacatgcgatgttctacaaaaagcagagggaattatactcactccagtggctcttcgtttctttctaatactttggccatcattttgttcagcaccagaggtacagctactatctgtggctgcatccgctaaactggagatcgcaagggctgaggatgcgcttgatgacagacagtttccctctccattactctcctgggaattctgattctctgacggtggtatagacctctcctggctgttcaagtcttttgccaaatgcatcaaaggtattatatggtcagaggataattgtgcactatgtcgcctttgggtagcaacattttcagccctttcacctgttcggagggaggcagcccgaggtgtcacttcttgtttgaggtgcatggttgctttctggctctgtccagccctcaatgagttactaggtgaaaccatctgctggggctcattttctttgcctgtaccttcctcactgaagaagctatacacagaaggagctctgtccatgatcacgctgctctcagaaaggcttcgctttcttgccaagccaggggacgaggaaatggaaacaccttcccactggaatccttctagactggacagatcaggttccccatccaaatctaaggcttcttgttcattttgaacaaggggtaccatttctatgccaaaccttaaggaagaaagaaaaaatgaaaacataaattggatatggttgttgggaggggcattattttttaatgtgccaggctctctcaagcactgaggttataaaaagtaaggtggctcttgccttcaaggggctcacagtctagtcagtggtacagatataaatatattacgttgtcacaagtaccagattagaggtttgtatacagctataataatatatttgagggagtaaaaattgagttttgtttcatatggagcgctaaatctataataatacatacagcatataatttttaaaagcaaacaaaccaaaacaaaaaaaaaaacccttttactgagcacttacaagtgctttatacttacaatttcaaatgctactcacaaggtgtgggaaaggaaagtggggggaaataaacccattatttcaacaagtacagaaatgcccctgaagcctggagaactgtatcatcatgcagcagagttatgactttcaagtagcaaacttacgttgaacactgttttagcattcagaaaagtctagtacctcaacataagatgaagagccaaaatattacacaagcgcttaagagaaagcatgttgtagtcataaagataatgcccagagtacatacagaaaagttaactattcgtaggttctaagtaaaaggtaatgagaacagttgtatttaaaagttatagcacgcattccaaaattaagatctagaaaaagacagagatctatagctctacatttttatgctgtcattttctacccctataaagtgacggattttacccctgtaaagccatgacttttttcctacgtcaccaccttgtttctcaagtaggtgtgcttccattttaacctgcactctctgctaggaaatactttattccatctgtcatagagtatcagtcactatttgatattaaatcaagacatctacaacagatattgttggcaaacatttaattaaatgaaacacgtagaattctcttgatcagggtcaaagggttactttaaaagaaagtgaggaaaaaaaagacaccgaaaagcagcacacacctgggtaagcctttgcccagctcttgctttttcttggttacttgctgaatgacctgttcccagttgacatttctccgagatgcatttagaatctgccgtagggttggcttgagcccagactccttctctgtctcactctttcggtgaccgctaatattgcgaatgcggcgggcactattgaggtttggctcaggaaggtgtactccagttttgctcttcaaactaatgtgccgggttagatccctctgaagtgaggcaggaaagccaagcttacttagttcaggcaggagagggcccgagggctgactgatgtcacttttttgaagctctgcatccaagctagcactctcaaagccttctgtttcataagatacatgagatttaatagagtcatcaacctgtgcatcttctagagaggttttcaagtctagcaataagccagggtgtggactggctgcagatgtcatttgtaattcagattctttctggcgaactatgggattacatggggaagtggatagctctctagaagtcttcaggatgcggtcatcctcctctttctcatcagcagttcgagtgctgccagataacaattctgtagttgcagaacctagggttccaatttttgttccatgcttttccgtgtcagatgtctctccatcactttcatcttctagtgcgtgcacttgaaactcaattttcaaagaccctttttcagattcttctacatttctacttgcttttgcatagttcctggtacttttagaagtgctaagaagtggattttgcaatgactcatgacactgtagcacctctttggcctttcgtaaagtatcatttaaattatcaccagattgcttttgagagccaaatgtacttttattcccttttaaaacatgaggacatgaactacgcagtttggatatgtaaggaccatggttatcttccacagtgggcttgttcgagggatttgagtgttctccaggggaaaaaaaatttgttttggtgttttttgagatattctttggatcttgcttttgagacaatgatttagtggctggacatggaaggagtggggatttcaatgatggcattttatttggtgtatgctcttgttcaggtttttctgcagtggggcactgtctcaccacctcgaaggaagcagcggaatcagaagaggccttgtgattaagagatccagtatgtatttctttttgtgttttctgtgttggggaattacgtgtttcatcagtttggggctcctgtattcctgtagttatcaagctaaaatcaaagagaggtttctctatcatttctgacttgttaccagtgatgtctttcaatcccgactgtaaatccagagtcttctgagaagggtaaggcgtccagcgacgaggcttttcccttgccgcactgccattctttccactaactttggaagtagcagtgtctgcttgtttagtggtttggctttccagctgctcaaaattgaagtcgagtaagccttctgaaggaaatttatcacttgtaaatccttcagaaggacctctatatgtggcaactgtaccaagtttgtcattttcttgccgctgccaattatatctgtcgtgactgtatttgtttgacttattagatttcttgttccatagcatagtcatgtcttccatttgacagttagaatttctgtttctgcctggttgaaatttgtctccagggccactgtaattccaattatttgtactacgtacactggatttccagtttccgttactgttgttcatatgccaactggaaaagccacctgttccttcagaaagccaactggaattccttcctgtaccattatgattccaatctactgctccactatttgaaagccaaccacctccagaattactatggttgtgaaaccaagtcgaggagcctcctgcaacacccttatgccacccggaacgtcctcttggtccaccaccattcctcaaagaatgtggaaagctgtttttcctagtattattaaagccatctttttcccatttccaatcccgctgtggaggtccacgatgatgccatgcaggctgactgtaactctctctgtcttggtaaggaattcggtcttctcgtctccattggggtcgtctgtcatcagagtttatttcttggttgctattggaaggttcatcttgtcgactttgttctttcctttgttttattaactgaatgagttccttgtcaaaataatcttcttcctcttcctctccttttccatcatcttctctttcctgggcatcaacgttatctttgtgcaactggccagaaatgtgctttgcatatgcagaaagacccacttctgtgaccccgcacactcggcactcatgactaatgtccctagggaaagagggagatgagggacattcaattctccccactggcatggcacactcaccagatctgttattgtttcctctgaaggacactgcacactttggcacagtgaaaaattagtgctaattaatttcaatgctcctttcatcacttttaataagtttgtttataagttacttttgaaatgattttaagattcttttccagcaatcaagaggcaatagacttcagataaatgtcgtttaggaggagaaatcttcttgaattgctgtacttaaaatcttgtcagaggaaacatggtgaaaggggaggcagggcagggggctcagagcaagcagaagttgctctggagcacacccatggtgccagctgcactcccccgcgt

SEQ ID NO: 23317 - DNA, 6525 bp, Homo Sapiens
gttttagaaagctcttttattttcagttctggctgtgttcaacatcttagcttacgtttttcatgttgtaatgatctgccgtacggacgatcacctctaagttagagagttctgtaatttggcttggattaaagatgcttggttagtgaaagctgctgctttttttatagtcaaaggactggttctgagagccttgttgcagatggctgaggtcaccgtcccaagggtgtatgtcgtgtttggcatccattgcatcatggcgaaggcatcttcagatgtgcaggtttcaggctttcatcggaaaatccagcacgttaaaaatgaactttgccacatgttgagcttggaggaggtggccccagtgctgcagcagacattacttcaggacaacctcttgggcagggtacattttgaccaatttaaagaagcattaatactcatcttgtccagaactctgtcaaatgaagaacactttcaagaaccagactgctcactagaagctcagcccaaatatgttagaggtgggaagcgttacggacgaaggtccttgcccgagttccaagagtccgtggaggagtttcctgaagtgacggtgattgagccactggatgaagaagcgcggccttcatacatcccagccggtgactgcagtgagcactggaagacgcaacgcagtgaggagtatgaagcggaaggccagttaaggttttggaacccagatgacttgaatgcttcacagagtggatctttccctccccaagactggatagaagagaaactgcaagaagtttgtgaagatttggggatcacccgtgatggtcacctgaaccggaagaagctggtctccatctgtgagcagtatggtttacagaatgtggatggagagatgctcgaggaagtattccataatcttgatcctgacggtacaatgagtgtagaagattttttctatggtttgtttaaaaatggaaaatctcttacaccatcagcatctactccatatagacaactaaaaaggcacctttccatgcagtctttcgatgagagtggacgacgtaccacaacctcatcagcaatgacaagtaccattggctttcgggtcttctcctgcctggatgatgggatgggccatgcatctgtggagagaatactcgacacctggcaggaagagggcattgagaacagccaggagatcctgaaggccttggatttcagcctcgatggaaacatcaatttgacagaattaacactggcccttgaaaatgaacttttggttaccaagaacagcattcaccaggcggctctggccagctttaaggctgaaatccggcatttgttggaacgagtcgatcaggtggtcagagaaaaagagaagctacggtcagatctggacaaggccgagaagctcaagtctttaatggcctcggaggtggatgatcaccatgcggccatagagcggcggaatgagtacaacctcaggaaactggatgaagagtacaaggagcgaatagcagccttaaaaaatgaactccgaaaagagagagagcagatcctgcagcaggcaggcaagcagcgtttagaacttgaacaggaaattgaaaaggcaaaaacagaagagaactatatccgggaccgccttgccctctctttaaaggaaaacagtcgtctggaaaatgagcttctagaaaatgcagagaagttggcagaatatgagaatctgacaaacaaacttcagagaaatttggaaaatgtgttagcagaaaagtttggtgacctcgatcctagcagtgctgagttcttcctgcaagaagagagactgacacagatgagaaatgaatatgagcggcagtgcagggtactacaagaccaagtagatgaactccagtctgagctggaagaatatcgtgcacaaggcagagtgctcaggcttccgttgaagaactcaccgtcagaagaagttgaggctaacagcggtggcattgagcccgaacacgggctcggttctgaagaatgcaatccattgaatatgagcattgaggcagagctggtcattgaacagatgaaagaacaacatcacagggacatatgttgcctcagactggagctcgaagataaagtgcgccattatgaaaagcagctggacgaaaccgtggtcagctgcaagaaggcacaggagaacatgaagcaaaggcatgagaacgaaacgcacaccttagaaaaacaaataagtgaccttaaaaatgaaattgctgaacttcaggggcaagcagcagtgctcaaggaggcacatcatgaggccacttgcaggcatgaggaggagaaaaaacaactgcaagtgaagcttgaggaggaaaagactcacctgcaggagaagctgaggctgcaacatgagatggagctcaaggctagactgacacaggctcaagcaagctttgagcgggagagggaaggccttcagagtagcgcctggacagaagagaaggtgagaggcttgactcaggaactagagcagtttcaccaggagcagctgacaagcctggtggagaaacacactcttgagaaagaggagttaagaaaagagctcttggaaaagcaccaaagggagcttcaggagggaagggaaaaaatggaaacagagtgtaatataagaacctctcaaatagaagcccagtttcagtctgattgtcagaaagttactgagaggtgtgaaagcgctctgcaaagcctggaggggcgctaccgccaagagctgaaggacctccaggaacagcagcgtgaggagaaatcccagtgggaatttgagaaggacgagctcacccaggagtgtgcggaagcccaggagctgctgaaagagactcttaagagagagaaaacaacttctctggtcctgacccaggagagagagatgctggagaaaacatacaaagaacatttgaacagcatggtcgtcgagagacagcagctactccaagacctggaagacctaagaaatgtatctgaaacccagcaaagcctgctgtctgaccagatacttgagctgaagagcagtcacaaaagggaactgagggagcgtgaggaggtcctgtgccaggcaggggcttcggagcagctggccagccagcggctggaaagactagaaatggaacatgaccaggaagggcaggaaatgatgtccaagcttctagccatggagaacattcacaaagcgacctgtgagacagcagatcgagaaagagccgagatgagcacagaaatctccagacttcagagtaaaataaaggaaatgcagcaggcaacatctcctctctcaatgcttcagagtggttgccaggtgataggagaggaggaggtggaaggagatggagccctgtccctgcttcagcaaggggagcagctgttggaagaaaatggggacgtcctcttaagccagcagagagctcatgaacaggcagtgaaggagaatgtgaaaatggctactgaaatttctagattgcaacagaggctacaaaagttagagccagggttagtaatgtcttcttgtttggatgagccagctactgagttttttggaaatactgcggaacaaacagagccgtttttacagcaaaaccgaacgaagcaagtagaaggtgtgaccaggcggcatgtcctaagtgacctggaagatggtgaggtccgggacctgggaagtacagggacgagctctgttcagagacaggaagtcaaaatagaggagtctgaagcttcagtagagggtttttctgagcttgaaaacagtgaagagaccaggactgaatcctgggagctgaagaatcagattagtcagcttcaggaacagctaatgatgttatgcgcggactgtgatcgagcttctgaaaagaaacaggacctactttttgatgtttctgtgctaaaaaagaaactgaagatccttgagagaatccctgaggcttctcccaaatataagctgttgtatgaagatgtgagccgagaaaatgactgccttcaggaagagctgagaatgatggagacacgctacgatgaggcactagaaaataacaaagaactcactgcagaggttttcaggttgcaggatgagctgaagaaaatggaggaagtcactgaaacattcctcagcctggaaaagagttacgatgaggtcaaaatagaaaatgaggagctgaatgttctggttttgagacttcaaggcaagattgagaagcttcaggaaagcgtggtccagcggtgtgactgctgcttatgggaagccagtttagagaacctggaaatcgaacctgatggaaatatactccagctcaatcagacactggaagagtgtgtgcccagggttaggagtgtacatcatgtcatagaggaatgtaagcaagaaaaccagtaccttgaggggaacacacagctcttggaaaaagtaaaagcacatgaaattgcctggttacatggaacaattcagacacatcaagaaaggccaagagtacagaatcaagttatactggaggaaaacactactctcctaggctttcaagacaaacattttcagcatcaggccaccatagcagagttagaactggagaaaacaaagttacaggagctgactaggaagttgaaggagagagtcactattttagttaagcaaaaagatgtactttctcacggagaaaaggaggaagagctgaaggcaatgatgcatgacttgcagatcacgtgcagtgagatgcagcaaaaagttgaacttctgagatatgaatctgaaaagcttcaacaggaaaattctattttgagaaatgaaattactactttaaatgaagaagatagcatttctaacctgaaattagggacattaaatggatctcaggaagaaatgtggcaaaaaacggaaactgtaaaacaagaaaatgctgcagttcagaagatggttgaaaatttaaagaaacagatttcagaattaaaaatcaaaaaccaacaattggatttggaaaatacagaacttagccaaaagaactctcaaaaccaggaaaaactgcaagaacttaatcaacgtctaacagaaatgctatgccagaaggaaaaagagccaggaaacagtgcattggaggaacgggaacaagagaagtttaatctgaaagaagaactggaacgttgtaaagtgcagtcctccactttagtgtcttctctggaggcggagctctctgaagttaaaatacagacccatattgtgcaacaggaaaaccaccttctcaaagatgaactggagaaaatgaaacagctgcacagatgtcccgatctctctgacttccagcaaaaaatctctagtgttctaagctacaacgaaaaactgctgaaagaaaaggaagctctgagtgaggaattaaatagctgtgtcgataagttggcaaaatcaagtcttttagagcatagaattgcgacgatgaagcaggaacagaaatcctgggaacatcagagtgcgagcttaaagtcacagctggtggcttctcaggaaaaggttcagaatttagaagacaccgtgcagaatgtaaacctgcaaatgtcccggatgaaatctgacctacgagtgactcagcaggaaaaggaggctttaaaacaagaagtgatgtctttacataagcaacttcagaatgctggtggcaagagctgggccccagagatagctactcatccatcagggctccataaccagcagaaaaggctgtcctgggacaagttggatcatctgatgaatgaggaacagcagctgctttggcaagagaatgagaggctacagaccatggtacagaacaccaaagccgaactcacgcactcccgggagaaggtccgtcagttggaatccaatcttcttcccaagcaccaaaaacatctaaacccatcaggtaccatgaatcccacagagcaagaaaaattgagcttaaagagagagtgtgatcagtttcagaaagaacaatctcctgctaacaggaaggtcagtcagatgaattcccttgaacaagaattagaaacaattcatttggaaaatgaaggcctgaaaaagaaacaagtaaaactggatgagcagctcatggagatgcagcacctgaggtccactgcgacgcctagcccgtcccctcatgcttgggatttgcagctgctccagcagcaagcctgtccgatggtgcccagggagcagtttctgcagcttcaacgccagctgctgcaggcagaaaggataaaccagcacctgcaggaggaacttgaaaacaggacctccgaaaccaacacaccacagggaaaccaggaacaactggtaactgtcatggaggaacgaatgatagaagttgaacagaaactgaaactagtgaaaaggcttcttcaagagaaagtgaatcagctcaaagaacaagtgagcctacccggtcatctctgttcacccacctcacattccagctttaactccagttttacatccctttattgccattaactcgttaacttatgttgtctaataaaggcaaa

SEQ ID NO: 23318 - DNA, 2814 bp, Homo Sapiens
gcggccgcggggccccggacaagggtccgcagagctgcagccttcgagggccagccctctccgagtccggggctgggtcccaccagtgacaaggcggcagccccgcgcacaccaaagagaaggcggctgtggcggcagcggcagccccagccatgctgtgttatgtgacgaggccggacgcggtgctgatggaggtggaggtggaggcgaaagccaacggcgaggactgcctcaaccaggcatatctttttcttgcacatcaaggaggccctcttggcaggccacctcttgtgttccccagagcaggcagtggaactcagtgccctcctggcccagaccaagtttggagactacaaccagaacactgccaagtataactatgaggagctctgtgccaaggagctctcctctgccaccttgaacagcattgttgcaaaacataaggagttggaggggaccagccaggcttcagctgaataccaattttgccagattgtgtcggcaatggaaaactatggcatagaatggcattctgtgcgggatagcgaagggcagaaactgctcattggggttggacctgaaggaatctcaatttgtaaagatgactttagcccaattaataggatagcttatcctgtggtgcagatggccacccagtcaggaaagaatgtatatttgacggtcaccaaggaatctgggaacagcatcgtgctcttgtttaaaatgatcagcaccagggcggccacgcggctctaccgagcgataacagagacgcacgcattctacaggtgtgacacagtgaccagcgccgtgatgatgcagtatagccgtgacttgaagggccacttggcatctctgtttctgaatgaaaacattaaccttgggccaagaaattatgtctttgatatttaaaagaacatcaaaggaggtgtatgaccatgccaggaggctctgtacaatgctggcgttgtggacctcgtttcaagaacaaccagagcccttcacactcgcctctgaagtcctcagaaagcagcatgaactgcagcagctgcgagggcctcagctgccagcagacccgggtgctgcaggagaagctacgcaagctgaaggaagccatgctgtgcatggtgtgctgcgaggaggagatcaactccaccttctgtccctgtggccacactgtgtgctgtgagagctgcgccgcccagctacagtcatgtcccgtctgcaggtcgcgtgtggagcatgtccagcacgtctatctgccaacgcacaccagtcttctcaatctgactgtaatctaatctgttgtgcttttgttggacttggcatgtttccatgaactgcactattataaactattaaaatgatagattgtggagaaagtaattattccaacacccatctgccatgcgatgttaaaaaaaaaaaaaaaggaagaaaaataacacagctactcctcactgcaaaaacatatccatgcgtagaatcaacaactccagtcatgggaccaggaggagctctgggacgcagacacattccttggatgttgattttttttatgatctagtaaaggaataggtaaagtctttgatgtcagtgaagtggcaacatagccaaaaagttgggtaccttttaggaaatgatgttgtaagtctccttaatgtatcctgaggtaagtttcctactggcagcagattttgtaagaattacttttaagaatttcattctttttgtatggtcatggagctccaaccatttttaataggaaagtcttttgtaaaattgttgtcgttttaatgtcatttctgtctttataacttgatcaagaatgattggaaggcaaacaggtttacaaatcaattctgtgacttttaaaaagttgacaatgttgtcagatttaaaccagtgtggctagtaaaaagcagctcactcaatgttgggtggctccctattcctttacgctccccctatccctaccccacaagcctttcgattataaaatactaccaatcttgttataagattactgtggagtagtcaagtactccccgggccttctgagctggtggaatattttatttcagactgaaaacagagagcactctccttgggaagggaaagcggcttgctgagtgagagatggagcctcatggtgtacaactgagggtagttaactcatcacttctcccaagcactcgatcccagcttcacccactggtgttgctttgcttgaactgttcaagccttttatagccttaccataagtatttagatatggtgtccttttctgtttttggggggggagttttgttgtgtttttttaaagtaagtgcttaagtattaactttgggttgtcccctctgtatgtttcgaaggggttttggttctttttgcttctgttttcttaaacatgttttccactcccacttgggcattttggaagctggtcagctagcaggttttctgggatgtcgggagacctagatgaccttatcgggtgcaatactagctaaggtaaagctagaaacctacactgtcactttactgagatttctgagtatacttttcatattgccttaatgtagcagtaatgtgtttatgcatttgtttctttgcacagacattttgtcaaatattaaaactctacttttttatggcacatattagcatataagcctttattccaagaggtatttattttttcacttgtaaaaaaataatgtttccacgtaaagaactctgttatatcctagaggactctgtcttttatattcgggataataaagactttaaagcaaaaaaaaaaaaaaaaaa

SEQ ID NO: 23319 - DNA, 881 bp, Homo Sapiens
aaattttgtgcgtttggcgggtttcgctctcttcataagtattgatcattccgcagccctgcggaccggagcctggttagcagtcgctttctgatcccggaaaggaccctgagctgggaaatagcgagaggcggggatgttggggattttaaaacttatgtagatcaggcatgtagagctgctgaggagtttgtcaatatttactatgagacaatggataaaagaagacgggcactaaccaggctgtatctggacaaggccaccttaatatggaatggaaatgctgtttcagggctggatgccctaaataatttttttgacacattgccttctagtgagttccaggtcaatatgttagattgccaaccagttcatgagcaagcaactcagtcccaaactacagttcttgttgtgaccagtggaactgtgaagtttgatggaaacaaacaacatttcttcaaccagaacttcctgctgactgctcagtccactcccaacaatactgtgtggaagattgcaagtgattgcttccgttttcaagattggtctagtagttaaaggggcaaaagtccattctcatttggtccattagttccagcaattgaaatttatgtgaattattttgattgtagaagcactataatatgtgctgaaactaaatttctttaatattttctattcctgtcagcaccttttctagcagctgccagtttggagcattgccctctaagagctttaaaactatttttttacatgccttatatacattccactaatgacattcttataataatattaaacacatgatcttggtactaacatactcactgtgaacccagcctattgcaaaaataaaatctttttataatattaaaaaaaaa

SEQ ID NO: 23320 - DNA, 5494 bp, Homo Sapiens
gcagagctgcagaggcaccggacgagagagggctccgcgggcccagctggcagccaggccggagacaagttgcagtcccgggctctggtgacgccgtggccgcagggtctccattttgggacattctaatccctgagcccctattattttcatcatgggcttctgcctggctctagcatggacacttctggttggggcatggacccctctgggagctcagaaccccatttcgtgggaggtgcagcgatttgatgggtggtacaacaacctcatggagcacagatggggcagcaaaggctcccggctgcagcgcctggtcccagccagctatgcagatggcgtgtaccagcccttgggagaaccccacctgcccaacccccgagaccttagcaacaccatctcaaggggccctgcagggctggcctccctgagaaaccgcacagtgttgggggtcttctttggctatcacgtgctttcagacctggtgagcgtggaaactcccggctgccccgccgagttcctcaacattcgcatcccgcccggagaccccatgttcgaccccgaccagcgcggggacgtggtgctgcccttccagagaagccgctgggaccccgagaccggacggagtcccagcaatccccgggacccggccaaccaggtgacgggctggctggacggcagcgccatctatggttcctcgcattcctggagcgacgcgctgcggagcttctccaggggacagctggcgtcggggcccgaccccgcttttccccgagactcgcagaaccccctgctcatgtgggcggcgcccgaccccgccaccgggcagaacgggccccgggggctgtacgccttcggggcagagagagggaaccgggaacccttcctgcaggcgctgggcctgctctggttccgctaccacaacctgtgggcgcagaggctggcccgccagcacccagactgggaggacgaggagctgttccagcacgcacgcaagagggtcatcgccacctaccagaacatcgctgtgtatgagtggctgcccagcttcctgcagaaaacactcccggagtatacaggataccggccatttctggaccccagcatctcctcagagttcgtggcggcctctgagcagttcctgtccaccatggtgccccctggcgtctacatgagaaatgccagctgccacttccagggggtcatcaatcggaactcaagtgtctccagagctctccgggtctgcaacagctactggagccgtgagcacccaagcctacaaagtgctgaagatgtggatgcactgctgctgggcatggcctcccagatcgcagagcgagaggaccatgtgttggttgaagatgtgcgggatttctggcctgggccactgaagttttcccgcacagaccacctggccagctgcctgcagcggggccgggatctgggcctgccctcttacaccaaggccagggcagcactgggcttgtctcccattacccgctggcaggacatcaaccctgcactctcccggagcaatgacactgtactggaggccacagctgccctgtacaaccaggacttatcctggctagagctgctccctgggggactcctggagagccaccgggaccctggacctctgttcagcaccatcgtccttgaacaatttgtgcggctacgggatggtgaccgctactggtttgagaacaccaggaatgggctgttctccaagaaggagattgaagaaatccgaaataccaccctgcaggacgtgctggtcgctgttatcaacattgaccccagtgctctgcagcccaatgtctttgtctggcataaaggagacccctgtccgcagccgagacagctcagcactgaaggcctgccagcgtgtgctccctctgttgttcgtgactattttgagggcagtggatttggcttcggggtcaccatcgggaccctctgttgcttccctttggtgagcctgctcagtgcctggattgttgcccggctccggatgagaaatttcaagaggctccagggccaggaccgccagagcatcgtgtctgagaagctcgtgggaggcatggaagctttggaatggcaaggccacaaggagccctgccggcccgtgcttgtgtacctgcagcccgggcagatccgtgtggtagatggcaggctcaccgtgctccgcaccatccagctgcagcctccacagaaggtcaacttcgtcctgtccagcaaccgtggacgccgcactctgctgctcaagatccccaaggagtatgacctggtgctgctgtttaacttggaggaagagcggcaggcgctggtggaaaatctccggggagctctgaaggagagcgggttgagcatccaggagtgggagctgcgggagcaggagctgatgagagcagctgtgacacgggagcagcggaggcacctcctggagacctttttcaggcaccttttctcccaggtgctggacatcaaccaggccgacgcagggaccctgcccctggactcctcccagaaggtgcgggaggccctgacctgtgagctgagcagggccgagtttgccgagtccctgggcctcaagccccaggacatgtttgtggagtccatgttctctctggctgacaaggatggcaatggctacctgtccttccgagagttcctggacatcctggtggtcttcatgaaaggctctcctgaggaaaagtctcgccttatgttccgcatgtacgactttgatgggaatggcctcatttccaaggatgagttcatcaggatgctgagatccttcatcgagatctccaacaactgcctgtccaaggcccagctggctgaggtggtggagtccatgttccgggagtcgggattccaggacaaggaggaactgacatgggaagattttcacttcatgctgcgggaccacaatagcgagctccgcttcacgcagctctgtgtcaaaggggtggaggtgcctgaagtcatcaaggacctctgccggcgagcctcctacatcagccaggatatgatctgtccctctcccagagtgagtgcccgctgttcccgcagcgacattgagactgagttgacacctcagagactgcagtgccccatggacacagaccctccccaggagattcggcggaggtttggcaagaaggtaacgtcattccagcccttgctgttcactgaggcgcaccgagagaagttccaacgcagctgtctccaccagacggtgcaacagttcaagcgcttcattgagaactaccggcgccacatcggctgcgtggccgtgttctacgccatcgctggggggcttttcctggagagggcctactactacgcctttgccgcacatcacacgggcatcacggacaccacccgcgtgggaatcatcctgtcgcggggcacagcagccagcatctctttcatgttctcctacatcttgctcaccatgtgccgcaacctcatcaccttcctgcgagaaaccttcctcaaccgctacgtgcccttcgacgccgccgtggacttccatcgcctcattgcctccaccgccatcgtcctcacagtcttacacagtgtgggccatgtggtgaatgtgtacctgttctccatcagccccctcagcgtcctctcttgcctctttcctggcctcttccatgatgatgggtctgagttcccccagaagtattactggtggttcttccagaccgtaccaggcctcacgggggttgtgctgctcctgatcctggccatcatgtatgtctttgcctcccaccacttccgccgccgcagtttccggggcttctggctgacccaccacctctacatcctgctctatgtcctgctcatcatccatggtagctttgccctgatccagctgccccgtttccacatcttcttcctggtcccagcaatcatctatgggggcgacaagctggtgagcctgagccggaagaaggtggagatcagcgtggtgaaggcggagctgctgccctcaggagtgacccacctgcggttccagcggccccagggctttgagtacaagtcagggcagtgggtgcggatcgcttgcctggctctggggaccaccgagtaccaccccttcacactgacctctgcgccccatgaggacacgcttagcctgcacatccgggcagcagggccctggaccactcgcctcagggagatctactcagccccgacgggtgacagatgtgccagatacccaaagctgtaccttgatggaccatttggagagggccaccaggagtggcataagtttgaggtgtcagtgttagtgggagggggcattggggtcaccccttttgcctccatcctcaaagacctggtcttcaagtcatccgtcagctgccaagtgttctgtaagaagatctacttcatctgggtgacgcggacccagcgtcagtttgagtggctggctgacatcatccgagaggtggaggagaatgaccaccaggacctggtgtctgtgcacatctacatcacccagctggctgagaagttcgacctcaggaccactatgctgtacatctgtgagcggcacttccagaaggttctgaaccggagtctattcacaggcctgcgctccatcacccactttggccgtcccccctttgagcccttcttcaactccctgcaggaggtccacccccaggtccggaagatcggggtgtttagctgtggcccccctggcatgaccaagaatgtggaaaaggcctgtcagctcatcaacaggcaggaccggactcacttctcccaccattatgagaacttctaggcccctgcccgggggttctgcccactgtccagttgagcagaggtttgagcccacacctcacctctgttcttcctatttctggctgcctcagccttctctgatttcccacctcccaaccttgttccaggtggccatagtcagtcaccatgtgtgggctcagggacccccaggaccaggatgtgtctcagcctggagaaatggtgggggggcagtgtctagggactagagtgagaagtaggggagctactgatttggggcaaagtgaaacctctgcttcagacttcagaaacaaatctcagaagacaagctgacctgacaagtactatgtgtgtgcatgtctgtatgtgtgttggggcggtgagtgtaaggatgcagtgggagcatggatgctggcatcttagaaccctccctactcccatacctcctcctcttctgggctccccactgtcagacgggctggcaaatgccttgcaggaggtagaggctggacccatggcaagccatttacagaaacccactcggcaccccagtctaacaccacaactaatttcacccaaggttttaagcacgttctttcatcagaccctggcccaatacctatgtatgcaatgctcctcagccctcttctccctgctccagtagtctcccttccaaataaatcacttttctgccaaaaaaaaaaaa

SEQ ID NO: 23321 - DNA, 5633 bp, Homo Sapiens
caggggcgcggcggggccggagagaggcggtcccctgggaggacggggtctcccctcgttgcctttgtagtggagaaggtggacaagtggcagtcggcgtgatcgcagggaagcggggccggcgcgggcggccgagggtccaggcgagcccgcgggcggacgggagatgccgctgctacaccgaaagccgtttgtgagacagaagccgcccgcggacctgcggcccgacgaggaagttttctactgtaaagtcaccaacgagatcttccgccactacgatgacttttttgaacgaaccattctgtgcaacagccttgtgtggagttgtgctgtgacgggtagacctggactgacgtatcaggaagcacttgagtcagaaaaaaaagcaagacagaatcttcagagttttccagaaccactaattattccagttttatacttgaccagccttacccatcgttcgcgcttacatgaaatttgtgatgatatctttgcatatgtcaaggatcgatattttgtcgaagaaactgtggaagtcattaggaacaatggtgcaaggttgcagtgtaggattttggaagtcctccctccatcacatcaaaatggttttgctaatggacatgttaacagtgtggatggagaaactattatcatcagtgatagtgatgattcagaaacacaaagctgttcttttcaaaatgggaagaaaaaagatgcaattgatcccttactattcaagtataaagtgcaacccactaaaaaagaattacatgagtctgctattgttaaagcaacacaaatcagccggagaaaacacctattttctcgtgataaactaaagctttttctgaagcaacactgtgaaccacaagatggagtcattaaaataaaggcatcatctctttcaacgtataaaatagcagaacaagatttttcttatttcttccctgatgatccacccacatttatcttcagtcctgctaacagacgaagagggagacctcccaaacgaatacatattagtcaagaggacaatgttgctaataaacagactcttgcaagttataggagcaaagctactaaagaaagagataaacttttgaaacaagaagaaatgaagtcactggcttttgaaaaggctaaattaaaaagagaaaaagcagatgccctagaagcgaagaaaaaagaaaaagaagataaagagaaaaagagggaagaattgaaaaaaattgttgaagaagagagactaaagaaaaaagaagaaaaagagaggcttaaagtagaaagagaaaaggaaagagagaagttacgtgaagaaaagcgaaagtatgtggaatacttaaaacagtggagtaaacctagagaagatatggaatgtgatgaccttaaggaacttccagaaccaacaccagtgaaaactagactacctcctgaaatctttggtgatgctctgatggttttggagttccttaatgcatttggggaactttttgatcttcaagatgagtttcctgatggagtaaccctagaagtattagaggaagctcttgtaggaaatgacagtgaaggcccactgtgtgaattgctttttttcttcctgactgcaatcttccaggcaatagctgaagaagaagaggaagtagccaaagagcaactaactgatgctgacaccaaagatttaacagaggctttggatgaagatgcagaccccacaaaatctgcactgtctgcagttgcatctttggcagctgcatggccacagttacaccagggctgcagtttgaaaagtttggatcttgatagctgcactctttcagacatcctcagactgcacatcttagcttcaggtgctgatgtaacatcagcaaatgcaaagtatagatatcaaaaacgaggaggatttgatgctacagatgatgcttgtatggagcttcgtttgagcaatcccagtctagtgaagaaactgtcaagcacctcagtgtatgatttgacaccaggagaaaaaatgaagatactccatgctctctgtggaaagctactgaccctagtttcaactagggattttattgaagattatgttgatatattacgacaggcaaagcaggagttccgggaattaaaagcagaacaacatcgaaaagagagggaagaagcagctgccagaattcgtaaaaggaaggaagaaaaacttaaggagcaagaacaaaaaatgaaagagaaacaagaaaaactgaaagaagatgagcaaagaaattcaacggcagatatatctattggggaggaagaaagggaagattttgatactagcattgagagcaaagacacagagcaaaaggaattagatcaagatatggtcactgaagatgaagatgacccaggatcacataaaagaggcagaagggggaaaagaggacaaaatggatttaaagaatttacaaggcaagaacagatcaactgtgtaacaagagagcctcttactgctgatgaggaagaagcattaaaacaggaacaccaacgaaaagagaaagagctcttagaaaaaatccaaagtgccatagcctgtaccaatatctttcccttgggtcgcgaccgcatgtatagacgatactggattttcccttctattcctggactctttattgaagaggattattctggtcttactgaagacatgctgttgcctagaccttcatcatttcagaataatgtacagtctcaagatcctcaggtatccactaaaactggagagcctttgatgtctgaatctacctccaacattgaccaaggtccacgtgaccattctgtgcagctgccaaaaccagtgcataagccaaatcggtggtgcttttacagttcttgtgaacagctagaccagcttattgaagctcttaattctagaggacatagagaaagtgccttaaaagaaactttgttacaagagaaaagcagaatatgtgcacagctagcccgtttttctgaagagaaatttcatttttcagacaaacctcagcctgatagcaaaccaacatatagtcggggaagatcttccaatgcatatgatccatctcagatgtgtgcagaaaagcaacttgaactaaggctgagagattttcttttagatattgaagatagaatctaccaaggaacattaggagccatcaaggttacagatcgacatatctggagatcagcattagaaagtggacggtatgagctgttaagtgaggaaaacaaggaaaatgggataattaaaactgtgaatgaagacgtagaagagatggaaattgatgaacaaacaaaggtcatagtaaaagacagacttttggggataaaaacagaaactccaagtactgtatcaacaaatgcaagtacaccacaatcagtgagcagtgtggttcattatctggcaatggcactctttcaaatagagcagggcattgagcggcgttttctgaaagctccacttgatgccagtgacagtgggcgttcttataaaacagttctggaccgttggagagagtctctcctttcttctgctagtctatcccaagtttttcttcacctatccaccttggatcgtagcgtgatatggtctaaatctatactgaatgcgcgttgcaagatatgtcgaaagaaaggcgatgctgaaaacatggttctttgtgatggctgtgataggggtcatcatacctactgtgttcgaccaaagctcaagactgtgcctgaaggagactggttttgtccagaatgtcgaccaaagcaacgttctagaagactctcctctagacagagaccatccttggaaagtgatgaagatgtggaagacagtatgggaggtgaggatgatgaagttgatggcgatgaagaagaaggtcaaagtgaggaggaagagtatgaggtagaacaagatgaagatgactctcaagaagaggaagaagtcagcctacccaaacgaggaagaccacaagttagattgccagttaaaacaagagggaaacttagctcttctttctctagtcgtggccaacaacaagaacctggaagatacccttcaaggagtcagcagagcacacccaaaacaactgtttcttctaaaactggtagaagcctaagaaagataaactctgctcctcctacagaaacaaaatctttaagaattgccagtcgttctactcgccacagtcatggcccactgcaagcagatgtatttgtggaattgcttagtcctcgtagaaaacgcagaggcaggaaaagtgctaataaaacaccagaaaatagtcccaacttccctaacttcagagtcattgccacaaagtcaagtgaacagtcaagatctgtaaatattgcttcaaaactttctctccaagagagtgaatccaaaagaagatgcaaaaaaagacaatctccagagccatcgcctgtgacactgggtcgaaggagttctggccgacagggaggagttcatgaattgtctgcttttgaacaacttgttgtagaattggtacgacatgatgacagctggccttttttgaaacttgtttctaaaatccaggtcccagactactatgacatcatcaaaaagcccattgccttaaatataattcgtgaaaaagtgaataagtgtgaatataaattagcatctgagtttattgatgacattgagttaatgttttcgaactgctttgaatacaaccctcgtaacacaagtgaagcaaaagctggaactaggcttcaagcattttttcatattcaggctcaaaagcttggactccacgtcacacccagtaatgtggaccaagttagcacaccaccggctgcgaaaaagtcacgaatctgactttgtccttctaaaggatatatttgaagaaaaacaaattgttcatgaaaatggaacattaaatcatgctgtataaagcaataacaaacaattgattgaccacatgaaagtgtggcctgcactatattctcaattttaatattaagcactcaggagaatgtaggaaagatatcctttgctacagttttgttcagtatctaataagtttgatagatgtattggatacagtactggtttacagaggtttttgtacatttttgagatcattcatgtgtccagagatcttggaaaatattttttcacccacgatttattttgttattgatgatttttttttaaagtggtggtattaagggagagttatctacatggatgagtcttccgctatagcacagtttagaaaaggtgtttatgtcttaattaattgtttgagtacattctttcaacactacacatgaatgaatccaatcttataaccttgaagtgctgtaccagtgctggctgcaggtattaagtccaagtttattaactagatatttatttagtattgagagtaatttgtgaatttgttttgtatttataaaatttatacctgaaaaatgttccttaatgttttaaaccttttactgtgtttttattcctctaacttccttaatgatcaatcaaaaaaagtaacaccctccctttttcctgacagttctttcagctttacagaactgtattataagtttctatgtataactttttaactgtacaaataaaataacattttttcaaataaaaaaaaaaaaaaaaa

SEQ ID NO: 23322 - DNA, 5804 bp, Homo Sapiens
agcgatgtttgcccgtcagtcgagtccggagtgaggagctcggtcgccgaagcggagggagactcttgagcttcatcttgccgccgccacggccaccgcctggacctttgcccggagggagctgcagagggtccatcgccgccgtcctctggagggcagcgcgattgggggcccggacctccagtccgggggggatttttcgtcgtccccctccccccaaccagggagcccgagcggccgccaaacaaaggtaccagtcgccgccgcgggaggaggaggagccggagcctctgcctcacagccgctggacccgccgccttcttccccatctctcccccgggcctgctggttttgggggggagaaggagagaggggactctggacgtgccagggtcaaatctcgcctccgaggaaggtgcaactgaacctggtgttttaaaggataccttggtcccaaagtcatcatgaaggcccttgatgagcctccctatttgacagtgggcactgatgtgagtgctaaatacagaggagccttttgtgaagccaagatcaagacagcaaaaagacttgtcaaagtcaaggtgacatttagacatgattcttcaacagtggaagttcaggatgaccacataaagggcccactaaaggtaggagctattgtggaagtgaagaatcttgatggtgcatatcaggaagctgttatcaataaactaacagatgcgagttggtacactgtagtttttgatgacggagatgagaagacactgagacgatcttcactgtgcctgaaaggagagaggcattttgccgaaagtgaaacattagaccagctcccactcaccaaccctgagcattttggcactccagtcataggaaagaaaacaaatagaggaagaagatctaatcatataccagaggaagagtcttcatcatcctccagtgatgaagatgaggatgataggaaacagattgatgagctactaggcaaagttgtatgtgtagattacattagtttggataaaaagaaagcactgtggtttcctgcattggtggtttgtcctgattgtagtgatgagattgctgtaaaaaaggacaatattcttgttcgatctttcaaagatggaaaatttacttcagttccaagaaaagatgtccatgaaattactagtgacactgcaccaaagcctgatgctgttttaaagcaagcctttgaacaggcacttgaatttcacaaaagtagaactattcctgctaactggaagactgaattgaaagaagatagctctagcagtgaagcagaggaagaagaggaggaggaagatgatgaaaaagaaaaggaggataatagcagtgaagaagaagaagaaatagaaccatttccagaagaaagggagaactttcttcagcaattgtacaaatttatggaagatagaggtacacctattaacaaacaacctgtacttggatatcgaaatttgaatctctttaagttattcagacttgtacacaaacttggaggatttgataatattgaaagtggagctgtttggaaacaagtctaccaagatcttggaatccctgtcttaaattcagctgcaggatacaatgttaaatgtgcttataaaaaatacttatatggttttgaggagtactgtagatcagccaacattgaatttcagatggcattgccagagaaagttgttaacaagcaatgtaaggagtgtgaaaatgtaaaagaaataaaagttaaggaggaaaatgaaacagagatcaaagaaataaagatggaggaggagaggaatataataccaagagaagaaaagcctattgaggatgaaattgaaagaaaagaaaatattaagccctctctgggaagtaaaaagaatttattagaatctatacctacacattctgatcaggaaaaagaagttaacattaaaaaaccagaagacaatgaaaatctggatgacaaagatgatgacacaactagggtagatgaatccctcaacataaaggtagaagctgaggaagaaaaagcaaaatctggatacgatgaatggattaaagcagataaaatagtaagacctgctgataaaaatgtgccaaagataaaacatcggaagaaaataaagaataaattagacaaagaaaaagacaaagatgaaaaatactctccaaaaaactgtaaacttcggcgcttgtccaaaccaccatttcagacaaatccatctcctgaaatggtatccaaactggatctcactgatgccaaaaactctgatactgctcatattaagtccatagaaattacttcgatccttaatggacttcaagcttctgaaagttctgctgaagacagtgagcaggaagatgagagaggtgctcaagacatggataataatggcaaagaagaatctaagattgatcatttgaccaacaacagaaatgatcttatttcaaaggaggaacagaacagttcatctttgctagaagaaaacaaagttcatgcagatttggtaatatccaaaccagtgtcaaaatctccagaaagattaaggaaagatatagaagtattatccgaagatactgattatgaagaagatgaagtcacaaaaaagagaaaggatgtcaagaaggacacaacagataaatcttcaaaaccacaaataaaacgtggtaaaagaaggtattgcaatacagaagagtgtctaaaaactggatcacctggcaaaaaggaagagaaggccaagaacaaagaatcactttgcatggaaaacagtagcaacagctcttcagatgaagatgaagaagaaacaaaagcaaagatgacaccaactaagaaatacaatggtttggaggaaaaaagaaaatctctacggacaactggtttctattcaggattttcagaagtggcagaaaaaaggattaaacttttaaataactctgatgaaagacttcaaaacagcagggccaaagatcgaaaagatgtctggtcaagtattcagggacagtggcctaaaaaaacgctgaaagagcttttttcagactctgatactgaggctgcagcttccccaccgcatcctgccccagaggagggggtggcagaggagtcactgcagactgtggctgaagaggagagttgttcacccagtgtagaactagaaaaaccacctccagtcaatgtcgatagtaaacccattgaagaagaaacagtagaggtcaatgacagaaaagcagaatttccaagtagtggcagtaattcagtgctaaatacccctcctactacacctgaatcgccttcatcagtcactgtaacagaaggcagccggcagcagtcttctgtaacagtatcagaaccactggctccaaaccaagaagaggttcgaagtatcaagagtgaaactgatagcacaattgaggtggatagtgttgctggggagctccaagacctccagtctgaagggaatagctcgccagcaggttttgatgccagtgtgagctcaagcagtagtaatcagccagaaccagaacatcctgaaaaagcctgtacaggtcagaaaagagtgaaagatgctcagggaggaggaagttcatcaaaaaagcagaaaagaagccataaagcaacagtggtaaacaacaaaaagaagggaaaaggcacaaatagtagtgatagtgaagaactttcagctggtgaaagtataactaagagtcagccagtcaaatcagtttccactggaatgaagtctcatagtaccaaatctcccgcaaggacgcagtctccaggaaaatgtggaaagaatggtgataaggatcctgatctcaaggaacccagtaatcgattacccaaagtttacaaatggagttttcagatgtcggacctggaaaatatgacaagtgccgaacgcatcacaattcttcaagaaaaacttcaagaaatcagaaaacattatctgtcattaaaatctgaagtagcttccattgatcggaggagaaagcgtttaaagaagaaagagagagaaagtgctgctacatcctcatcctcctcttcaccttcatccagctccataacagctgctgctatgttaactttagctgaaccgtcaatgtccagcgcatcacaaaatggaatgtcagttgagtgcaggtgacagcaggacttgctaaggcactttgcacttaatggctgttgagggccactttttttttatactgcacagtggcacaaaaaaatatcagacaagcactattttatatttaaaaattgtttcttgacaagccgacttggcacttaagtgcacttttgtatgaagaaaagtacaatgaactgcttttcctcaagcaataattgtttccaacttgtctgggaattgtgtgtctggtaactggaaggccttccactgtggcaaatggaggcttctcactgcctgtagagacaatacagtaagcatagttaaggggtgggtcagaacatgttaagataacttactgtatatgtattcccttgtattttgttaaagctggaacatttgatatttttccatttatttatgaaaaaatatgaacctattttcatttgtacaaggtaattgttttttaaagcaagtcaccttagggtggctttaattgtataagtcaagcacatgtaataaattcaaaacctgcagttaacaggatattagacattaatcctggtaaccaaatattaaagattctctttaaaaaagactgaacatgtttacaggtttgaattaggctaaaaggtcttgcagtggcttttcatggcccttcaaattggaatggaactactgtactttgccatttttctataaatcagtatttttttttaattttgatatacattgtgtgaaaaaagaaaatggctaataaactgtattaaatcttaaacaatgtataaagattgtacttagccagttcaaaggtatatttattcataatgaattataacagttatatttttgtgttttcttgtaaatgtttcttttcccttaaatacagataattcatttgtattgcttattttattatgagctacaacaaaaggacttcaggaacaagtaatgtattagtatggttcaagattgttgataggaactgtctcaaaaggatggtggttattttaaatataaatagctaatgggggtggtaggcctataaaattaaatgccttgtataagatccaaaatgaatgcaaaattgttttcacttgtattgactttatgttgtatgattccaatctctgttctgtttggcacttgtatttaattcttcacctttgtaagacatttgtatattgtggatgtgttcattcaagctatttaatatctggcactgttaatacacagtactttattgtacagactgttttactgttttaattgtagttctgtgtactttttttggatggggctggcatgttttctttgtttcctggcaatacgacgtgggaatttcaatgcgttttgttgtagatgctaacgtgtcagaatcctttacattcaacttttctaagaaaagcattttcagtcttgtagtgtgtgcttacagtaactaattttgttgaaaatggtttcaagttattcaaatttgtacaggactgtaaagatttgttgacagcaaaatgttgaagaaaaaagcttatagaataaaagctataaagtatatattaggatctgcaaacaatgaagaattatgtaatatattgtacaaatgtaaagcaaaggctttgaaataaaatgccattgtttgtgaatccttaaaaaaaaaaaaaaaaaaaaaaaaaaaaaaaa

SEQ ID NO: 23323 - DNA, 3332 bp, Homo Sapiens
ccgcgcccgcgcccccgccgcccccatgggcgtgcagggcttccaggactacatcgagaagcactgcccgagcgccgtggtgccggtggagctgcagaagctggcccggggcagcctggtgggcggcgggcggcagcggcccccgcagaccccgctgcgcctgctggtggacgccgacaactgcctgcaccgcctctacggcggcttctacaccgactgggtcagcggcggccagtggaaccacatgcttggctacctggcggcgctggccaaggcctgcttcggcggcaacatcgagctcttcgtcttcttcaacggcgcgctcgagaaggcccggctgcacgagtgggtcaagcggcagggcaacgagcgccagacggcacagcagatcgtcagccatgtccagaacaagggcaccccgccgccaaaggtctggttcctgccgcccgtctgcatggcccactgcatccgcctggcgctcatccgcttccacgtcaaggttgcacagagcattgaggatcaccatcaggaagtgattggtttctgcagagagaatggtttccatggcttggttgcgtatgactctgattatgcactgtgcaacatcccctactatttcagtgcccatgccctaaaactgagccggaacgggaaaagtctcaccacaagccaatatctgatgcatgaagttgccaagcaactggacctgaatccaaatcgttttcctatttttgctgctctcttaggaaatcacattctgcctgatgaagatctggcttcctttcattggagtttacttggtccagaacatccactagcctcactaaaggtccgggcccaccagctggtcttgccaccttgcgacgtagtgatcaaagccgttgctgactatgtacgcaacattcaggacacctctgacttggatgccatagctaaagatgttttccagcattcacagtctagaacagatgacaaagttattcgatttaagagagcaattggatattattcagcgactagtaagcctatgtcatttcatccaccacattacttagcagccagacccggtccgtttggaatgcctgggatggtgccgccgcatgttcctcctcagatgctcaacattccgcagacctctctgcaagcaaagccggtggccccacaggtgcccagcccagggggcgccccgggccagggtccatacccgtacagcctctctgagccagcacctctcactttggacacgagcgggaagaatctgacggagcagaacagctacagcaacattcctcacgaagggaagcacacgccgctgtatgagcggtcctcgcccatcaacccggcccagagcggcagccccaaccacgtggattccgcctacttccctggctcttctacatcgtcatcttccgacaacgacgagggtagcggaggggcgacaaaccatatcagcgggaacaagattggctgggagaagacgggaagccactcagagcctcaggcacgaggagacccaggagaccaaacaaaggcagaaggctcgtccactgcctcttcaggaagccaactagccgaaggcaagggaagccagatgggcactgtccagccaatcccgtgcctcctgtcgatgcccaccaggaaccacatggacatcaccacacctcccctgccccccgtcgcacctgaggtgctgagagtggccgagcacaggcacaagaaggggctgatgtacccctacatcttccatgtcctgacgaagggtgaaatcaaaattgctgtttctattgaagatgaagccaacaaggacctgcctccggccgctctgctctataggccagttcgtcagtatgtttacggagtcctgtttagtttggcagaaagcagaaagaaaactgagagacttgcttttagaaagaacagacttccaccagaattttcaccagtgatcattaaagaatgggcagcttacaaaggaaagtctcctcaaaccccggaactggttgaagctcttgccttcagggagtggacctgccccaacctgaagaggctgtggttgggtaaggcggtagaggacaagaaccgcaggatgagggccttcctggcctgcatgaggtcggacaccccagccatgctcaaccctgccaacgtgcccactcacctcatggtgctctgctgcgtcttacggtacatggtgcagtggccgggagcacgcatccttcggcgtcaggagctagatgccttcctggctcaggcgctgtcccccaaactctacgagcctgatcagctccaggagctcaagattgagaacctagatccccgaggaattcagctatcagctctcttcatgagtggagtagacatggccttgtttgcaaatgatgcatgcggacagccaatcccctgggaacactgttgtccttggatgtattttgatgggaagctcttccaatccaaactcctcaaagccagccgggaaaagaccccactcattgacctctgtgatggtcaggctgatcaggctgccaaggtagagaagatgcgccagagcgtcctcgaggggctcagcttctccaggcagagccacacgctccctttcccgccgccacctgccctgcccttctaccctgcctctgcgtacccccggcactttgggcctgtcccaccctctcagggcaggggcagaggctttgcaggcgtctgtggctttggaggcccctatggggaaacggtagcaacaggcccttaccgtgccttccgtgtggcggcagcatcgggacactgcggagccttctcaggcagtgacagcagcaggactagcaagtcccagggcggagtccaacctataccttctcagggaggcaaactagaaatagctggcactgtggttggccattgggctgggagcaggcggggccgtgggggccgggggcctttccccctgcaggtggtttctgtcggaggaccagctagagggcgtccaagaggagttatttccaccccagtgattagaacatttggaagaggtggaaggtactatggcagaggttacaaaaaccaggcagcaattcagggcagacctccttatgctgcttcagcagaagaagtggccaaagaacttaagtcaaaatctggggaatcgaagtcctctgctatgtcttcagacgggtccctggctgaaaacggagtgattggccgaggagaagccggctccccagatgaacgggagcacgggtgacgccagggcccccagccactctgaaagtgccttgaataatgactctaaaacgtgcaatacaaatcctcatttaaatgcactaagtacagacagcgct

SEQ ID NO: 23324 - DNA, 6166 bp, Homo Sapiens
tgtccccaacatgaccgaacgaagaagggacgagctctctgaagagatcaacaacttaagagagaaggtcatgaagcagtcggaggagaacaacaacctgcagagccaggtgcagaagctcacagaggagaacaccacccttcgagagcaggtggaacccacccctgaggatgaggatgatgacatcgagctccgcggtgctgcagcagctgctgccccaccccctccaatagaggaagagtgcccagaagacctcccagagaagttcgatggcaacccagacatgctggctcctttcatggcccagtgccagatcttcatggaaaagagcaccagggatttctcagttgatcgtgtccgtgtctgcttcgtgacaagcatgatgaccggccgtgctgcccgttgggcctcagcaaagctggagcgctcccactacctgatgcacaactacccagctttcatgatggaaatgaagcatgtctttgaagaccctcagaggcgagaggttgccaaacgcaagatcagacgcctgcgccaaggcatggggtctgtcatcgactactccaatgctttccagatgattgcccaggacctggattggaacgagcctgcgctgattgaccagtaccacgagggcctcagcgaccacattcaggaggagctctcccacctcgaggtcgccaagtcgctgtctgctctgattgggcagtgcattcacattgagagaaggctggccagggctgctgcagctcgcaagccacgctcgccaccccgggcgctggtgttgcctcacattgcaagccaccaccaggtagatccaaccgagccggtgggaggtgcccgcatgcgcctgacgcaggaagaaaaagaaagacgcagaaagctgaacctgtgcctctactgtggaacaggaggtcactacgctgacaattgtcctgccaaggcctcaaagtcttcgccggcgggaaactccccggccccgctgtagagggaccttcagcgaccgggccagaaataataaggtccccacaagatgatgcctcatctccacacttgcaagtgatgctccagattcatcttccgggcagacacaccctgttcgtccgagccatgatcgattctggtgcttctggcaacttcattgatcacgaatatgttgctcaaaatggaattcctctaagaatcaaggactggccaatacttgtggaagcaattgatgggcgccccatagcatcgggcccagttgtccacgaaactcacgacctgatagttgacctgggagatcaccgagaggtgctgtcatttgatgtgactcagtctccattcttccctgtcgtcctaggggttcgctggctgagcacacatgatcccaatatcacatggagcactcgatctatcgtctttgattctgaatactgccgctaccactgccggatgtattctccaataccaccatcgctcccaccaccagcaccacaaccgccactctattatccagtagatggatacagagtttaccaaccagtgaggtattactatgtccagaatgtgtacactccagtagatgagcacgtctacccagatcaccgcctggttgaccctcacatagaaatgatacctggagcacacagtattcccagtggacatgtgtattcactgtccgaacctgaaatggcagctcttcgagattttgtggcaagaaatgtaaaagatgggctaattactccaacgattgcacctaatggagcccaagttctccaggtgaagagggggtggaaactgcaagtttcttatgattgccgagctccaaacaattttactatccagaatcagtatcctcgcctatctattccaaatttagaagaccaagcacacctggcaacgtacactgaattcgtacctcaaatacctggataccaaacataccccacatatgccgcgtacccgacctacccagtaggattcgcctggtacccagtgggacgagacggacaaggaagatcactatatgtacctgtgatgatcacttggaatccacactggtaccgccagcctccggtaccacagtacccgccgccacagccgccgcctccaccaccaccaccgccgccgcctccatcttacagtaccctgtaaatacctgtcatgtccttcaggatctctgccctcaaaatttattcctgttcagcttctcaatcagtgactgtgtgctaaattttaggctactgtatcttcaggccacctgaggcacatcctctctgaaacggctatggaaggttagggccactctggactggcacacatcctaaagcaccaaaagaccttcaacattttctgagagcaacagagtatttgccaataaatgatctctcatttttccaccttgactgccaatctaactaaaataattaataagtttactttccagccagtcctggaagtctgggttttacctgccaaaacctccatcaccatctaaattataggctgccaaatttgctgtttaacatttacagagaagctgatacaaacgcaggaaatgctgatttctttatggagggggagacgaggaggaggaggacatgacttttcttgcggtttcggtaccctctttttaaatcactggaggactgaggccttattaaggaagccaaaattatcggtgcagtgtggaaaggcttccgtgatcctctcgctgcacccttagaaacttcaccgtcttcaaactccatttccatggttctgttaattctcaaggagcagcaactcgactggttctcccaggagcaggaaaaacccttgtgacatgaaacatctcaggcctgaaaagaaagtgctctctcagatggactcttgcatgttaagactatgtcttcacatcatggtgcaaatcacatgtacccaatgactccggctttgacacaacaccttaccatcatcatgccatgatggcttccacaaagcattaaacctggtaaccagagattactggtggctccagcgttgttagatgttcatgaaatgtgaccacctctcaatcacctttgagggctaaagagtagcacatcaaaaggactccaaaatcccatacccaactcttaagagatttgtcctggtacttcagaaagaattttcatgagtgttcttaattggctggaaaagcaccagctgacgttttggaagaatctatccatgtgtctgcctccatatgcatctgggcatttcatcttcagtcccctcattagactgtagcattaggatgtgtggagagaggagaaatgatttagcacccagattcacactcctatgcctggaagggggacatctttgaagaagaggaattagggctgtggacactgtcttgaggatgtggacttccttagtgagctccacattacttgatggtaaccacttcaaaaggatcagaatccacgtaatgaaaaaggtccctctagaggatggagctgatgtgaagctgccaatggatgaaaagcctcagaaagcaactcaaaggactcaaagcaacggacaacacaagagttgtcttcagcccagtgacacctctgatgtcccctggaagctttgtgctaacctgggactgcctgacttcctttagcctggtcccttgctactaccttgaactgttttatctaacctctctttttctgtttaattctttgctactgccattgaccctgctgcaggatttgtgtcattttcctgcctggttgctgagactccattttgctgccacacacagagatgtaagaggcaggctttaattgccaaagcacagtttgagcagtagaaaacaacatggtgtatatctcaaattgcctgacatgaagaggagtctaacggtgaagtttcacttttcatcagcatcatctttcacatgttcattatcatccgctcttattcttgcatgtttaaacacttaaaatttttagtataatttttagtgtgttttgaagtggtgactaggctttcaaaaacttccattgaattacaaagcactatccagttcttattgttaaactaagtaaaaatgataagtaacatagtgtaaaatattcctttactgtgaacttcttacaatgctgtgaatgagaggctcctcagaactggagcatttgtataataattcatcctgttcatcttcaattttaacatcatatataatttcaattctatcaattgggcctttaaaaatcatataaaaggatataaaatttgaaaagagaaacctaattggctatttaatccaaaacaactttttttttccttcaatggaatcagaaagcttgtcaatcactcatgtgttttagagtaattacttttaaaatggtgcatttgtgcttctgaactattttgaagagtcacttctgtttacctcaagtatcaattcatcctccatacatttgaattcaagttgttttttgtcaaatttacagttgtcaattgatcttcaagctgcagggtgcctagaaatgggccgttgtctgtagccctggcatgtgcacacggacatttgccaccactgcaagcaaaagtctggagaagttcaccaacgacaagaacgattagggaaaatatgctgctgtgggttaacaactcagaaagtccctgatccacatttggctgtttactaaagcttgtgattaactttttggcagtgtgtactatgctctattgctatatatgctatctataaatgtagatgttaaggataagtaattctaaatttattattctatagttttgaagtttggttaagtttcctttcactcaattgatttattttgttgttaatcaaatttatgttaattggatcctttaaattttttttggcattttccaacaaaaatggctttattcataagaaaggaaaaaaatcaatggaatttgatatctaaagaagttagaaagggagcaaaataaaaaacataaaggagatagatgaattagtaagcaaatcagtagtcgagtttttcaaactggcaaaattaattaattgacttttagcccaaatttacattgttaattaaatcaagaaggaagaagatctaagagctcccattgataggcaagcctagagagaactagctaaatttatcatgctaggatattgaaacacagaaagtttacatacatttatgaagggtcaatttagtttggacagtgaggtatttgtcttagtggaaaaaaggagaattagtctgatcaaatcgtgaagtaatacagtgaacttgcaggtgcacaaaataagagggccacatctatatggtgcagtctggaattctgtttaagtttgtaggtacctcttggacttctgaattgatccagttgtcatccaccacagacatctcacatcagatacagacagttccaagattgacaacagagaacaacctgctggaaagacctgggcagaaatggagagccctgcgggaaccatgctacattttcatctaaagagagaatgcacatctgatgagactgaaagttctttgttgttttagattgtagaatggtattgaattggtctgtggaaaattgcattgcttttatttctttgtgtaatcaagtttaagtaataggggatatataatcataagcattttagggtgggagggactattaagtaattttaagtgggtggggttatttagaatgttagaataatattatgtattagatatcgctataagtggacatgcgtacttacttgtaaccctttaccctataattgctatccttaaagatttcaaataaactcggagggaactgcagggagaccaacttatttagagcgaattggacatggataaaaaccccagtgggagaaagttcaaaggtgattagattaataatttaatagaggatgagtgacctctgataaattactgctagaatgaacttgtcaatgatggatggtaaattttcatggaagttataaaagtgataaataaaaacccttgcttttacccctgtcagtagccctcctcctaccactgaaccccattgcccctacccctccttctaactttattgctgtattctcttcactctatatttctctctatttgctaatattgcattgctgttacaataaaaattcaataaagatttagtggttaagtgcaaaaaaaaaaaaaaaaaaaaa

SEQ ID NO: 23325 - DNA, 7064 bp, Homo Sapiens
  misc_feature (6957)..(6957): n is a, c, g, or t
ccctccggctcggcgaagcagggaaggggagagaagcaggagtcgggagactgcacaggccagaaagtctgcggagcgggccgcgcccctggcccgcccgggctccaagtcccgcgtcgccgccctggcggggacggtgcagcaggcggcgggatgcggcggggcggcagcctgagcgccccggatggcccgcggcggggcggcctgcaagagcgacgcgcggctgctgctggggcgggacgcgctgcggccggcgcccgccctgctggcccccgccgtgctgctgggcgccgcgctcggcctcggcctcggcctttggcttggctgccgcgcgggccgccagcgcacgcgacaccagaaagacgacactcaaaatctgctcaagaatttggagtctaatgcgcagaccccctcggaaactggctccccatcaaggaggaggaagagagaagtgcagatgtcgaaggacaaggaagctgttgatgaatgtgagccgccttccaacagcaatatcacagcattcgccctgaaggccaaagtcatctaccccatcaatcagaagttccggcctctggccgatggctcctccaacccgtctctgcatgaaaacttaaagcaggctgttttgccacaccagccggtagaggcctctccttccagcagtctggggagcctgagccagggtgagaaggacgactgcagctcctcatccagcgtccactcggccaccagcgatgacaggtttctcagccgcaccttcctccgggtgaacgccttccctgaagtgctggcctgcgagagtgtagacgttgacctgtgtatctacagccttcacttaaaagacctgctgcatttggacacggcactgaggcaggaaaagcatatgatgtttattcagatttttaaaatgtgcctccttgaccttcttcctaaaaagaagtcagatgatgaattataccagaagatcctttcaaaacaagaaaaagatttggaggaactagaaaagggacttcaggtcaaactgtcaaacacagaaatgtcgggggctggtgactctgagtacatcaccctggctgatgtggaaaagaaggagagagaatactctgaacagctaatcgataatatggaagctttctggaaacagatggcaaatatccagcactttcttgtggaccagtttaagtgttccagctccaaagcccgacagctgatgatgactctgacggaaagaatgattgcagccgaagggctattgtgcgattctcaggagctgcaggctctggacgccctggagaggacgatggggcgggcgcacatggcaaaagtgattgagtttctgaagctgcaagtccaggaggagaccaggtgccggctggctgccatctcccacggcctggagctgctggctggtgaggggaagctgtccgggcggcagaaggaggagctgctcacgcagcagcacaaggccttctggcaggaggcagagcgcttcagccgggagtttgtccagcgaggcaaagacctggtcacggcgtctctggctcaccaggtggagggaacggcaaaactcacgctggcccaagaggaggaacagagaagcttcctggctgaggcccagccgactgctgacccggaaaagtttctcgaggcttttcatgaggtcctggagaggcagaggctgatgcagtgtgacctggaggaagaggagaatgtcagagccaccgaggctgtggttgcactctgccaggagctgtacttcagcaccgtggacactttccagaagttcgtggatgccctgttccttcagacgctccctggcatgactggcctccccccggaagagtgtgactacttgaggcaggaagtccaggagaacgctgcctggcagctggggaagtcaaatcgcttccggaggcagcagtggaaactcttccaggagctcctagagcaagaccagcaggtgtggatggaggagtgtgcgctgtccagcgtgctgcagacacacctgcgggaggaccacgagggcaccatccgcggcgtcttgggccgactgggcggcctcactgaagagtccacgcggtgtgtcctgcaggggcatgacctgctgttgcgctcagccctccggaggctggcactccgcggcaacgccctggccaccctgacgcagatgcggctatcggggaagaagcacctcctgcaggagctgcgggaacagcgtgcactggagcaggggtcctcccagtgcctggacgagcatcagtggcagctgctcagggccctggaggcgcgtgtgctggaggaggccagccggctagaggaggaagcacagcagacacggctgcagctccagcagcggctcctggccgaggcccaggaggtggggcagcttctgcagcagcacatggagtgcgccattgggcaggcgctgctggtgcatgcacggaatgcagccaccaagagccgggccaaggacagggatgacttcaagaggacactgatggaggcggcagtggagagcgtctacgtgaccagcgctggtgtcagccgcctggtgcaggcgtattaccagcaaatcggaaggatcatggaggaccacgaggagagaaaactgcagcacctgaagaccctgcagggtgagaggatggaaaattacaaactgcggaaaaagcaagaactcagcaacccttcgtcgggcagcaggacggcaggtggcgctcatgagacctcccaggcggtccaccagaggatgctgtcccagcagaagaggttcctggcccagttcccagtgcaccagcagatgcgtctgcacgcccagcagcagcaggcaggagtcatggaccttctggaagcccagctggagacccagctacaggaagctgaacagaacttcatctccgagctggcagccttggcccgagtgccccttgctgaaagcaaactgttgcctgctaagcgtgggctgctagagaagcccctaaggactaaaaggaagaagcccctgccccaggaaagaggggacctgggggtgcccaacaatgaggaccttgcctccggggaccagacctcaggctcactcagcagcaaaaggctgagtcagcaagaaagtgaagctggggacagtgggaactcaaagaagatgctaaagagaagaagcaacttgtagtttaagaccagtcggtgggacaagacctgaagccctgggtctgggtgtgaattccaccttccctcctgcagtgctgagaggcagcgaggacggagaggacagcggcatctctaggctcttctgagagggacagagaaagaatagaaatgtgccctaaaagcataaatgagtatcacctgagaaaattaggcattcccgtcttggaaacacgtctctgtgagtttgcatttcatttggcttggagccctggctcgatgcctcatggatctttctccccaaggagggacgtcttgaggggtccgagcctcaggccaaggacccctgatgcagactctggaatccctggcccaaaggcctgtctgggcccatctggggctgaggacacacagatacataatgacacctgcagaaatgtattctctgaggacacttagaatatgaggaagagggtgtggcccaaccctcacttcacctggggaggggcttcttccggacagtagacaccctgcccgtgcagagagatgtcatgggggcacctgctctccctgatagatgctgagagcatccagaaacttccagaccagccctctcaccacacccagaagaggcctttcccatctggagagaagcttccagaccagcccttcacacaccacagccaggaggggcctttcccacctggagagaaacttccagaccagcccctcataccacagccaagaggggcctttctcacctggagagaaatttccagaccatcccctctcaccacagccaggagaggcctttcccaccggtagagaaacttccagaccagcccctcacaccacagccaagagaagcctttccagcctggagagaaacttccagaccagccctctcactacagccaggagaggcctttcccgcctggaaacttccggacaagcctctcacacaccacagccaggagaggcctttcccacctggacagaaacttccagaccagcccctctcaccacagccaggagaggcctttaccacctggagagaagcttccagaccagcccctcacaccacagccaggagaggcctttcccacctggagagaaacttccagaccagcccctcataccacagccaagaggggcctttctcacctggagagaaacttccagaccagcccctcacaccaccgccaggagaggcctttcccaccgggagagaaacttccagaccagcccctcacaccacagccaggagaggcctttcccaccgggagagaaacttccagaccagccctctcactacagccagaagaggcctttcccaccgggagaggaacttccagaccagcccctcacaccacagccaggagaggcctttcccgcctggagagaagcttcaggccagctcctcacaccacagccaggagagaccttttctgcctggagagaaactttcagaccagccccacacaccacagccaggagaggccgttcctgcctggagagaagcttccagaccagcccttcacaccacagccaggagaggcctttcccacctggagagaaacttccagaccagcccctctcaccacagccaggagaggccgttcccacctggagggaaaattgctcctttgatggaggttagggactgtcaccctcagcactgtgaacataccgggcgagatcattcttcaggggaaggagctgcccagagcatcacaggatgttccagtgtccctggtctctgcccaccagatgccagcactcccaccattcgtggcaaccaaggatgtctccagacactgccccgtgtccatggggttatcacccactgtgctgagtcaaagggtgccttgccctggtctaatccaggacatagccgtggatacgtccaaaaatccccagaacctagtgagccctctggctctgggagcccctatctcaggaattttcagggtcatttgtgacttttcatttcttaaaacctgaaatagactctcttagaaacaagtgactccttcccagtggccaaaacttaatcatcagagcgcttccttcagttcctcacccatcagccagtgggctctccaaagttaaccaacagctccctcttgtggttcactaaaaaacttggttattccatggagttgtgcaaagctatggcttccttggtgcaatattcttaaaacctgctttgcatagaaatcacttttgcccaggctggagtgcagtggcgtgatctcggctcatggcaatctccatctcccgggttcaagcgattttcctgcctcagcctccccagtagctgggactacagacgtgtgccaccacgcctggctaaatcttttttgtattttattttagtagagacggggtttcaccatactggccaggctgctctcgaactcctgacctcatcgtccacctgcctcggcctccccaaagtgctgagattaggcgttagccaccgcgcccggccagaaatcacttttatattgtcacatgggccctctgcacagagtccgatggctcctcccggggaagcctgattttgtgacgtgtgtatagtaaatgcaggccctctggcagcaccataattggtcggttaccctgagcccagagctctgaaagcatctgtggaatgatcacgggacccttctcctctgagaaggctcccggctgcctccccgccaccgagcttgtagcctgaatgcctggctgtcgcatggagcattttgcttctggggtgtcttccttagccaaagggaacgtgtcatttgctcgaccctggcccacccttgccgcccagctgttgtgctgggcacagtctggggcacaggcctccatgatgaagacgcgtgggctgtcggtgctttcatccgtcacaaactggcacctgtacctgccagcaggagcatgatggggacttccatgctggaattgctccctgattaaaatgagatatggctatttggaagacactgcattttagccagtgtacctgggcacagactcggggctgccctgaagctgatgaaggcttgaaggacggaagggctgagccacatgaaggcagcactcagggccaggggagagagaagaggatcagcagtgcagccccaggatgcctcgcagacgtgccttctgccatgattgtgaagttctagccacgtggaactctctcggaagaactggttgttaaagagcacctctgccttcttcctctgttgccatgtgatctctgcacacgctagctctccttcgccttctgccatgctggaagtagcctgaggccctcaccagaagcagacgctggcaccgtgctgcttgtacagcctgcagagccgtgagccaagtaaacctctttaattacccagcctcaggtgctccgggaacgccttccgcggaatgaagcggcccatgcccttgttgacgttgatgtttccgtcttcaaagacgatcttgccctggctgatgaccactagtggggagccgtggcactccataccctcgaagatgttgtactccaccgcctgcaccaacagcctcagcgttacttcccaggatttgctctgccccaaacgagctgttcataacagcgattttgcctaacattatatcataagcgtgttccaatgtttttttttctctctaaaaataccttttattgactgtaatattccactgtatggtccacagtgtatataaccaacaactcaccgttgcgcatgtaggctgccggtggctttctataatcaaatcaatattgttctggggcatcacaaagaggaagggggtcccccnggggttatgcaatgtggctgctttgactgtactggacataaaaataagtaaaatgttcttcattttacttaaaatgtgtctttaaataaaatttttttctctaggtt

SEQ ID NO: 23326 - DNA, 2445 bp, Homo Sapiens
gcccctttcaactctgccaagaatggctcccacctggctctcagacattcccctggtccaacccccaggccatcaagatgtctcagagaggcggctagacacccagagacctcaagtgaccatgtgggaacgggatgtttccagtgacaggcaggagccagggcggagaggcaggtcctgggggctggaggggtcacaggccctgagccagcaggctgaggtgatcgttcggcagctgcaagagctgcggcggctggaggaggaggtccggctcctgcgggagacctcgctgcagcagaagatgaggctagaggcccaggccatggagctagaggctctggcacgggcggagaaggccggccgagctgaggctgagggcctgcgtgctgctttggctggggctgaggttgtccggaagaacttggaagaggggaggcagcgggagctggaagaggttcagaggctgcaccaagagcagctgtcctctttgacacaggctcacgaggaggctctttccagtttgaccagcaaggctgagggcttggagaagtctctgagtagtctggaaaccagaagagcaggggaagccaaggagctggccgaggctcagagggaggccgagctgcttcggaagcagctgagcaagacccaggaagacttggaggctcaggtgaccctggttgagaatctaagaaaatatgttggggaacaagtcccttctgaggtccacagccagacatgggaactggagcgacagaagcttctggaaaccatgcagcacttgcaggaggaccgggacagcctgcatgccaccgcggagctgctgcaggtgcgggtgcagagcctcacacacatcctcgccctgcaggaggaggagctgaccaggaaggttcaaccttcagattccctggagcctgagtttaccaggaagtgccagtccctgctgaaccgctggcgggagaaggtgtttgccctcatggtgcagctaaaggcccaggagctggaacacagtgactctgttaagcagctgaagggacaggtggcctcactccaggaaaaagtgacatcccagagccaggagcaggccatcctgcagcgatccctgcaggacaaagccgcagaggtggaggtggagcgtatgggtgccaagggcctgcagttggagctgagccgtgctcaggaggccaggcgttggtggcagcagcagacagcctcagccgaggagcagttgaggcttgtggtcaatgctgtcagcagctctcagatctggctcgagaccaccatggctaaggtggaaggggctgccgcccagcttcccagcctcaacaaccgactcagctatgctgtccgcaaggtccacaccattcggggcctgattgctcgaaagcttgcccttgctcagctgcgccaggagagctgtcccctaccaccaccggtcacagatgtgagccttgagttgcagcagctgcgggaagaacggaaccgcctggatgcagaactgcagctgagtgcccgcctcatccagcaggaggtgggccgggctcgggagcaaggggaggcagagcggcagcagctgagcaaggtggcccagcagctggagcaggagctgcagcagacccaggagtccctggctagcttggggctgcagctggaggtagcacgccagtgccagcaggagagcacagaggaggctgccagtctgcggcaggagctgacccagcagcaggaactctacgggcaagccctgcaagaaaaggtggctgaagtggaaactcggctgcgggagcaactctcagacacagagaggaggctgaacgaggctcggagggagcatgccaaggccgtggtctccttgcgccagattcagcgcagagccgcccaggaaaaggagcggagccaggaactcaggcgtctgcaggaggaggcccggaaggaggaggggcagcgactggcccggcgcttgcaggagctagagagggataagaacctcatgctggccaccttgcagcaggaaggtctcctctcccgttacaagcagcagcgactgttgacagttcttccttccctactggataagaagaaatctgtggtgtccagccccaggcctccagagtgttcagcatctgcacctgtagcagcagcagtgcccaccagggagtccataaaagggtccctctctgtcctgctcgatgacctgcaggacctgagtgaagccatttccaaagaggaagctgtttgtcaaggagacaaccttgacagatgctccagctgcaatccccagatgagcagctaagcagctgacagttggagggaaagccagcctgggggctgggaggatcctggagaagtgggtggggacagaccagcccttccccatcctggggttgccctgggggataccagctgagtctgaattctgctctaaataaagacgactacagaagg

SEQ ID NO: 23327 - DNA, 1214 bp, Homo Sapiens
ccgtcattgacgccatgagcgcgctgctgcggctgctgcgcacggttgccccagccgctgcgtgcctgcggttggggaccagtgcagggaccgggtcgcgccgtgctatggccctgtaccacactgaggagcgcggccagccctgctcgcagaattaccgcctcttctttaagaatgtaactggtcactacatttccccctttcatgatattcctctgaaggtgaactctaaagaggaaaatggcattcctatgaagaaagcacgaaatgatgaatatgagaatctgtttaatatgattgtagaaatacctcggtggacaaatgctaaaatggagattgccaccaaggagccaatgaatcccattaaacaatatgtaaaggatggaaagctacgctatgtggcgaatatcttcccttacaagggttatatatggaattatggtaccctccctcagacttgggaagatccccatgaaaaagataagagcacgaactgctttggagataatgatcctattgatgtttgcgaaataggctcaaagattctttcttgtggagaagttattcatgtgaagatccttggaattttggctcttattgatgaaggtgaaacagattggaaattaattgctatcaatgcgaatgatcctgaagcctcaaagtttcatgatattgatgatgttaagaagttcaaaccgggttacctggaagctactcttaattggtttagattatataaggtaccagatggaaaaccagaaaaccagtttgcttttaatggagaattcaaaaacaaggcttttgctcttgaagttattaaatccactcatcaatgttggaaagcattgcttatgaagaagtgtaatggaggagctataaattgcacaaacgtgcagatatctgatagccctttccgttgcactcaagaggaagcaagatcattagttgaatcggtatcatcttcaccaaataaagaaagtaatgaagaagagcaagtgtggcacttccttggcaagtgattgaaacatctgaaattctgctgtcaagattcccatctctaaggactccaagtgctagagacaagggggtctatgagcatttactgacttcctgttaaaacttcattttttcaaactttttgagctatgcaatatataaataaacagtaagaattttaaaaaaaaaaaaaaaaaaaaaaaaaaaaaaaaaaaaaa

SEQ ID NO: 23328 - DNA, 2515 bp, Homo Sapiens
aaactcctgatgccccagcgtcacctcttccaggtgcccggttcccccagggacagcttcaagcggtagggacagacatctgaggacccagcctcagggatgctgtccccgggcttccaggctccagcgccgtaggactgaggcagactccacggtgagaaagagacccgatctaacccaggcctttcatcagagcccaggagggaaggcaggaagtgggaccacgaggcccggggggcttctaactcgtctggccagggagatctgaattggggtgaagagcagaatctccagaacaaggaggaggtggtgatcatggagacagatttggctgaaatgcctgagaaaggagctctgtcttcccaggattctccccatttccaagagaagagcacagaagagggagaagtggctgctctgcgcctcacggccagatcccaggaaacagtgacattcaaggatgtggccatggactttacaccagaggagtgggggaagctggatcctgcacaaagggatgtgatgctggagaactataggaacctagtctcactttggcttccagtttccaaacctgagagctacaacttggagaatggaaaagaaccattgaagcttgagagaaaagcccccaaaagcagctattcagacatggagactagaccacagagcaaggattcaacttcagtgcaagatttttccaaagcagaatcatgcaaagttgcaataatagacagactgacacggaatagtgtctatgactctaacttggaagcagcccttgaatgtgaaaattggttagagaatcagcaaggaaatcaggagagacatttgagagaaatgttcactcacatgaattcactctctgaggaaacagaccataagcatgatgtatactggaaaagcttcaatcagaaatctgtccttatcactgaagacagagttcccaaaggatcttatgccttccatacacttgaaaaaagcttgaaacaaaaatcaaacttaatgaaaaagcagagaacttataaagagaaaaaacctcataaatgtaatgattgtggtgaactcttcacctaccattcagtgcttattcgacaccagagagtccatactggagagaaaccctatacctgcaatgaatgtgggaaatcttttagccacagagctaatttaactaaacaccagagaactcatactagaattctctttgaatgcagtgaatgcaagaaaaccttcacagaaagctcatcccttgcaacacatcagagaattcacgttggagagagaccttatgaatgcaatgaatgtgggaaaggttttaatcgaagtacacatcttgtgcagcatcagttgattcatactggagtgaagccttatgaatgtaatgaatgtgataaagcttttattcattcatcagcactcattaaacatcaaagaactcatactggagagaaaccttataaatgtcaagaatgtgggaaagcctttagccattgctcatccctaactaagcatcagagagttcatactggagaaaagccatatgaatgcagtgaatgtggaaaaacttttagtcagagcacacatcttgttcaacatcagagaattcacactggagagaaaccctatgagtgtaatgaatgtgggaaaaccttcagccggagctccaattttgctaaacatcaaagaattcatattggaaagaaaccgtacaaatgtagcgagtgtggaaaagccttcattcattcatcagctctcattcaacatcagagaactcataccggagagaaaccctttagatgtaatgagtgtgggaaaagctttaagtgcagttcatctctcatcagacatcaaagagttcacactgaagagcaaccctgaaaaattactgaatgtgaagaaatgtaagttggttttatcactgtattaaatacttgagtgtttaggtggaaggcgcatccataatatgcatgtgaggaccaattctgtatgcatctaatttcatttgcgtaatacatagttttgagccataagcaggttctttatgtccgttaatttgataattatgaaatctagccagcgatttcaaaattttaatctccaacgtcccaaatagctatctgtggaaattcaagaagtccctgagagtaggtagcagtacgaacattgtgaaatccagttttcccctctcttgtttatgtcagagctttgttgtaagcctctcactttgtaaggaaattcttattgggtaggttaggctgagggcttacatccttatcatcaggaagacacaatgttgttatttattactccttgagatctagatacacatatggtataattcatctagagtgtaatttcttttatattagccttaaaaaccaaaaatgctgggttcaaagtccttagaattcccttcctccctcaacaagctgctgtctatgttgatgaccataactgggatgtataatatttacagacaactctaagttacgttcacatggattatgtacat

SEQ ID NO: 23329 - DNA, 8293 bp, Homo Sapiens
  misc_feature (2230)..(2230): n is a, c, g, or t
  misc_feature (3957)..(3957): n is a, c, g, or t
gacaacaacagggggacacaaaatggcggcggcttagctcctacccctggcggcggcggcagcggtggcggaggcgacggcacctcctccaggcggcagccgcagtttctcaggcagcggcagccccccggcaggcgcggtggcggtggcgcgcagccagatttgcctgaagacctggataatctccatttttgtcatggactgttaaaacgtttgaagttccaattctggtcttgatttcccagttaaagatgttcttcacccgaatgcagtctttcctgttggtaaaataagacaaccatcaacattgcctgtttgtctgcttttgaatctcttaaggatggatgtttgtaagatgttgcttaatacagtctggaatactctgtccatttgttgaattgtaaatgactttcaaatgtgcaagttctgttaaatacaaagagaacctctatgggtaacttttgtgttgaagaagtcatttgtcaaccatggtaaaacttgcaaacccactttatacagagtggattcttgaagctatacagaaaataaaaaagcaaaagcaaaggccctctgaagagagaatctgccatgcggtcagtacttcccatgggttggataagaagacagtctctgaacagctggaactcagtgttcaggatggctcagttctcaaagtcaccaacaaaggccttgcctcctataaggacccagacaaccctgggcgcttttcatcagttaaaccaggcacttttcctaagtcagccaaggggtctagaggatcatgtaatgatctccgcaatgtggattggaataaacttttaaggagagcaattgaaggacttgaggagccgaatcgctcctccctgaagaacatagagaagtatctcagaagtcaaagtgatctcacaagcaccaccaacaacccagcctttcagcagcggctgcgactgggggccaaacgcgctgtgaataatgggaggttactgaaagacggaccgcagtacagggtcaattatgggagcttagatggcaaaggggcacctcagtatcccagtgcattcccatcctcgctcccacctgtcagccttctaccccatgagaaagaccagccccgtgctgatcccattccaatatgtagcttctgtttggggactaaagaatcaaatcgtgaaaagaaagcagaagaactcctctcttgtgcagattgtggcagtagtggacacccatcctgtttgaaattttgtcctgaattaacaacaaatgtaaaggccttaaggtggcagtgcatcgaatgcaagacatgcagtgcctgtagagtccaaggcagaaatgctgataatatgcttttttgtgattcctgtgatagaggatttcatatggaatgctgtgacccaccactttccagaatgccaaaagggatgtggatttgccaagtctgcagaccaaagaaaaagggaagaaaactacttcatgagaaagctgcacaaataaaacgacgatatgcaaaacccattggacgaccgaaaaataaattaaagcaacgattgttgtctgtaaccagtgatgaaggatccatgaatgcattcacaggaagggggtcacctggtaggggtcaaaagactaaagtctgtaccacaccttcatctggtcatgctgcatctgggaaggactcaagcagcagattggctgttacagaccccactcggcctggtgccaccaccaaaatcaccaccacctccacctacatttctgcctctacacttaaagttaacaagaaaaccaaagggctcattgatggccttactaagttttttacaccatcacctgatggtcgcagatcacgaggtgaaattatagacttttcaaagcactatcgtccaaggaaaaaggtctctcagaaacagtcatgcacttctcatgtgttggctacaggtaccacacaaaagctaaaacctccaccttcttcacttccacccccaacccccatctccggtcagagccccagttcacaaaagtccagcacggccacttcttctccctctccccagagttcttccagccagtgcagtgtgccctccctgagcagccttaccactaacagccagctgaaggcactctttgatgggctttctcatatctataccactcagggacagtctcgcaaaaagggacacccgagttatgcaccacccaaacgtatgcgtcgtaaaactgaattatcttccacggnaaaatctaaagcccacttctttggcaaaagagatattagaagtcggtttatttctcactcctcctcctctagctgggggatggctagaggaagtatttttaaagcaattgctcacttcaagcgaacaactttccttaaaaagcacaggatgctaggcagattaaaatataaagtgacccctcagatggggaccccctcaccagggaaggggagcttgacagacggaaggattaaacctgatcaggatgatgatactgaaataaaaataaacatcaaacaagaaagtgcagatgtaaatgtgattggaaacaaggatgtcgttactgaagaggatttggatgtttttaagcaggcccaggaactttcttgggagaaaatagagtgtgagagtggggtggaagactgtggccggtacccttctgtgattgaatttggtaaatatgaaatccaaacctggtactcctcgccttacccacaggaatatgcaagattaccaaagctttacctgtgtgaattctgtcttaaatatatgaaaagtaaaaatattttgctaagacactccaagaagtgtggatggtttcatcctccagcaaatgaaatttaccgaaggaaagacctttcagtatttgaggttgatgggaatatgagcaaaatttattgccaaaacctttgcttgttagccaagctcttcctggaccacaaaacgttgtattatgatgtcgagccattccttttttatgtccttacaaaaaatgatgaaaagggctgtcatctggttggatacttctctaaggaaaagctttgccagcagaagtataatgtctcctgcataatgatcatgccccagcaccaaaggcaaggatttggacggtttctcattgatttcagctatttgctttctagaagagaaggccaagcagggtctcctgaaaagcctctctccgatctgggccgtctctcctacctggcatattggaagagcgtcatcttggagtatctctaccaccaccatgagaggcacatcagcatcaaggcaattagcagagcacggcatgtgccacatgacattgccaccactctgcagcacctccacatgatcgacaagagagatggcagatttgtcatcattagacgggaaaagttgatattgagccacatggaaaagctgaaaacctgttccagagccaatgaacttgatccagacagtctgaggtggaccccaattttaatttctaatgctgcagtgtctgaagaagagcgagaagctgagaaagaggctgagcggctaatggaacaagctagctgctgggagaaggaggaacaagaaatcctgtcaactagagctaacagtaggcaatcacctgcaaaagtacaatcgaaaaataaatatttgcattccccggagagccggccagtcacaggggagcgagggcagctgctggagctgtctaaagagagcagtgaagaagaagaggaggaggaggacgaggaggaggaagaagaggaggaagaagaggaagaggatgaagaggaggaagaagaggaagaagaagaagaagaagaagaaaatattcaaagctctcccccaagattgacgaaaccacagtcagttgccataaagagaaagaggccttttgtactaaagaagaaaaggggtcgtaaacgcaggaggatcaacagcagtgtaacaacagagaccatttcagagagcacagaagtactgaatnagccctttgacaactcagatgaagagaggccaatgccacagctggagcctacctgtgagattgaagtggaggaagatggcaggaagccagtcctgagaaaagcattccagcatcagcctgggaagaaaagacaaacagaggaagaggaaggaaaagacaatcattgcttcaagaatgctgacccttgtagaaacaatatgaatgatgattcaagtaacttgaaagaaggcagtaaagacaatcccgaacctctaaagtgcaaacaagtgtggccaaaaggaacaaagcgcggtctatctaagtggaggcaaaacaaagagaggaagaccggatttaaactgaatttgtacaccccgccagaaacacccatggagcctgacgagcaggtaacagtggaagaacagaaggagacttcagaaggaaaaaccagccccagtcccatcaggattgaggaggaggtcaaggaaactggggaagccctgttgcctcaagaggaaaacagaagggaagaaacatgtgcccctgtaagtccaaacacatcaccaggtgaaaaaccagaagatgatctcatcaaacctgaggaagaggaagaggaggaggaggaggaagaggaagaagaggaagaagaggaaggggaagaagaagaaggaggaggaaatgtagaaaaagatccagatggtgctaaaagccaagaaaaagaggaaccagaaatctccacggaaaaagaagactctgcacgtttggatgatcacgaagaggaggaggaagaggatgaagagccatcccacaacgaggaccatgatgccgatgacgaggatgacagccacatggagtctgccgaagtggagaaggaagagctgcccagagaaagcttcaaagaagtactggaaaaccaggagacttttttagaccttaatgtgcagcctggtcactcgaacccagaggtcttaatggactgtggcgtcgacctgacagcttcttgtaacagtgagcccaaggagcttgctggggaccctgaagctgtacccgaatctgacgaggagccacccccaggagaacaggcacagaagcaggaccaaaagaacagcaaggaagtcgatacagagttcaaagagggaaacccagcaaccatggaaatcgactctgagactgtccaggccgttcagtctttgacccaggagagcagcgaacaggacgacacctttcaggattgtgccgagactcaagaggcctgtagaagcctacagaactacacccgtgcagaccaaagtccacagattgccaccacgctcgacgattgccaacagtcggaccacagtagcccagtttcatccgtccactcccatcctggccagtccgtacgttctgtcaacagcccaagtgtccctgctctggaaaacacgtacgcccaaatcagcccagatcaaagtgccatctcagtgccatctctgcagaacatggaaaccagtcccatgatggatgtcccatcagtttcagatcattcacagcaagtcgtagacagtggatttagtgacctgggcagtatcgagagcacaactgagaactacgaaaacccaagcagctacgattctactatgggaggcagcatctgtggaaacggctcttcacagaacagctgctcctatagcaacctcacctccagcagtctgacacagagcagctgtgctgtcacccagcagatgtccaacatcagcgggacgtgcagcatgctgcagcaaaccagcatcagctcccctccgacctgcagcgtcaagtctcctcaaggctgtgtggtggagaggcctccgagcagcagccagcagctggctcagtgcagcatggctgctaacttcaccccacccatgcagctggctgaaatccccgagacgagcaacgccaacattggcttatacgagcgaatgggtcagagtgattttggggctgggcattacccgcagccgtcagccaccttcagccttgccaaactgcagcagttaactaatacacttattgatcattcattgccttacagccattccgctgctgtgacttcctatgcaaacagtgcctctttgtccacaccattaagtaacacagggcttgttcaactttctcagtctccacactccgtccctgggggaccccaagcacaagctaccatgaccccaccccccaacctgactcctcctccaatgaatctgccgccgcctcttttgcaacggaacatggctgcatcaaatattggcatctctcacagccaaagactgcaaacccagattgccagcaagggccacatctccatgagaaccaagtcagcgtctctgtcaccagccgctgccacccatcagtcacaaatctatgggcgctcccagactgtagccatgcagggtcctgcacggactttaacgatgcaaagaggcatgaacatgagtgtgaacctgatgccagcgccagcctacaatgtcaactctgtgaacatgaacatgaacactctcaacgccatgaatgggtacagcatgtcccagccaatgatgaacagtggctaccacagcaatcatggctatatgaatcaaacgccccaataccctatgcagatgcagatgggcatgatgggcacccagccatatgcccagcagccaatgcagaccccaccccacggtaacatgatgtacacggcccccggacatcacggctacatgaacacaggcatgtccaaacagtctctcaatggctcctacatgagaaggtagacaacgtgggcagtccacaaaacctacggggcatcactattggattgatctgcacaaatacctttgaagagtacgatttcaaaaccagcaattggtgtgaatgcaaaaacatttgttggcaccatttatttaaaaaaaaaaaaagctgtatgcagcagaaagccttatacaagttgtttttctttttttcctttttcttttttttggtaccttcatttctgttacttttatataaaattctctgcaaaggaaggcctctctttggactacaatttggaggcagccacttgttgtgcctgcttctgttaaacaatgtggatatcaagcccccccaaattatctgttttaatattgaacctagagctttttttttcccttccctgtccactccatgtaaatgcctttagcatttcagttattgtatattttgtttaaggtgacacttcagcatgccgctaatgtctttgttagtgacagtgcattttgtagtactgtacaagtgttgtgctaacagtaagccatttcttaagttttttgccttgattagggtgccctaatttgagggttttaaaaaaaactatatttttgttaattataaaactgtaaagagctataaaagctattcccatttggttagtcaaaagggttttattgctaaatgtttggtgtaaagttgagacccttttccattttggtgacagatttctttggggaaaaaaggcagctttctgttttataaatgcagacttctgtttattgaatgaagcatatctcagtgtttatctgtcaggttttgaaacatttcatatatgtccaaatacttggcaggatttaaaaaaaaatagtgaatttggtgtaaagttgctattttatggaaatgcctctaactttacattttcattccatctgtagatttttctatctttataaaatattggagttattttttaaggaaaaatagaaaagtagcttgtgaatagctcaaactaagcttacaaatcgcatgtaaaaaagcaaaaaagttatttgtgtctgtttatattgcttccttttttgtagcctttgtacctgtacagggtgacagtaagggccaagcaggagaggcgtaatccttgtataaaataggatccagcgacactcttgtatttatctgttctctttttagtcagtcacttcaaaaaaacaaaaaacaaacaaaaaaaagctgtacattttaacataaaataaattatgatgagccatttttagcctcttgtgtcctgtcatattatgattgatagagaatgaccaatggaactgtatcatgtgtcacgcctcagaacacatacacattttgggaaaataaattatttagtgtaaattggagttatgggattttctgatttgttttgactttgggggaggggttggcaataaataagagtaatatctaataaaaccatcacatataccaaatacctatttaataaattaatttataatggattttaatgcttttcatgaaagtttattttatgcgagtgcataccttctgtatgccaatcattgtctttaaaataaagtgaaattgttttttaaaaaaaaaa

SEQ ID NO: 23330 - DNA, 3572 bp, Homo Sapiens
ggcactagggatcgtccgcaggattgggactgatacagaggccgccacggagcccgccggagccaccgttcctgctgctgccgccgctgcccgaatcggaaccgtcgggccgcagccgccggcaatgccgcgaaggaagaggaatgcaggcagtagttcagatggaaccgaagattccgatttttctacagatctcgagcacacagacagttcagaaagtgatggcacatcccgacgatctgctcgagtcacccgctcctcagccaggctaagccagagttctcaagattccagtcctgttcgaaatctgcagtcttttggcactgaggagcctgcttactctaccagaagagtgacccgtagtcagcagcagcctaccccagtgacaccgaaaaaataccctcttcggcagactcgttcatctggttcagaaactgagcaagtggttgatttttcagatagagaaactaaaaatacagctgatcatgatgagtcaccgcctcgaactccaactggaaatgcgccttcttctgagtctgacatagacatctccagccccaatgtatctcacgatgagagcattgccaaggacatgtccctgaaggactcaggcagtgatctctctcatcgccccaagcgccgtcgcttccatgaaagctacaacttcaatatgaagtgtcctacaccaggctgtaactctctaggacaccttacaggaaaacatgagagacatttctccatctcaggatgcccactgtatcataacctctcagctgacgaatgcaaggtgagagcacagagccgggataagcagatagaagaaaggatgctgtctcacaggcaagatgacaacaacaggcatgcaaccaggcaccaggcaccaacggagaggcagcttcgatataaggaaaaagtggctgaactcaggaagaaaagaaattctggactgagcaaagaacagaaagagaaatatatggaacacagacagacctatgggaacacacgggaacctcttttagaaaacctgacaagcgagtatgacttggatcttttccgaagagcacaagcccgggcttcagaggatttggagaagttaaggctgcaaggccaaatcacagagggaagcaacatgattaaaacaattgcttttggccgctatgagcttgatacctggtatcattctccatatcctgaagaatatgcacggctgggacgtctctatatgtgtgaattctgtttaaaatatatgaagagccaaacgatactccgccggcacatggccaaatgtgtgtggaaacacccacctggtgatgagatatatcgcaaaggttcaatctctgtgtttgaagtggatggcaagaaaaacaagatctactgccaaaacctgtgcctgttggccaaactttttctggaccacaagacattatattatgatgtggagcccttcctgttctatgttatgacagaggcggacaacactggctgtcacctgattggatatttttctaaggaaaagaattcattcctcaactacaacgtctcctgtatccttactatgcctcagtacatgagacagggctatggcaagatgcttattgatttcagttatttgctttccaaagtcgaagaaaaagttggctccccagaacgtccactctcagatctggggcttataagctatcgcagttactggaaagaagtacttctccgctacctgcataattttcaaggcaaagagatttctatcaaagaaatcagtcaggagacggctgtgaatcctgtggacattgtcagcactctgcaagcccttcagatgctcaaatactggaagggaaaacacctagttttaaagagacaggacctgattgatgagtggatagccaaagaggccaaaaggtccaactccaataaaaccatggatcccagctgcttaaaatggacccctcccaagggcacttaaagtgacctgtcattccgagccagcgaaccccagcagtaggaatccgtaccctagggatctgtctgtcatttctctgttgctcttgtgattggcaagtacagtatcctttgggaaggccatccccctcaggactgtcctggctccgacctttgtgtacactgcagacgctggttctgaggaactgttgtttcggcctcagtgaggttgcctggatgggatctgtattagacttgagtgcaggtctctcagcactgacccaaggagttctgttatggtactgtacctgtccagtcactggttctctcctcatgtcctctcgccccatgaggttgtgttgtgtcttctaagcgtggtactagtgcttgccacctggtcaccagacctccaaatatggctgccaccaccaggacctttccagttactccttatatgtgtgttctatggaggggcagggaaaaggtggcacttgtgagtgtgtgtggattggcagggggtccattcactttgggttccatcttgctttaaatttcttcattttgattaagagacctctttttgatctgtattgggctaaccagagccaaatacttttgaagagtttcccagggactagtcatggtaatagcatataattgatctgaatgagatggagagaagaatgaaggggtggtggttctgggtttgatttgagttcacctgtgggcagtgggcagtgggcagtgtcttggtgaaagggaacggatactactttttgcctcaccgtaaagtactcactagtaaatatttccttctctctttactcccactttttacgtttgcaggtgccaaagtaatgtccacttttccctttcatgctgcatattaactggttaattatactgcagaaaccttttcacctccactagtctgatacagtacatctgtacttccatataccttgcactgattttgtctgagtgccctgggagaagtagaaaatgattgaaagtgacttccgtatctcagcccatgactcagcaaggcagaatggccacccctgccaaagtttgcttctcttttcaacagtgcctcaccctccctctaggattaaagtgcttctgcccttccacgaactcctcctccatttcctttttgggatttgtcaccatccttctattctctggtcttctatttttggtgttgttcaagtgaaggaagagatgttccctctaatttctctctagcccattataacctgctatcttggggcaacttttgatgtatgacatgtcacccttcccaacttggtctcctccaacatgctgtcttcatgtggagccctcaccacaatccctgactccggtcatttgtgcctttctcttgtcatctctgtacactacttatattcactgtgggttgggggagctaattttaagcatgttcagtggcagctcccctccagtttcagtgtcactgttaaaatttatcaaaaagcaacttcactaggggttttcttaagggataaaggccttttacagaagctaaacccttccccacatgtggtagaatgtgctcttctatatctactcctcaataaagcatgttctctgctcaaaaaaaaaaaaaaaaaaaa

SEQ ID NO: 23331 - DNA, 1662 bp, Homo Sapiens
agattgcacaggaggaggcggtagcggaacctttctcctccgcctggttctcgcttccacccgggcccagttggggacggacgcactagaggcgacctaaacatggagacagcgggcgctgcaactgggcagccggcctctgggctggaggctccggggtccacgaatgaccggcttttcctggttaaaggtggaattttccttggtaccgttgctgcagcgggaatgctagctggatttattacaacattatcattggctaaaaagaaaagccctgaatggttcaataagggaagtatggccacggctgcattaccggaaagcgggtcttcccttgccttgcgagctctgggctggggctccctgtatgcatggtgtggggttggtgtgattagcttcgcagtctggaaagctttaggagttcacagtatgaacgactttcgaagtaaaatgcaatcaatatttccaacaattcccaagaactccgaatccggctgttgagtgggaggaaacattgaaatccaaatgagatgagcatggatgaatttcaaaatgcttgttacagaaaggggtggctctggagacaccatgacagcaaaaggactgggactgatttctcccaggaacatgggcagattgctgactgaaccagtgcactggatagcattcagcctcatcacaggagagtatgtgtgtgcgtgctgggggagggtaaagttttcccacagttaagaagactatttaaaaatagtaattacaggaataacttccttatgtggaggggaccccataggaaatgattctgtttgtaacagttgaagcaaatttcatactaaaaaagtttataataaaagtatgataagaaaatatttataaaacagaccccctaatagcaatagtactgcaatgtgtctaattaaaggagtttcaagagcctttcttgtcaatatatgacagaacttggaagtcttattctgattagccagactacaaagtgacagtcacctggtaagtcctgtatggtaggaagtgggtgtggctctcgggtcctaaatgtggtctgtgctttacagccatcacacacatgctagttatttacctgatgcccttgcttgaaggccctataaattcttatacttaaaacaaaaagccagtaatgagttgtgatcaccccaaaaggcacagttgggctaaaataatgatatcaggggtaaacatatttttttgagaagttggtctggatctctgaacactgacaatttgtcattttgtctcagttgtcaaagtaaaaaaagcccagttgtcatccgtcttcaatatttttaaccagaaagtcacctgagtacggagtcccaatataaagtatttgggaccacctccctaacaaagctgttagggtaaattctgtgtgcacgcccaactccctcctgtcttccacagtctcctacaaaaaaaacagatggagaataatgtctacatgcaattgtttttactgcaattgtattttaaaatattttcaagaagagaaatactttaatatgtcaatatgtccagagaaaaaacctgtagttaaatatcagttgtgcaatttcttcctacttgcctaggctctaattagtcagcaatcaggtttaataaaggacatttgaaatttcaaaaaaa

SEQ ID NO: 23332 - DNA, 1362 bp, Homo Sapiens
tttctctttttcaaatgttttttaatatcctgcaggtaataacactgatttttctaatactcagaaacatctacttagcagttgtgatactaatttgcaaaatgtaataatgttatacaaatataagatactactaaatacatagtagaaataattgcatgattcctgatatttatattcaaggtataaacatgactgatttcgctgatactacagaataaaaaaaataaagctgctatgtaaaaaattaaagaatatctcaattagatatttttgttcccaatctctttcagacagatctatgaaataatatagaatatactatcaatatgttctttcatatgaagtgaaaaaaatgggatttaagtagtgagataatttctattttttacttttttaaaaaaatagacagggtcttgctatgttgcccaagctggtctcaaactcctgggctccagtgtgcttcctgcctcagcctcccaaagtgctgggattataggcatgagccattgtgcctggcctgtgggatcatttctattggtttttcttagagtcaaggtcttgctctgttgcccaggctgatcttggacttgcgagccaccatgcctggctgggttttttaaaaatagaatctcactgatagcctgcaagaaacagatgcagtgcctgcttccgtatcagtccaaggagccctcgtgtttgccacctttacctttgaacctccccctgcctccctgcctgtgtccgcttttgcagctcaatgcagccatgacaaggaaagaaaagacaaaggaaggccagagagccgcgcagttctctgcaggtgcagatgcaggcagtggaggtggcctgagcaggcagaaggacaccaagcgccctatgttgcttgtcattcatgacgtggtcttggagcttctgactagttcagactgccacgccaaccccagaaaataccccacatgccagaaaagtgaagtcctaggtgtttccatctatgtttcaatctgtccatctaccaggcctcgcgataaaaacaaaacaaaaaaacgctgccaggttttagaagcagttctggtctcaaaaccatcaggatcctgccaccagggttcttttgaaatagtaccacatgtaaaagggaatttggctttcacttcatctaatcactgaattgtcaggctttgattgataattgtagaaataagtagccttctgttgtgggaataagttataatcagtattcatctctttgttttttgtcactcttttctctctaattgtgtcatttgtactgtttgaaaaatatttcttctataaaattaaactaacctgccttaagaacagaaaaaaaaaaaaaaaaaaaaa

SEQ ID NO: 23333 - DNA, 4230 bp, Homo Sapiens
atgaagaccagggggttcagctttccaagacaaaggcaagtcctgtttctttttcttttctggggggtgtccttggcgggttctgggtttggacgttattcggtgactgaggaaacagagaaaggatcctttgtggtcaatctggcaaaggatctgggactagcagagggggagctggctgcaaggggaaccagggtggtttccgatgataacaaacaatacctgctcctggattcacataccgggaatttgctcacaaatgagaaactggaccgagagaagctgtgtggccctaaagagccctgtatgctgtatttccaaattttaatggatgatccctttcagatttaccgggctgagctgagagtcagtgatataaatgatcactcgccagtgtttcggcacaaagagatggtcttaaaaatatcagaaaatacagctgaagggacagcatttagactagaaagagcacaggatccagatgaaggtcataacagtatccaaaactacacgatcagctccaactcttttttccatattaaaattagtggcagtgatgaaggcatgatatatccagagctagtgttggacaaagcactggatcgggaggagcaggaagagctcagcttaaccctcacagcgctggatggtgggtctccatccaggtctgggacctccactatacgcattgtggtcttggatgtcaatgacaatgccccacagtttgcccaggctctgtatgagacccaggctccagaaaacagtccagtagggtcccttattgttaaagtgtctgcaggagatgcagactcaggagtcaatgcagaagtatcctattcattttttgatgcttctgaagatattttaacaacgtttcaaatcaatcctttttctggggaaatctttctcagagaattgcttgattatgagttagtaaattcttacaaaataaatatacaggcaatggacggcggaggcctttctgcaagatgtacagttttgataaaagtattagattccaatgacaatcctcctgaactgatcatatcatcactttccaactctgttgctgaaaactctcctgggatagtattggctgtttttaagattaaagacagagactccggagaaaacggaaagacaatttgctatgttcaagataatctgcctttttttctgaaaccgtctgttgacaatttttacatcctaatgactgaaggtgcactggacagagagagcaaagctgagtacaacatcaccatcaccgtcactgacatggggacacccaggctgaaaaccgagcacagcataaccctgcaggtctccgacgtcaatgacaacgcccccgccttcacccaaacctcctacaccctgttcgtccgggagaacaacagccccgccctgcacatcggcagtgtcagcgccacagacagagactcaggcaccaacgcccaggtcacctactcgctgctgccgccccaggacccacacctgcccctcgcctccctggtctccatcaacgcggacaatggccacctgtttgccctcaggtcgctggactacgaggccctgcaggctttcgacttccgcgtgggcgcctcagaccgcggctccccggctttgagcagcgaggcgctggtgcgcgtactggtgctggacgccaacgacaactcgcccttcgtgctgtacccgctgcagaacggctccgcgccctgcaccgagctggtgccccgggcggccgagccgggctacctggtgaccaaggtggtggcggtggacggcgactcgggccagaacgcctggctgtcgtaccagctgctcaaggccacggagcccgggctgttcggtgtgtgggcgcacaatggggaggtgcgcaccgccaggctgctgagcgagcgcgacgcagccaagcacaggctggtggtgcttgtcaaggacaatggcgagcctcctcgctcggccaccgccacgctgcacgtgctcctggtggacggcttctcccagccctacctgcctctcccggaggcggccccggcccaggcccaggccgacttgctcaccgtctacctggtggtggcgttggcctcggtgtcttcgctcttcctcctctcggtgctcctgttcgtggcggtgcggctgtgcaggaggagcagggcggcctcggtgggtcgctgctcggtgcccgagggtccttttccagggcatctggtggacgtgagcggcaccgggaccctgttccagagctaccagtacgaggtgtgtctgactggaggttcagagaccggcgagttcaagttcttgaagccgattaccccccacctcccgccccataggggtgggaaagaaatagaggaaaattctactctccccaatagctttggatttaattattgaaaggaacccacttaataaagacatttacttctttaatatattcttgttggctaactaaattgtgtatgcccaccacaaagaaggtactattttttgtttgattcatcttcaactttgcgtattatgcttaacttcacaagttaactttttcttattttgtatcctgatgaggcatttcttactagaatcccataagtgaaatataatatttttcaaagttgatatcatttaaaaatttttgctcgttttaaatgtctttattgactttaaattcattgcctctacattattcattagttcttcttttcctaaaactttttacttgttaaaatagtctgctgcatgtaatatgtgcttttactatttgatatttcttctatttttcttttgaaaccggtgttcttattggtttgccatccttgttcattacaactgttttttgtttgtttgtttgttttttggtttgtttgtttttttttttttttgagacggagtctcgctctgtcgcccaggctggagtgcagtggcgcgatctcagctcactgcaacctccgcctcccaggttcaagcgattctcctgcctcagcctccagagtatctgggactacagttgcatgtcaccacgtccggctaatttttgtattttcagtagagacgggtttcatcatggtggccaggatggtctatctcttgacttggtgatccaccccactcagcctcccaaattggtgggatttacaggcatgagccaccgcacccagcctacaataattttcttaaactttaccttttattttaaagttctagtttcccggcattgatagttccctatttgaaatataatgtttctcttgtaagtgatatgataaataaacccctaattagccttagaagaaaaaccactgcaagatattaagcgtgtgtaaatgggctttagtctggaaaccaaaaaaaaaaaaaaaaaaaaaaaaatttagtcattctataggatcatgtgaaaatatttaatttgctccttttaattctgtataaacaaatcagaggttcctgaggttcctgttaaatttttaatggctaatagcccagtgccatccagttgaaaaaacaacagcaatcacaaagtagaggtttatattgtgcggcttttatattcagctattagagtgttattggtagtgtctagccttttcctccaccacattccttgacttaatccatttgggcctattatagacaaaatagagcttctttctagatataaggtctttgaggcagggctcagtggctcattcctgtaatcccagcactttgggaggccaaggcgggcagatcaccttaggtcacgagtttgagaccagcctgaccaacgttaagtaaccccgtctttactaaaaatacaaaattagccaggcatggtggcacatgcttgtaatcccagctactcggaaggctgaggcaggagaatcgcttgaacccaggaggtggaagttgctttgagccgagattgcaccattgtactccagcctgggcaataagagcaaaactccatcaaaataaaataaaataaaatataaaataacttaaaaagaactttgaataaaattctatgaaaaaagacactagaatgctgttcttaattttaatagtgttaagataggtgttagtgtggtctgttctttacctccctttatttggtgcagagaagttagatcctgctaaatttcaattaagaggggaccttaaaataaggatcaatctcttatttaaccctgtaagttactttaaagctaatacaagaaaaacaaagacaagtgaaagtaaggaaacagaaattgc

SEQ ID NO: 23334 - DNA, 3547 bp, Homo Sapiens
atggaggccagagtggagcgtgctgtgcagaaaaggcaagtcttatttctttgtgtatttctgggaatgtcttgggctggcgccgaaccgcttcggtattttgtggcggaggaaaccgagagaggcacctttcttaccaacttggcaaaagacctagggttaggggtaggggaactgagagcccggggaactagaattgtttcagaccagaacatgcaaattttactgctcagttcgcttactggtgatctacttctaaatgagaaattggaccgagaggaactgtgtggccccagagagccctgtgtgctgcctttccagttgttattggaaaaaccttttcagattttccgtgctgaactatgggtcagagacatcaatgatcacgctccagtatttctagacagagagatttccttgaaaatattagaaagtaccactccaggggcggcatttctcctagagagtgcacaggattcagatgttggaaccaacagcctgagtaactacaccatcagccccaatgcctatttccatattaatgtccatgatagcggggaggggaatatctatcccgaattggtgctgaatcaagtgctggatcgggaagagataccagagttcagtttaaccctcaccgctttagacggcggctctcctccaagatcagggaccgccctcgtgcgcattctggttctagacgtaaatgacaacgcccctgattttgtgcggtcgctctacaaggtgcaggtgcccgaaaatagccccgttggttccatggttgtctccgtgtcagccagagatttagataccggaagtaatggggaaatagcctatgcattttcttacgccactgaaagaattctcaaaacgtttcaaatcaatccaacatctggcagtcttcatcttaaagcgcaattggactatgaggcaattcaaacttacacattaactattcaggccaaagacggcggcgggctttctggaaaatgcactgtagtggttgatgtaacagatataaacgataatcgacccgagctgctcctgtcttcacttactagcccaattgcagaaaactcacccgagacagtcgtggctgtttttaggattagagacagagattccgggaacaatggaaagacagtgtgctccatccaggacgatgtccccttcatcctgaagccatctgtcgaaaacttctatactctggtaacagagaaacctttggatcgagagaggaacactgagtacaacatcaccatcaccgtcaccgacttggggacacccaggctgaaaaccgagcacaacataaccgtgctggtctccgacgtcaatgacaacgctcccgccttcacccaaacctcctacaccctgtttgtccgtgagaacaacagccccgccctgcccatcggcagtgtcagcgccacagacagagactcgggcaccaacgcccaggtcatctactccctgctgccgtcccaggacccgcacctgcccctcgcctccctggtctccatcaacgcggacaacggccacctgtttgccctcaggtccctggactacgaggccctgcaggcgttcgagttccgcgtgggcgccacagaccgcggctcccccgcgctgagcagcgaggcgctggtgcgcgtgctggtgctggacgccaacgacaactcgcccttcgtgctgtacccgctgcagaacagctccgcgccctgcaccgagccgttgccccgggcggccgagccgggctacctggtgaccaaggtggtggcggtggacggcgactcgggccagaacgcctggctgtcgtaccagctgctcaaggccacggagcccgggctattcggcgtgtgggcgcacaatggcgaggtgcgtaccgccaggctgctgagcgagcgcgacgcagccaagcagaggctggtggtgctggtcaaggacaatggcgagcctccgcgctcggccaccgccacgctgcacgtgctcctggtggacggcttctcccagccctacctgcggctcccggaggcggccccggaccaggccaactcgctcaccgtctacctggtggtggcgttggcctcggtgtcttcgctcttcctcctctcggtgctcctgttcgtggcggtgcggctgtgcaggaggagcagggcggccccggtgggtcgctgctcggtgcctgagggcccctttccacgacatctggtggacttgagcggcaccgggaccctatcccagagctaccagtatgaggtgtgcctgactggaggctccgggacaaatgagttcaagtttctgaaaccaattatccccaacctgctaccccagagcacaggcagggaagtggaagaaaatcgcccatttcagaataatttgggtttctgataaagaatgtaaactaaatccgcgtctgtgaatacgtttctgattaggaacttattgcgaggttcccttaagggagtgtctttacatcatttcaaatatgtactcttgaagtcaagcaataaatttctatacataaaataggatcctgatttagtatcaagaacccttcacaaagcatgaaatgtatatgtgtaatgttttatgtcaaacaattatgcttaatatacagtctattaaatgtaagtcttgtttgagatattttaaattgctttccattgttttcaatctctactgagacttcctgagttgattagaaagctgtatgagtgtacctaccctagtctcagaagcatagactgtagagtatctttttaagcatttttaaaaaatgcttttaatgcatcatacactattttaacacttttaatctgagaagaagcatatgaggcatggtattttaggaatgaacaaatagatggtcttagagattcagtaagttcactaagttccactaactaataagtgacaaaactgagcatccatcccagatctgtctgactctgggtcagtgaccctgctccgattccatactgttttctgtcattagatatcacctggcaagtttctgcctaattaaggagaagtcttttatcatatttatactgctgtccaatcttttctatatttagaaataataatgtacatatttatctatggttttattttcttatacaccaaaagtcctgcttttctgggtcaattttcaactattattactaatgctctgatctgtccaaactcaagcggaaaacaaaattgaaagggcaacctgtgccttctcctttcttcagaacatatgactttcatttcccagaaaaaagattaatggtcctgagtaggaatattacataattttgattgcatcattagttaattattttcttcatattgtagattttctgcagtcacccatacttaacatttgtaatacattttcctgatttgaaagtttgtttttaaaagttttctattaattatagtgcactattgaatcaggaaaatttaagaaaaagaatagttagttttaaatgcataatatcaaagagaatcatagatgatcattaaatttttagaaattctcggaagttaaggagaagcatgtttt

SEQ ID NO: 23335 - DNA, 2854 bp, Homo Sapiens
ggcaccacaggttggccaggtgcccgtcacaccagccccaagtgccccaggggtcgtgcagacctgtccaggtgtgctgctgaccagcagggctggccgctcatggagacgcatcaccagcccgctcccagcatcctgctccatgaaggccgaccgctccatggctgggtcctcaggttctgagctgaagggggagaaaaaaaccctgtgagaggccacagagcaggcccaggacccagaacgggcatctcctgccatggcaaggcctgcaggctcccaacggttggggtgcccagccgcatcagcagcaccaggccacccctgccaatcgaggcatgggcttgctttctctaatattgtttctgggtgctaaggttacaacagcaaacaagactgactcattccttttctccacgggacttactgtcttatcatcccctggactcaagatgagggtgctaggatgccctcccacaccaccccagcttacccaggggcacacctcagggtatgtggacctgcacaaaggtcccttccttagccccatgagacaccccaggggacacacaggtccacagatcctgccacaggcctgggaacccattggcaggagagtaagacagtgcaggggtccacaaacatttcttaaggggccagagagtaaatacttcaggctttgcaggccagacattctctgttgcaaaacgcaattctgctattgtagctcaaaggcggctatagacaactcagaagttaatgagtgtgttgtgtcccaatgaaacttgatttacaaaagcaggagactggcctgtagccttagtttgccaacccctggatgagtgggttcccaggtctgcagtgagaaggggagaggccagggcagtggcgagcaggagagaaggcagctgaggatgggaggcctaccaggccctgaacagagagtgcgtgctgcccaccttcatgaggagccggtgctgcaggtccagaggtgcctctttaaagaaagatgccagcttgtcgtagacggtcacagccctgcaatgaaatcatggcaggactattgcattagtccagcgtggaggctactttctgctcaaaccactcatttgggtcccgtgcccaacgtcacccatcctcagcaaaaccaccattatttccttctgcctggtttccagaaagttcccctaaagccctgaggaatcaccgaatgaaaggggctttttacaaacaggaaacttaagtggagtgccaatacacaacatggattgcagcaggctcggtctaagataaaaccagacggtggacaacaggccaggtaagacccacatggtctgcactccctggttctgttattgtgtggaggaatgtcttagtctgttgctcctgtgggtgtagctaaagcacaaaccaggagtcctcatccttagaaagcagttagacagacatctgagaaccaatcccaaactgcagccttccacagaaccttctggaaccttctggaatgcaacttattactgccagagggtctttgatgagagtctactctccaccatttgtcttcagagagaatacccacctattctctttccgtggaaaggtaagttattggagtttatgcagtctggtatattaattgagagctttacttcaaagaatgtcacgtttatggttcagtctcacagactgggttaaaaaggcagtgttgactattaagttgtaaattactatgatgatcattattattgaagcaagctgtgagaaatgagcattatcttacaatatctgcattttagtgaacctgaaggaagagtgtattgctggaattacagaagcctgagaaccacaggggaattctcactgcagggtattcagggtcaaaagctgattctattttgcatgctcaatccttcgtcaatttatttttatttctttctttattttttgagacagggtcttactctgtcgcccaggctggaaggccttggtgcaatctcagctcactgcaacctcgcctcccgggttcaagtgattctcctgcctcagcctcccacgtgactgggattacaggtttttgcttgtctgatgactgatggctccacccagacctgccaaccactcccgcggccccatccagaagtggctcagcgtgcatgaggaccatctccaacatccctgtgattgtacccccaaccaaccagcagcaagaacctattgcctagtcacctcccctctctttccccaactatcattgaaaaagtctggcttccaaattttccgggagactgatttgggtaataataaaactccagtcttctgttcagccagctctgcatgaattaagctctttctctattgcaattttcctgtcttgataaattgtctctacctgggcagggggcaaaatgaacccatagggtggttacagtaccttgctgggtcacttgatattcctggagggtcacgggaagcgctatgtgaatcccacttctgatattgtaagattctctccagggcctgaaagcttaaggggttgagcaactcctcccttctcaggcccagccccagggcgcaaggccgcttgcatcagcagcgtgcgtgagcagatgcgccagcaagatagcaaaagcaggaagagagccagccggaagacaagtacctctgaagatggagaaagaggccatctgggtacaacgttgcagttacgtcagaccaggacacttcctgtttacaggagactataaaacctttgccccatcctcacttggggctgacgccgttttaggcctcagcccaccagcacccaggctctcattaaaacagcatgttgctccaaataaaaaaaaaaaaaaaaaaa

SEQ ID NO: 23336 - DNA, 1837 bp, Homo Sapiens
aggaggaacacttccactaaaagaaacatcaagattactatgaactattagctgtgactgcacccgggcacttgagctcctcatatcaggagactactaggcaagaacagtcaccattctttgagggataattaatcctgatcatcaggaggaggtacagctgctgttaagcaatggagggaagggaggtatatctttggtactcagttgattcacgtggagacttcttggtattcctttgcccaatttttttttctttttctttttcagaggtggagtctctgtcacccaggctggagtgcagtggcaccatctcggctcactgcaacctctgcctcctgggttcaagctattctcctgcctcagcctcccgagtaactgggattacaggcatgtgccaccatgcccagctgatttttgtatttttagtaaagatggagtttcgccatgttggccagactagttttgaacttctggcctcaagcagtccacctgcctcagcttcccaaagtgctgggattacaggcgtgagccactgcgcctggccccttgcccaatatttataaaataattatacaagtgcccagaccgtgacctgagcaggatatgctgacttcaggctcagccccctcagggctgagggtctaaatcatgcctccgtggaagtgacggagaccggaacacgtgctggctgagggtaaggaggatctagaatggatagtagaagagggagatgatgagtatcagttgtggcctcaagaccagtcagtgatggaggttgtagtttgtccaacttactttcctaagtttcccccaggaaaggaggtccaccagaacttaaaccaaaaagtagagctgagcagcacaaatgtgggctgtagtggacaccatcctgtgctgcccagaccccccagccaccatgcttcctgggcctcttcccacagctactgggagtgctctcagccagcagccttcagctgtcagccccctgggaattttcctcaatggaagagttacctcactgacatacccctttcccaggcaggtcagttcaaggttatgaaggcctggccccactgcctcaacttgacaacttggaagggccatctcagcttcaagaccctcccatgagactggctgaggtcttcatacagcatcggagcccaatttatctctctgagcaatcctgcttcctttcctgcccccttcccaagagcaatccctgataaacttcccgcatgctaatctccatctcagagtctactttccaaggaagtgggcctataacatagctcttccagtttttgttaacaattctagaacaggggtcagcaaactttttttttttttcttttgagacggagtctcactccgtcaccaggctggagtgcagtggcgcgatcttggctcactgcaacctctgcctcccgggttcaagcgattctcctgcctcagcctcccgagtagctgggactaccatgccaccacacccagctaatttttttatttttagagagattgggtttcaccatgttggccaggatggtcttgatctcttgacctcgtgatccgcgctcctcggcctcccaaagtgctgggattatagacatgaatccccacacccggccagcaaacttttttaaaggaacagatagtaaatattttaagctttgtgagccacatggtctctgtcacaactattcagctctgctattgtaatacaaaagcagctgtggacagtatgtaaatgaatgaatgtggctgtgttccaataaaactttatttcccaaaaaaaaaaaaaaaaaaaaaaaaaaaaaaaaaaaaaaaaaaaaaaaaa

SEQ ID NO: 23337 - DNA, 2811 bp, Homo Sapiens
cctaggccagccccccccgcaggaagagtccccttcctctgaagcaaagagcagaggacccaccccaccagccatgggcccacgggatgccagacctcctcgaaggagcagccagccatctccaacagcagtgccagcctccgacagccctcccaccaagcaagaggtgaagaaggcaggagagagacacaagctggcaaaggagcggcgagaagagcgggccaagtacctggcggccaagaaggcagtgtggctggagaaggaggagaaggccaaggcgctgcgggagaagcagctccaggagcgccggcgccggctggaggagcaacgtcttaaagccgagcaacgccgtgcagccctggaggaacggcagcggcagaagctcgagaaaacagcaaggagcgctatgaagcagccatccaacggtcagtgaagaagacgtgggccgaaatccggcagcagcgctggtcctgggcaggggccctgcaccacagctctccaggacataagaccagtgggagcaggtgctccgtgtcggcagttaacctgcccaaacacgtggactctataatcaacaagcggctctcaaagtcctctgccacgctctggaactcccccagtagaaatcgcagcctgcagctgagcgcatgggagagcagcatcgtggatcgtctgatgacgcccactctctccttccttgctcggagtcgcagcgcggtcacactgccccgcaacggccgggaccaggccgtgccggtgtgcccgcgctcggcctccgccagccccctgacgccgtgcagcgtcacccgaagcgtgcaccgctgcgcccccgccggtgagcgcggggagcgccgcaagcccaacgccgggggcagccccgctccggtgcgccgccggccggaggcctcgccggtgcagaaaaaggagaagaaggacaaggagcgggaaaacgagaaggagaagagtgccctagcccgggagcgcagcctcaagaagcgccagtcgctgcccgcctccccacgtgcccgcctctccgccagcaccgcctctgagctcagccccaaatccaaggccaggccatcctctccctccacatcctggcacaggcctgcctccccctgccccagcccagggccaggccacactctgcctccaaagccaccgtccccccgaggcaccactgcatcccccaaggggcgggttcggaggaaggaggaggcaaaggagagccccagcgccgcagggcccgaggacaagagccagagcaagcgcagggccagtaacgagaaggagtcagcagccccagcctcaccggcaccttcgccggcgccctcgcccaccccagccccgccccagaaggagcagccccccgcggagacccctacagacgctgctgtcttgacctcacccccagcccctgctcccccggtgacccctagcaaaccaatggccggcaccacagaccgagaagaagccactcggctcttggctgaaaagcggcgccaggcccgggagcagcgggagcgcgaggagcaggagcggaggctgcaggcagaaagggacaagcgaatgcgagaggagcagctggcacgggaggccgaggcccgggcggagcgggaggcggaggcccggaggcgggaggagcaggaggcacgagagaaggcgcaggccgagcaggaggagcaggagcggctgcagaagcagaaagaggaggccgaagctcggtcgcgggaagaggcggagcggcagcgtctggagcgggaaaagcacttccagcagcaggagcaagagcggcaagagcgcagaaagcgtctggaggagatcatgaagaggactcggaagtcagaagtttctgaaaccaagaagcaggacagcaaggagcgcrawcgccaacggttccagcccagagcctgtgaaagctgtggaggctcggtccccagggctgcagaaggaggctgtgcagaaagaggagcccatcccacaggagcctcagtggagtctcccaagcaaggagttgccagcgtccctggtgaatggcctgcagcctctcccagcacaccaggagaatggcttctccaccaacggaccctctggggacaagagtctgagccgaacaccagagacactcctgccctttgcagaggcagaagccttcctcaagaaagctgtggtgcagtccccgcaggtcacagaagtcctttaagagggtttgccttggatccgggcacagttgtgagggctcctctgcatcacctaccaggatgtctggaggagaaaaagacagaacaaagatggaagtggcctgggcccctgggggtgggtcctctctgttgtttttaatctgcaccttatagactgatgtctctttggccggagccagatctgcccctcagtgcattcgtgtgctcgcacgcgcagacatcccttctcccccatacacacatatacactcacagcctctctggcctcttcccttggggaggggccacctgtagtatttgccttgatttggtggggtacagtggatgtgaatactgtaaatagcttgtgctcagactcctctgcgtggagagggtgggtgcaggaggcagaccctccccccaaagccccctggggagatcttcctctctctatttaactgtaactgagggggatcccaggtctggggatgggggacaccttgggccacaggatactggttgcttcaggggtacccatgccccctgccctcgcctggaatcagtgttactgcatctgattaaatgtctccagaaataaagaataattctgccaaaaaaaaaaaaaaaaaaa

SEQ ID NO: 23338 - DNA, 2216 bp, Homo Sapiens
ggaagctcagcagtgtccactgtcgccattccttggccatagaaaacaatgtatttgaattttgatgtaagcatagcaaattgaagatgaagatgacacgttgatttcttgtttgaaattaaccaagtcccgagaaaagaaagtgaatagtgttagcacgaggaggaaggaagaaatggagattagattggatactctttctgcatcactgggtagatccagcactttaaatgactgcaacttggaagataaattagcttggtatgaaggtgaagcttacatgtggcatcactggaagccttttcctgaaaaccctctctggacatgtcttgatttccaaatagcacaagttggaccctgggactactgctcctcttgtattcgccacacacgtctcaagtcttcctgctcagatatggatctcctacattcatggcgaagcagcagttttgggaatttcgatcgttttcggaataattctttatcaaaaccagatgattcaactgaggcacatgaaggagatcccacaaatggaagtggagaacaaagtaaaacttcaaataatggaggcggtttgggtaaaaaaatgagagctatttcatggacaatgaagaaaaaagtgggtaaaaagtacatcaaagccctttctgaggaaaaggatgaggaagatggagagaatgcccacccatatagaaacagtgaccctgtgattgggacccacacagagaaggtgtccctcaaagccagtgactccatggatagtctctacagtggacagagctcatcaagtggcataacaagctgttcagatggtacaagtaaccgggacagctttcgactggatgacgatggcccctattcaggaccattctgtggccgtgccagagtgcatacggatttcacgccaagtccctatgacactgactccctcaaaatcaagaaaggagacatcatagacattatttgcaaaacaccaatggggatgtggacaggaatgttgaacaataaagtgggaaacttcaaattcatttatgtggatgtcatctcagaagaggaagcagcccccaagaaaataaaggcaaaccgaaggagtaacagcaaaaaatccaagactctgcaggagttcctagagaggattcatctgcaggaatacacctcaacacttttgctcaatggttatgagactctagaagatttaaaagatataaaagagagtcacctcattgaattaaatattgaaaacccagatgacagaagaaggttactatcagctgctgaaaacttccttgaagaagaaattattcaagagcaagaaaatgaacctgagcccctatccttgagctcagacatctccttaaataagtcacagttagatgactgcccaagggactctggttgctatatctcatcaggaaattcagataatggcaaagaggatctggagtctgaaaatctgtctgacatggtacataagattattatcacagagccaagtgactgaacacgcattcccaactatatatctacagatgcattccattttaactcttcttgagctaaaacgtcaaataggagaggaagataagataaatatttgtaaataaaacctaaagtttaaatgttttaatctgaataattgtacataaaattttgtatctctaacattccaaattactgtcaataaaatatatatttattattttaaatgctatgtgttaatatttcacttgcttgtattagaaaggcaaaatgtaagactttggtatgtgtgacatatgctttatttggctttattttacaagtacagtatctgcaaaaaacaaagtaaccttttttcatacctgccagttttgaatttatatatgttattgaacaaatagtaatagaggattcgctgttgaaacaagttgtccaagcaatgttatattcatttttatacttattgggaaagtgtgagttaatattggacacattttatcctgatccacagtggagttttagtaattatattttgttgatttcttcattttgttttctggtataaaagtagagataatgtgtagtcacttctgatttagtgaaaccaattgtaataattgtggaaatgttttgtctttaagtgtaaatattttaaaatttgacataccctaatgttaataataaaaagaactatttgcataaaaaaaaaaaaaaaaaaaaaaaaaaaaaaaaaaaaa

SEQ ID NO: 23339 - DNA, 3246 bp, Homo Sapiens
taagcttgcggccgccgccgcggcggggagcgcgtctccgcgcagctgggacgaggcggaggcgcaggaggaggaggaggccgtgggcgacggcgatggcgacggggacgcggacgcggacggcgaggacgacccggggcactgggacgcggacgctgccgaagccgccaccgccttcggggccagcggcgggggccgcccgcacccccgggcgctggctgccgaggagatccgacagatgctacagggcaagccgctggccgacacgatgcgtcctgacacgctgcaggattacttcgggcagagcaaggccgtgggccaggataccctgctgcgctcgctcctggagaccaacgaaatcccctcgcttatcctgtgggggccgccgggctgcggcaagaccactctggctcacatcatagccagcaacagcaagaaacatagcataaggtttgtgacattatctgcaacaaatgccaagacaaatgatgtgcgagatgtcataaaacaagctcaaaatgaaaagagctttttcaaaaggaaaaccatcctttttattgatgagattcatcggttcaataaatctcagcaggacactttccttcctcacgtggaatgtgggacgatcactctgattggggcaaccactgaaaacccttccttccaggtcaacgctgctcttctgagccgctgtcgagtgattgttcttgagaagcttccagtagaggcaatggtgactattttaatgcgagcgatcaactccctgggaatccacgtcctagactctagccgtcccactgaccctctgagccacagcagcaacagcagctcagagcccgccatgttcatagaggataaagcagtagacaccctggcttacctcagtgacggtgacgcccgagctgggttgaacggactgcagctggcggtgctggctaggttaagctctaggaagatgttctgtaagaagagtgggcaatcctattctcccagtagagttctgatcacagagaatgacgtgaaggagggcctacagcgatcccacattttatatgaccgggcaggtgaggagcattacaactgcatctccgccctgcacaagtccatgcggggctcagaccagaacgcctccctctactggctggctcgcatgctcgagggaggagaggacccactctacgtggcacggaggcttgtcaggtttgccagcgaggacataggtctggcagacccatctgcgttaacacaagcggttgctgcctaccaaggctgtcattttataggcatgcctgaatgtgaggtgcttctggcccagtgtgtggtctactttgccagagccccaaagtccattgaggtgtacagcgcctacaacaacgtcaaagcctgcctgaggaaccaccaggggccactgccccccgtgcccctgcacctgaggaacgcgcccactaggctgatgaaggatttgggctatggcaaaggctacaagtacaaccccatgtacagcgagcctgtggatcaggagtacctgcctgaagagttgaggggggtagatttcttcaagcagaggaggtgctgactcctcagggcacgacagcagaaggatgttgcttttttaagggagggccagaaagaaagttagtggattgcaaagttggttgcctggtggaagttagaacagaccaacattttgtgccagaaatttaagagttccataggtggaggcgcagttctttcgaataaatgtgtaactttgaaattgtgttcatttgcactcggtgcagcggttatgcttatgaaaatacctggcagctttgtgcaatgaattaatgttataaggaattatctattttgtcatagtatttaagtcataatgtcatttcagaattcagttctgtaggattttcttttctttaaaaaatgtatattctgggtagttttaattggtaaaaaaatgtaattgtgatttaatactgcatagtgttttgggtattttttttatatgcaaaggtcttacgagccaataaaactatttcaaagtactcttcgattctgtcatggttttcctgcctggatgctaggtaccagcgttgtcaccattgcatttggtgggtggatactgggaaggagaaatcaccccagatgggaagagtggggagcttaagttaagaagtcagtgttatcttgttgaaagttaactctgatctctttaaaggaatacataaaggaattctttaaatggcttgtggaagactccagtagtcccatgcccattttttcccacttgtcctggtttcttcttgcagctccatatttctaaacagtcgtttttcttttactttatgtgtgtcctgaacacaaaatacgccactccttctgctcagttaagagttatttgtccctactgctacttcctctccctctccttagttgcatgtcgtgcatatgcccacaaggatggccccttcaggtagtcggttctcctcctgccgttgcgtgatccctcctggggtcctcctgccatgtctggaaggctgccggctgttggcctgggacgtcctctgcctttattctgagtgagatgcccattttctggatgctccatcccgccttactggtttattccgctatttcagtgcaacccatcctctagtagttttatcaggctggagggactgtatgttgcagaggcttggcccgactggcctccctccttctgtctggagtggttgcactgcagtgtgcagttgccatccccagaatctcccttcatcatcaccctggagctttcctctgcttctccctgcaccccatctgatgacaggactgactgctttctggcacaggtggcatgtaccctctagtagctttatggagcaggggtgtgtggaggaaaagtatttttagacctcaggagactcaaaatgcttttattgtaccttcagacgtgtctgagggtttggctagtaataaattgtaggtaagaaattgtgcattgttttacactttcccacattgttgtcaagtttgaaggcatcctgatgtgtgtggtcttttgtttgtaacctctatcaacttgtagactcttctgtctttgctccccgtgttttaaaagtctgcactgggtacttgttgggcctttcaatctggaaactcctttcagttctagggaagtttctttttttattcaataaatttatttatttatgaaaaaacctcgtgccgaattcttggcctcgagggccaaat

SEQ ID NO: 23340 - DNA, 5790 bp, Homo Sapiens
  misc_feature (13)..(13): n is a, c, g, or t
  misc_feature (18)..(18): n is a, c, g, or t
  misc_feature (21)..(21): n is a, c, g, or t
  misc_feature (31)..(31): n is a, c, g, or t
  misc_feature (42)..(42): n is a, c, g, or t
  misc_feature (51)..(51): n is a, c, g, or t
  misc_feature (53)..(53): n is a, c, g, or t
  misc_feature (5698)..(5698): n is a, c, g, or t
  misc_feature (5724)..(5724): n is a, c, g, or t
  misc_feature (5727)..(5727): n is a, c, g, or t
  misc_feature (5750)..(5750): n is a, c, g, or t
  misc_feature (5770)..(5770): n is a, c, g, or t
  misc_feature (5773)..(5773): n is a, c, g, or t
aaccaggaataanatttncanttcactcatnatttttcacantagccctgnantactattatccccattttacaatgaggaactgaggtgcagggaggttaaagaccttgcttattccaagcctggcccagagcctgccctgcctgtatcgtggtatggaatggaagtgactaatgctgactgagtgataggggtgaatctgaatctcgtcataaagcgtgctgctatttctcggctccttttggaggaaggcaggagaaattgggcacttagcacacgtctacaatctcatttatatgttcccaccaccaagcagagcactgtgcttggttgatgtgctgaaaagcaaactgcaccttttgtgtaaaaagtagggaaaggagaagaatgtgtatttgtatttgcataagtataccctcaaagaatacataaaaattagtgaaagcgtttacccagatggaggggaaggcggagggagggtcagggtggaaggaagacttttccctgtgtatgtgtacctttttgggggttttttgttctggttttttggtttgtttgttttgcaccatgggattgaaaaataaatgtttaaattattttttaaaacaaaataaaagccagctgctcccagcatatgttctctctgtggttctcccaaggtcttgctgtggccagcgccctggtggacatttctcagcagatgccgatagtgtacaaggagaagtcaggagccgtgagaaaccggaagcagcagccccctgcacagcctgggacctgcatctgatgctggggccagggactctcccacgcacgagctagtgagtggcacaccagagccatctgcagggaagggcgtggcggggaaatggctgtgcggtgcgggacggaagactggaaaccctcaaagcatctgactcacctgcatgatcacaagctttctttgacggtttctcccatccgtgttccagcatctaaccttttacttttgcataggaaatacttgatttaattacaggtccagggatgagctgatggttgctggaggaggccagtgtagagccagtgagagaactaggaatgacactcaggttcactgtggaaaactgttcttgggactgtctcaactgtgcaaaaaacaaaagatggagtgtttacaagtagacattcgtcatcagttgttcttgaacatggtcttttaaaaactagtcagatgaattaacttgttttcatctgaagcctgctatcttttttaaaagatgtgctatttattcttgcacgatttaggcaattatctctcttccagggagtacctttttttctagttgagaattaataatggtccatctcttttgatcatatcaagctaggatagaaggggggctattttaaatgtcaaggtcagcagtgttactttgaatgtaaactggtataataggtagttttctatagtaacttgattaatttagtcttaatccatttgaaactctctcttcctttctctctgcctgtccctctccttctccatctcaccctccctctctcacacatacacacacaaacacatacacacaacactaagtgcctagactttaaatagatctagcaattggaaagttagtaagcctaagtttttacataattgcattcctacattcttgtaaaatttaaatagctaccattggcaatctgctttttttctaaaatctgatttgcagccaggaaagaattttctcacccaaggaacatttgatctagcagcagggatgagaggaaagcagaaatgaatgaactgtgaaagctcctgtttttattatcaaaaaggacactgtcaagaaggcgccccctgcccccacccccgtgtcaccctaggcctgataagcgatcagaggaaaggactcattcatgtcacgcttccttgagcagaaaagagcactgagagcacttgggacccctggatcagagagcatctgtgtgtcctgcagcctcctctgaacttgtggttcattctcaggctggggtggactcagatgccaggaaagggacagcctcccattgtcaggcagaagctgcccaaagcctggagaaggacttgtttgccctctttcccccaggaggggctcgacccacccaccctccctctcagaccaaggtggtggctgtgaggagggcagcaaatgctgacaaggatgaaaagcacatggaaaaaaatggacgaggagggaaaactctgccaaatggaaaatgaccaaatttaagagggtgggacagtcccctgctcctctcccagagggcactgcttggaaattgtgttttccccatttatggtgctctgtattctggcattatgcagcagcctcccagaagctctcttctgcttcaaaacctgggatctctggcattaccctattgggatggaccgctggacagcaatgctcgagtttgtgaatttggagagatactcaaaagagctaaaactgcagcattttacctttaaatgcagtgcctagagagagagtattgtctcttccccaacactaaccccactcccatgaagaattgcctggaaagatgttttcaaggaatttgaaccataaaacactatctgatgcacagaacacctctactttgagactcacctctcataaagcttctttttcacattactgttaaagaccagacgttctagaaaagacccctcctctcatgagctcccccatccctgctacagaacacagcacccatggcgcctgcagtggactggccccttaattcccacaggcccccccagcaaggccaaagggaggcccctgggtattgtcctcctacaaggaagatcctctttgtttgttcaaaggaccagttttcctaggccaaagaagtctcttccccatgttagtcctatgccttgaaatatcatgcaccatgacccacagccatctggttatgtcttatttttttcctaaaagataatgtttatttttaaaaaggaaggaagaagcaagtgaagtttcattctgctccagcggtggggaagccgctgaatccacctgcttctcctttgcaaccgacagcaaacagctttctccggcctcagggcagaaaaagggaatggcagggagtaagaggcgctgggctcggagcctgtttccaagaaggaattggttgtcatctggcagtgttgcgcgtcacaagagagcctgtatataaattaaaatagtcaagacaacactgaccttgcacttgtacataactatacagtagtgtccagaatgttcagacattcggagtgtacataaaacagaaaaaatcttcatgtatttttattaaatataacaatgtctgagtttcacctaagatgtttttgtgccatatgctggatatccaggttctcgccaggccccgatacatgaataacaaacccaagaaacgcatccccattgtgtgatgtgttcagatgcatctggcaccaattaggtatttcttaaaacaggactcatctgtcagagtgcacatgaaaaatcaggcagggaatcgaaacgacagcgctggaggagactcaggaagcagaggcgtccctgccgctgcccttggccctgcaagcacatcatgaccctttctggcagcctcttggtgctctgggtagtgagggatgaccagtcttgtcctgagaaatgtttctcttagtctttaagttcaaagactaacctgtagcaatcagactttccaaaagggggttctccattttttgtagttttgtctaaatttttaatgaccatttcctggaatcagtttattatactgaaaactgggggtgggagtagggagctagtttgttgataaatagttcccatttccccgtggagaatttgacataccctggactcctgtgtgcctcctgccatccctgcacacagcctggggagaagcctgtgcctccccgtgtggagagaaggcaaccccagatcccctgagctaacccggaggaaaggcagtcctggacagaagactgtcagcagaaggaaagtactggactacccgtgggtaagtcctgccattcaagactggagacacctgggaaataaaaagagcagggcactgctggtgggaagaggcattttaccttccagtgcaaatcctgctcctttgatttaatggggtgtactggggccaggggctgattcacttccttgggagatggtggtgttttcatgaacatctttgatccttccatttcatttattcatccatccattcaacaagtatttgctaaacactaacttaagctaatgctagggtagtgactgagatgtaaaaatagattttagaattaaaacaaaatccaagtcctcacacccctgtcatcccaggagatctttccttgtggtggtttctgtgagaattggccatcctgaggacacagccaggacggcagaggcctcctggcctcagggcatgccctgcctaccttctgaaatgtttaccccattgaccaaacttggctccagccattgcggtggtttctagatagccaggcccaccaagagatattgccccttgatgagagtcaaacaccctgcctacaaggagatgttttgaaatggagaggaaaattggcacctcatcttttaaaggcagtaatggaattgattttcagtaactgaatttgtgcacaaaacattctaaacactagtgaagcctgtttcgttgaactaattctggctctggaaatgtttttgttttatagttatttacgatttcgtttgtttggattcaagcttagtttgttaatatgtataatttagcatctattacactcatgtaaatatggagtaagtattgtaaactatttcattgcggggattgtgggtgttatacatacatttaggactgcaattttttggtattttttgtattgtaaaataacagctaatttaagcaggaacaagagaactaagggaggtctgtgcattttaaacacaaatgtgaagaacttgtatataaacaaaagtaaatactataatacaaacttccttctgaaataaaagtagatctggtaaaaatgtggcttttgttctgagtgtttcattttgattttgcattgttttgcctatatttacattttggtcattagaaccttaagggaaaaaaaaaagcgtttaccagttttcagactgcgtcagagggagcacttgacagttaacggaggtgagggtgaaaacccctggcaggtacctcagacagccctccaggcagcttgtgagccacagaccttccacacagcctttgtgtgcctacagggcagctgggcccgtgggggcagggacagatctgagcagtgaggtatggacagccgtctcactgctccactaaccacaccactgtctccagtggtgctgttatccctccactttgcgctctcctcacaggctcctgaatgtcctctaggttgtctccaaactgctaaatctcaggtgtgctgacaggtctcagccgtggccagtgttttcctcggccttgaagttttgaggaagttactcccattggcaaggccttgtttgggggcctcctgtgtgtcctgccccttttatttggctcctgccctcagaatgggtcagagtcatgtatttcagtgcagagtgcagattcccagtgctagcagtctcttccagaggatgaggtcattgaagaaggaggaacncaaaacggtccttcttttggggaagnggnaggtacttggccaggccttagtnaagaggacctgaagaggctnctncaaacttagtttgtttt

SEQ ID NO: 23341 - DNA, 3407 bp, Homo Sapiens
tgcaggtgcgttgtacccttttacgtgaggcggtgacggcggttcggaagtcgtctggcctccccgcggccgctcgcagcttgctggcctctcccgcgcctcacgtcggactccgtctccgcggcagggaagcagcatggaagctgaggacatccaggaggagttgacctgccccatctgcctggactatttccaggacccggtgtccatcgagtgcggccacaacttctgccgcggctgcctgcaccgcaactgggcgccgggcggcggcccgttcccctgccccgaatgtcggcacccatcggcgcccgccgcgctgcgacccaactgggccctggccaggctgactgagaagacgcagcgccggcgcctgggccccgtgcccccgggcctgtgcggccgccactgggagccgctgcggctcttctgcgaggacgaccagcggccagtgtgcctggtgtgcagggagtcccaggagcaccagactcacgccatggcacccatcgacgaggccttcgagagctaccggacaggtaactttgacatccacgtggatgaatggaagagaagactaattaggctgctcttgtaccattctaagcaggaggagaaacttcttaagtctcagcgtaatctcgtggccaagatgaagaaagtcatgcatttacaggatgtagaagtgaagaacgccacacagtggaaggataagataaagagtcagcgaatgagaatcagcacggagttttcaaagctgcacaacttcctggttgaagaagaggacctgtttcttcagagattgaacaaagaagaagaagagacgaagaagaagctgaatgagaacacgttaaaactcaatcaaactatcgcttcattgaagaagctcatcttagaggtgggggagaagagccaggctcccaccctggagctgcttcagaatccaaaagaagtgttgaccaggagtgagatccaggatgtgaactattcccttgaagctgtgaaggtgaagacagtgtgccagataccattgatgaaggaaatgctaaagcgattccaagtggctgtaaacctagctgaagacacagctcatcccaaactcgtcttctcccaggaagggagatacgtgaaaaatacagcatcagccagttcttggccagtgttttcttcagcatggaactactttgctggatggaggaatcctcagaagactgcttttgtagagagatttcagcacttaccctgtgttctgggaaaaaacgttttcacctcagggaaacattactgggaagttgagagtagagatagtctggaggttgctgttggggtgtgtcgggaggacgtcatgggaattactgatcgttcaaaaatgtccccagatgtgggcatctgggcgatttattggagtgctgctggctattggcccttgataggcttccctggaactcccacccagcaagagccagctctccaccgagtgggggtttacctggatcgtgggactgggaatgtctccttctacagcgctgtggacggagtgcacctgcacaccttttcttgttcttctgtctcacgcctccggccatttttttggttgagtccattagcatctttagtcattccaccagtgactgataggaaatgaggcttttcttcccctgaccaaaactccttccctgtagtccagctgagggacacacatccctgggccctcttctgcccttcatgtctctatcctggatggtccatcttctgggtctccctaacggtaccgtttggtatctgccctttgtgtgcttcacaagaggcagtcccatgggaggtgggtctggccaatggagatgggacaggaaattttccaagacgcttttgggaaatctttttgtagcttttaaagagatgtgcggggaagacatatggatgttagcagccatattggaactgagaacacaggaatggtggaaaggtagaagaaacagagtttttgttgccgttgtgaaattgttgaaatttccttcatgccaagcttcttgttatatgagataattacgcccttattgtataagacaattttagttgtatttggttacttgcagcctgaagtaccgtaactgcactaaagggacgtagtgtgaacatcccgcagtataggcttaagtcacttttgtgaaatttgacaaaggcatagaatctttttctatccagtcaggcattgcctattctttccagtaactactgattcccccacttttctgtcttagaaaattgtgggaatcccccctcactctgcctatgttgcactctctctcttcccaaccataactctgccctcagctattaactgtgctgtgtatttatcaagttggtatgttgtatgtacagtgttattcatgtcatcatgagaatgttgaacgcttgttaaataccttttgctagcctcttcatatgctgttgcatatgactctcatcacaactcagtgagatggaaagacaaatcctatttgtacaaatgagaaaactgaactctttagagtaactagctcagtattggccagctggtaaatggcagtgttgggattaaaatccagttcttatctactctccctttattcagaagcatttattggatgttgatctttgtttcaggttttgattttgttacttttttatactgtgtatattttcctcagtctacccttctgctctagattgtctggactcaggagattgtggcagttactggatagttatttttaagataatgattgcttttctctgtttatataagtcatgtgtacttattgtagaaagtttgtaagatgcaaaaagtataaaaattaaagttatgcactactaacatttcaatatattttctcccagattttcaataaagactttcaggcagtgatttaacgaggattttattttaacttatattttagtttaaggggaacacgtgcaggtttgttctatagatcaattacatgtcacaggggtttggtgtacatattatttcattacccaggtaataagcatagtacccaatagatacttttttgataccccaccctcctccaccctctaccctcaagtagtccctggtgtctgttgttcccttttttgtgtccatgggtactcaatgtttagctctcccttatacgtgagaacatgtgatgtttggttttctgttcatgtgttggtttgcttagggtaatggcctccagctccatccatgttgctgcaaagacatgatctcattctttttttatggctgcatagtattccatggtgtatatgtactatgttttctttatccagtctactgttgatgggcatttaggttgattccatgtctttgctattgtgaatagtgctgcaatgaatatatacatgcaaaaaaaaaaaaaaaaaaa

SEQ ID NO: 23342 - DNA, 3329 bp, Homo Sapiens
tgcaggtgcgttgtacccttttacgtgaggcggtgacggcggttcggaagtcgtctggcctccccgcggccgctcgcagcttgctggcctctcccgcgcctcacgtcggactccgtctccgcggcagggaagcagcatggaagctgaggacatccaggaggagttgacctgccccatctgcctggactatttccaggacccggtgtccatcgagtgcggccacaacttctgccgcggctgcctgcaccgcaactgggcgccgggcggcggcccgttcccctgccccgaatgtcggcacccatcggcgcccgccgcgctgcgacccaactgggccctggccaggctgactgagaagacgcagcgccggcgcctgggccccgtgcccccgggcctgtgcggccgccactgggagccgctgcggctcttctgcgaggacgaccagcggccagtgtgcctggtgtgcagggagtcccaggagcaccagactcacgccatggcacccatcgacgaggccttcgagagctaccgggagaaacttcttaagtctcagcgtaatctcgtggccaagatgaagaaagtcatgcatttacaggatgtagaagtgaagaacgccacacagtggaaggataagataaagagtcagcgaatgagaatcagcacggagttttcaaagctgcacaacttcctggttgaagaagaggacctgtttcttcagagattgaacaaagaagaagaagagacgaagaagaagctgaatgagaacacgttaaaactcaatcaaactatcgcttcattgaagaagctcatcttagaggtgggggagaagagccaggctcccaccctggagctgcttcagaatccaaaagaagtgttgaccaggagtgagatccaggatgtgaactattcccttgaagctgtgaaggtgaagacagtgtgccagataccattgatgaaggaaatgctaaagcgattccaagtggctgtaaacctagctgaagacacagctcatcccaaactcgtcttctcccaggaagggagatacgtgaaaaatacagcatcagccagttcttggccagtgttttcttcagcatggaactactttgctggatggaggaatcctcagaagactgcttttgtagagagatttcagcacttaccctgtgttctgggaaaaaacgttttcacctcagggaaacattactgggaagttgagagtagagatagtctggaggttgctgttggggtgtgtcgggaggacgtcatgggaattactgatcgttcaaaaatgtccccagatgtgggcatctgggcgatttattggagtgctgctggctattggcccttgataggcttccctggaactcccacccagcaagagccagctctccaccgagtgggggtttacctggatcgtgggactgggaatgtctccttctacagcgctgtggacggagtgcacctgcacaccttttcttgttcttctgtctcacgcctccggccatttttttggttgagtccattagcatctttagtcattccaccagtgactgataggaaatgaggcttttcttcccctgaccaaaactccttccctgtagtccagctgagggacacacatccctgggccctcttctgcccttcatgtctctatcctggatggtccatcttctgggtctccctaacggtaccgtttggtatctgccctttgtgtgcttcacaagaggcagtcccatgggaggtgggtctggccaatggagatgggacaggaaattttccaagacgcttttgggaaatctttttgtagcttttaaagagatgtgcggggaagacatatggatgttagcagccatattggaactgagaacacaggaatggtggaaaggtagaagaaacagagtttttgttgccgttgtgaaattgttgaaatttccttcatgccaagcttcttgttatatgagataattacgcccttattgtataagacaattttagttgtatttggttacttgcagcctgaagtaccgtaactgcactaaagggacgtagtgtgaacatcccgcagtataggcttaagtcacttttgtgaaatttgacaaaggcatagaatctttttctatccagtcaggcattgcctattctttccagtaactactgattcccccacttttctgtcttagaaaattgtgggaatcccccctcactctgcctatgttgcactctctctcttcccaaccataactctgccctcagctattaactgtgctgtgtatttatcaagttggtatgttgtatgtacagtgttattcatgtcatcatgagaatgttgaacgcttgttaaataccttttgctagcctcttcatatgctgttgcatatgactctcatcacaactcagtgagatggaaagacaaatcctatttgtacaaatgagaaaactgaactctttagagtaactagctcagtattggccagctggtaaatggcagtgttgggattaaaatccagttcttatctactctccctttattcagaagcatttattggatgttgatctttgtttcaggttttgattttgttacttttttatactgtgtatattttcctcagtctacccttctgctctagattgtctggactcaggagattgtggcagttactggatagttatttttaagataatgattgcttttctctgtttatataagtcatgtgtacttattgtagaaagtttgtaagatgcaaaaagtataaaaattaaagttatgcactactaacatttcaatatattttctcccagattttcaataaagactttcaggcagtgatttaacgaggattttattttaacttatattttagtttaaggggaacacgtgcaggtttgttctatagatcaattacatgtcacaggggtttggtgtacatattatttcattacccaggtaataagcatagtacccaatagatacttttttgataccccaccctcctccaccctctaccctcaagtagtccctggtgtctgttgttcccttttttgtgtccatgggtactcaatgtttagctctcccttatacgtgagaacatgtgatgtttggttttctgttcatgtgttggtttgcttagggtaatggcctccagctccatccatgttgctgcaaagacatgatctcattctttttttatggctgcatagtattccatggtgtatatgtactatgttttctttatccagtctactgttgatgggcatttaggttgattccatgtctttgctattgtgaatagtgctgcaatgaatatatacatgcaaaaaaaaaaaaaaaaaaa

SEQ ID NO: 23343 - DNA, 2795 bp, Homo Sapiens
cacgagggtgaacaagaggaacctcagcagccaggacaggcaggagcagtggaatagctactatggcttctggaatcctggttaatgtaaaggaggaggtgacctgccccatctgcctggaactcctgacacaacccctgagcctggactgcggccacagcttctgccaagcatgcctcactgcaaaccacaagaagtccatgctagacaaaggagagagtagctgccctgtgtgccggatcagttaccagcctgagaacatacggcctaatcggcatgtagccaacatagtggagaagctcagggaggtcaagttgagcccagaggggcagaaagttgatcattgtgcacgccatggagagaaacttctactcttctgtcaggaggacgggaaggtcatttgctggctttgtgagcggtctcaggagcaccgtggtcaccacacgttcctcacagaggaggttgcccgggagtaccaagtgaagctccaggcagctctggagatgctgaggcagaagcagcaggaagctgaagagttggaagctgacatcagagaagagaaagcttcctggaagactcaaatacagtatgacaaaaccaacgtcttggcagattttgagcaactgagagacatcctggactgggaggagagcaatgagctgcaaaacctggagaaggaggaggaagacattctgaaaagccttacgaactctgaaactgagatggtgcagcagacccagtccctgagagagctcatctcagatctggagcatcggctgcaggggtcagtgatggagctgcttcaggacggagaacgtgaccttgaagaagccagaaacttttccaaaaaatcaaaggagagtgtttcgagctcctgatctgaaaggaatgctagaagtgtttagagagctgacagatgtccgacgctactgggttgatgtgacagtggctccaaacaacatttcatgtgctgtcatttctgaagataagagacaagtgagctctccgaaaccacagataatatatggggcacgagggacaagataccagacatttgtgaatttcaattattgtactggcatcctgggctctcaaagtatcacatcagggaaacattactgggaggtagacgtgtccaagaaaactgcttggatcctgggggtatgtgctggcttccaacctgatgcaatgtgtaatattgaaaaaaatgaaaattatcaacctaaatacggctactgggttatagggttagaggaaggagttaaatgtagtgctttccaggatagttccttccatactccttctgttcctttcattgtgcccctctctgtgattatttgtcctgatcgtgttggagttttcctagactatgaggcttgcactgtctcattcttcaatatcacaaaccatggatttctcatctataagttttctcactgttctttttctcagcctgtatttccatatttaaatcctagaaaatgtggagtccccatgactctgtgctcaccaagctcttgaaccttcttacacactcagccccttctgtacagcacctcttgtccaggtgcatctcatacacctgaactcatttgcatcattttaaccatcttttccttgctgtctcccttctttctatttgaacgtccttcactcatcagtaaaatgtaataattgccttgtgccatattgtccccaatattttattgacatttgatagcaatttttttcatcattttccgtactcctaaggaaaactgacctatacctcataaaatgagaccgctatttaggtattacttctgccagatatttatcacccaattgcctctgacactgactaagaagatgaagaaaagcttttcaacagcctttctatatcatcgtgtgataattgttcaccaatgaatgagtccttagccctgtgtcagtttaccctcgatgcccttatttgtgagttaaagagaaaatatcataaatggtatactcttaagtatagaggttttgtatctagaggatctcagttcaactcctgtctctccatataccagcagtgtaactgtgaataacatacttaaatggctgtgcttatttccttttcttttcttttttcttttttttttttttttgagatgaagttttgctcttgttccccaggctggagtgcaatggcacgatctcggttcactgcaacctccacctctcagattcaagcaattctcctgcctcagcctcccaagtagctgggattacaggtgcccaccaccacccctggctaaatttgtattttcagtagagacggggtttccccatgttggttaggctcgtctagaacctctgacctcaggtgatccacccgcctcggcctcccaaagtgctgggattacaggcgtgagccacggcgcccagcctgtgcttattttcttaaaataatttttgtattaaaaacttcacattaaataagtgctaatgttttattgcatagtagggtgactagagttaacaataacctattgcatatattttgaaatagctagaagagaggattttgaaagttctcaacacaaagaaatgacacatatttgaggtgatggatatgctaattaccctggttcggttattacgcaatgtatacatgtatcaaaacatcacactgtaccacataaatatgtatatttattatttgtcaattaaaagcaaaataaaacaaaaaaccttcatctaatactttggatcattgtgaaaaaataaattcctgaagtataaaaaaaaaaaaaaaaaaaaaaaaaaaaaaa

SEQ ID NO: 23344 - DNA, 2441 bp, Homo Sapiens
atggcggagaattggaagaactgcttcgaggaggagctcatctgccctatctgcctgcacgttttcgtggagccagtgcagctgccgtgcaaacacaacttctgccggggctgcatcggcgaggcgtgggccaaggacagcggcctcgtacgctgcccagagtgcaaccaggcctacaaccagaagccgggcctggagaagaacctgaagctcaccaacatcgtggagaagttcaatgccctgcacgtggagaagccgccggcggcgctgcactgcgtgttctgccgccgcggccccccgctgcccgcgcagaaggtctgcctgcgctgcgaggcgccctgctgccagtcccacgtgcagacgcacctgcagcagccctccaccgcccgcgggcacctcctggtggaggcggacgacgtgcgggcctggagctgcccgcagcacaacgcctaccgcctctaccactgcgaggccgagcaggtggccgtgtgccagtactgctgctactacagcggcgcgcatcagggacactcggtgtgcgacgtggagatccgaaggaatgaaatccggaagatgctcatgaagcagcaggaccggctggaggagcgagagcaggacattgaggaccagctgtacaaactcgagtcagacaagcgcctggtggaggagaaagtgaaccaactgaaggaggaagttcggctgcagtacgagaagctgcaccagctgctggacgaggacctgcggcagacagtggaggtcctagacaaggcccaggccaagttctgcagcgagaacgcagcgcaggcgctgcacctcggggagcgcatgcaggaggccaagaagctgctgggctccctgcagctgctctttgataagacggaggatgtcagcttcatgaagaacaccaagtctgtgaaaatcctgatggacaggacccagacctgcacgagcagcagcctttcccccactaagatcggccacctgaactccaagctcttcctgaacgaagtggccaagaaggagaagcagctgcggaaaatgctagaaggccccttcagcacgccggtgcccttcctgcagagtgtccccctgtacccttgcggcgtgagcagctctggggcggaaaagcgcaagcactcaacggccttcccagaggccagtttcctagagacgtcgtcgggccctgtgggcggccagtacggggcggcgggcacagccagcggtgagggccagtctgggcagcccctggggccctgcagctccacgcagcacttggtggccctgccgggcggcgcccaaccagtgcactcaagccccgtgttccccccatcgcagtatcccaatggctccgccgcccagcagcccatgctcccccagtatggcggccgcaagattctcgtctgttctgtggacaactgttactgttcttccgtggccaaccatggcggccaccagccctacccccgctccggccactttccctggacagtgccctcgcaggagtactcacacccgctcccgcccacaccctccgtcccccagtcccttcccagcctggcggtcagagactggcttgacgcctcccagcagcccggccaccaggatttctacagggtgtatgggcagccgtccaccaaacactacgtgacgagctaacgccacgcaggcggcggggcgctggggaatcttcctccccagcccccgggctcgggagttatgcatccagagacctgcccttctaccttcctcgcctcccctcttcctcattccattgccccaggtcttttccttttggattttgttttggttttggctttgtttttgatttttttttattatgaatctcctggacgcagaggtgacagtgggagctggcctgggccaggacggcaggtggccctggagatgggaaagtgtctgtgtcgaggcgctgagctctctctctgtttctccttttttcctctactccttccccttcacacccccgtggctggaaggaacctcggcttccctgaaagcttgggggtcccacccttcttaccccacccgggaggaacgcccagggccccgggcttgtttctcctcttgttttccttttgggcagtttgatcactgatcgagtaaggaatgacctttagattgtgcgacttttgtttttgtttttttaaatttttttaaaccaagaatgatttctcctgcttccttctcctcaccatcttcccagacggagttcaaaggccacttctcaagcagcttttggcaccttcagcctcagagtggaatcttttaaagacaggacccctatgtccaggaaaggggaaaaggaactttgccaatgatagtgaccacagcaaaagcaaataataataatattaataataataaagagaaataaaataataaaataaaaaacaaaaaaaaaaaaaaaaaaaaaaaaaaaa

SEQ ID NO: 23345 - DNA, 1084 bp, Homo Sapiens
tggaagacttcgagacccatttaggatcacggcgctacggatgacctgagaattaatttatggcacttagaaatcacagatagaagctttaacatcgtggacatcaagcctgctaacatggaggagctgaccgaagtcatcactgcagccgagttccacccgcaccagtgcaacgtgttcgtctacagcagtagcaaagggaccatccgcctgtgtgacatgcgctcctcggccctgtgcgacagacactccaagttttttgaagagcctgaagatcccagcagtaggtccttcttctcagaaataatttcatccatatccgatgtaaaattcagtcatagtgggcggtacatgatgaccagagacttacctgtcggtgaaggtgtgggacctcaacatgggagagcaggccggtggagacccaccaggtccacgagtacctgcgcagcaagctctgctctctctatgagaacgactgcatctttgacaagtttgagtgttgctggaacggttcggatagcgccatcatgaccgggtcctataacaacttcttcaggatgtttgatagagacacgcggagggatgtgaccctggaggcctcgagagagagcagcaaaccgcgcgccagcctcaaaccccggaaggtgtgtacggggggtaagcggaggaaagacgagatcagtgtggacagtctggacttcaacaagaagatcctgcacacagcctggcaccccgtggacaatgtcattgccgtggctgccaccaataacttgtacatattccaggacaaaatcaactagagacgcgaacgtgaggaccaagtcttgtcttgcatagttaagccggacatttttctgtcagagaaaaggcatcattgtccgctccattaagaacagtgacgcacctgctacttcccttcacagacacaggagaaagccgcctccgctggaggcccggtgtggttccgcctcggcgaggcgcgagacaggcgctgctgctcacgtggagacgctctcgaagcagagttgacggacactgctcccaaaaggtcattactcagaataaatgtatttatttcaaaaaa

SEQ ID NO: 23346 - DNA, 1734 bp, Homo Sapiens
atgcccgcaaccccgtccctgaaggtggtccatgagctgcctgcctgtaccctctgtgcggggccgctggaggatgcggtgaccattccctgtggacacaccttctgccggctctgcctccccgcgctctcccagatgggggcccaatcctcgggcaagatcctgctctgcccgctctgccaagaggaggagcaggcagagactcccatggcccctgtgcccctgggcccgctgggagaaacttactgcgaggagcacggcgagaagatctacttcttctgcgagaacgatgccgagttcctctgtgtgttctgcagggagggtcccacgcaccaggcgcacaccgtggggttcctggacgaggccattcagccctaccgggatcgtctcaggagtcgactggaagctctgagcacggagagagatgagattgaggatgtaaagtgtcaagaagaccagaagcttcaagtgctgctgactcagatcgaaagcaagaagcatcaggtggaaacagcttttgagaggctgcagcaggagctggagcagcagcgatgtctcctgctggccaggctgagggagctggagcagcagatttggaaggagagggatgaatatatcacaaaggtctctgaggaagtcacccggcttggagcccaggtcaaggagctggaggagaagtgtcagcagccagcaagtgagcttctacaagatgtcagagtcaaccagagcaggtgtgagatgaagacttttgtgagtcctgaggccatttctcctgaccttgtcaagaagatccgtgatttccacaggaaaatactcaccctcccagagatgatgaggatgttctcagaaaacttggcgcatcatctggaaatagattcaggggtcatcactctggaccctcagaccgccagccggagcctggttctctcggaagacaggaagtcagtgaggtacacccggcagaagaagagcctgccagacagccccctgcgcttcgacggcctcccggcggttctgggcttcccgggcttctcctccgggcgccaccgctggcaggttgacctgcagctgggcgacggcggcggctgcacggtgggggtggccggggagggggtgaggaggaagggagagatgggactcagcgccgaggacggcgtctgggccgtgatcatctcgcaccagcagtgctgggccagcacctccccgggcaccgacctgccgctgagcgagatcccgcgcggcgtgagagtcgccctggactacgaggcggggcaggtgaccctccacaacgcccagacccaggagcccatcttcaccttcactgcctctttctccggcaaagtcttccctttctttgccgtctggaaaaaaggttcctgccttacgctgaaaggctgaagtggggcgcgcgaagggcggcgaagcggagacggcggctctccgggatccagctccgcccctggccagtgtgcggcccgggggctccctgtgcccgcgtgaggcgagagaacaggggacttgagtctcgaacagcggttgtttttactttatttatcttaggccctcagctccctgacgtcctgagcctccctgtgacgctctggccttctctgcacctcagagtgcagaaccacagacggcttcggctgtgcctagggcaacagccaacctaggagccagcgggctttcggggaaaaaaaagaaaaagacatctaaaataaaatgtttaaactg

SEQ ID NO: 23347 - DNA, 3458 bp, Homo Sapiens
cctgcggctggggctgggggcggcggcggcggcgacggggcggcgggcggcgcggggcggtccggcgggttcaaagaggaaaacatggcggaaaacaaaggcggcggcgaggctgagagcggcggcgggggcagcggcagcgcgccggtaactgccggggccgccgggcccgccgcgcaggaggcggagccgcctctcaccgcggtgctggtggaggaggaggaggaggaaggcggcagggccggcgctgagggcggcgcggccgggcccgacgacgggggggtggccgcggcctcctcgggctcggcccaggctgcttcatctcctgcggcctcagtgggcactggagttgccgggggcgcagtatcgacgccggctccagctccagcctcggctcccgctccgggtccctcggcagggccgcctcctggaccgccagcctcgctcctggacacctgcgccgtgtgtcagcagagcttgcagagccggcgtgaggcggagcccaagctgctgccctgtcttcactccttctgcctgcgctgcctgcccgagccggagcgccagctcagcgtgcccatcccggggggcagcaacggcgacatccagcaagttggtgtaatacggtgcccagtatgccgccaagaatgcagacagatagaccttgtggataattattttgtgaaagacacatctgaagctcctagcagttctgatgaaaaatcagaacaggtatgtactagttgtgaagacaatgcaagtgcagttggcttttgtgtagaatgtggagagtggctatgtaagacatgtatcgaagcacatcaaagagtaaaatttactaaagatcacttgatcaggaagaaagaagatgtctcagagtctgttggagcatctggtcaacgccctgttttctgccctgtacacaaacaagaacagttgaaacttttctgtgaaacatgtgatagattgacatgtagagactgtcagctattggaacacaaagaacataggtatcagtttttggaagaagcttttcaaaatcagaagggtgcaattgagaatctactggcgaaacttcttgagaagaagaattatgttcattttgcagctactcaggtgcagaataggataaaagaagtaaatgagactaacaaacgtgtagaacaggaaattaaagtggccattttcacccttatcaatgaaattaataagaaaggaaaatctctcttacaacagctagagaatgttacaaaggaaagacagatgaagttactacagcagcagaatgacatcacaggcctttcccggcaggtgaagcatgttatgaacttcacaaattgggcaattgcaagtggcagcagcacagcactactatacagcaagcgactgattactttccagttgcgtcatattttgaaagcacggtgtgatcctgtccctgctgctaatggagcaatacgtttccattgtgatcccaccttctgggcaaagaatgtagtcaatttaggtaatctagtaatagagagtaaaccagctcctggttatactcctaatgttgtagttgggcaagttcctccagggacaaaccacattagtaaaacccctggacagattaacttagcacagcttcgactccagcacatgcaacaacaagtatatgcacagaaacatcagcagttgcaacagatgaggatgcagcaaccaccagcacctgtaccaactacaacaacaacaacacaacagcatcctagacaagcagcccctcagatgttacaacaacagcctcctcgattgatcagtgtgcaaacaatgcaaagaggcaacatgaactgtggagcttttcaagcccatcagatgagactggctcagaatgctgccagaataccagggatacccaggcacagcggccctcaatattccatgatgcagccacacctccaaagacaacactcaaacccagggcatgctggaccctttcccgtagtatcggtacacaacaccacaatcaacccaacgagccctactacagcaactatggcaaatgcaaaccgaggtcccaccagcccatctgttacagcaatagagctaatcccctcagttaccaatccagaaaaccttccatcgctgccagatattccacccatacagttggaagatgctggctcaagtagtttagataatctactaagtagatacatctcaggcagtcacctacccccacagcctacaagcaccatgaatccttctccaggtccctctgccctttctccgggatcatcaggtttatccaattctcacacacctgtgagacccccaagtacttctagtactggcagtcgaggcagctgtgggtcatcaggaagaactgctgagaagacaagtcttagtttcaaatctgatcaggtgaaggtcaagcaagaacctgggactgaagatgaaatatgtagcttttcaggaggtgtaaaacaagaaaaaacagaggatggcaggaggagtgcttgcatgttgagcagtcctgagagtagcttgacaccacctctctcaaccaacctgcatctagaaagtgaattggatgcattggcaagcctggaaaaccatgtgaaaactgaacctgcagatatgaatgaaagctgcaaacagtcagggctcagcagccttgttaatggaaagtccccaattcgaagcctcatgcacaggtcggcaaggattggaggagatggcaacaataaagatgatgacccaaatgaagactggtgtgctgtctgccaaaacggaggagatctcttgtgctgcgaaaaatgtccaaaggtctttcatctaacttgtcatgttccaacactacttagctttccaagtggggactggatatgcacattttgtagagatattggaaagccagaagttgaatatgattgtgataatttgcaacatagtaagaaggggaaaactgcgcaggggttaagccccgtggaccaaaggaaatgtgaacgtcttctgctttacctctattgccatgaattaagtattgaattccaggagcctgttcctgcttcgataccaaactactataaaattataaagaaaccaatggatttatccaccgtgaaaaagaagcttcagaaaaaacattcccaacactaccaaatcccggatgactttgtggccgatgtccgtttgatcttcaagaactgtgaaaggtttaatgaagctgattcagaagtagctcaggcagggaaagcagttgcattgtactttgaagataaactcacagagatctactcagacaggaccttcgcacctttgccagagtttgagcaggaagaggatgatggtgaggtaactgaggactctgatgaagactttatacagccccgcagaaaacgcctaaagtcagatgagagaccagtacatataaagtaaaatgacatggatttaaatgaattgtttaaaaaaaaaaaaaa

SEQ ID NO: 23348 - DNA, 2313 bp, Homo Sapiens
gaattcggcacgagcggcacgagcttcacctcttcaaccaggagccgagatttctgttgctctgaagccatccaggggtctttaaccagaagagagaggagagcctcaggagttaggaccagaagaagccagggaagcagtgcaatggcttcaaaaatcttgcttaacgtacaagaggaggtgacctgtcccatctgcctggagctgttgacagaacccttgagtctagactgtggccacagcctctgccgagcctgcatcactgtgagcaacaaggaggcagtgaccagcatgggaggaaaaagcagctgtcctgtgtgtggtatcagttactcatttgaacatctacaggctaatcagcatctggccaacatagtggagagactcaaggaggtcaagttgagcccagacaatgggaagaagagagatctctgtgatcatcatggagagaaactcctactcttctgtaaggaggataggaaagtcatttgctggctttgtgagcggtctcaggagcaccgtggtcaccacacagtcctcacggaggaagtattcaaggaatgtcaggagaaactccaggcagtcctcaagaggctgaagaaggaagaggaggaagctgagaagctggaagctgacatcagagaagagaaaacttcctggaagtatcaggtacaaactgagagacaaaggatacaaacagaatttgatcagcttagaagcatcctaaataatgaggagcagagagagctgcaaagattggaagaagaagaaaagaagacgctggataagtttgcagaggctgaggatgagctagttcagcagaagcagttggtgagagagctcatctcagatgtggagtgtcggagtcagtggtcaacaatggagctgctgcaggacatgagtggaatcatgaaatggagtgagatctggaggctgaaaaagccaaaaatggtttccaagaaactgaagactgtattccatgctccagatctgagtaggatgctgcaaatgtttagagaactgacagctgtccggtgctactgggtggatgtcacactgaattcagtcaacctaaatttgaatcttgtcctttcagaagatcagagacaagtgatatctgtgccaatttggccttttcagtgttataattatggtgtcttgggatcccaatatttctcctctgggaaacattactgggaagtggacgtgtccaagaaaactgcctggatcctgggggtatactgtagaacatattcccgccatatgaagtatgttgttagaagatgtgcaaatcgtcaaaatctttacaccaaatacagacctctatttggctactgggttatagggttacagaataaatgtaagtatggtgtctttgaagagtctttgtcctctgatcccgaggttttgactctctccatggctgtgcctccctgccgtgttggggttttcctcgactatgaagcaggcattgtctcatttttcaatgtcacaagccatggctccctcatttacaagttctctaaatgttgcttttctcagcctgtttatccatatttcaatccttggaactgtccagctcccatgactctatgcccaccaagctcttgaattttctcatttcttcacctacaaccctttgtctcgacttatctcctgcaactgactcatctgcaacattcacaccattgcttccttgtggtttcccttctttagaacttttactcatccttgagatgtatggtgtatttggcttgagttatgagagatgcttatttattcatttactctttttcatattttcagagaaagttacctaatccctcctaaagacacagcagtatgggtataacatccttgccttcccatttatccatgtttcactttatcactgatgtgaagaggcccaaagcctgttagccaccatccatgctacctaggtagtccataggaaccacccccatgaccaccaccaacatcaactaaaggttcttggagggtatgtcagtgtgttgctcaggataccccaggtacatcaaggaatcaaggagaggaaaatatgagcaatatgtgtattcagagtgaagattttatgtccagagtatttgagctcaaaccttgcctgttgttttctaatcatgatgaatactttctcagtttctttttcctgaaatataaattgggatttaagactgtacctaactattaagatcactgtgtaaaactaagtgtctctaaatgtaatgcatcgatttagtgtctggaacataataaatatttgctctcatgattgctaaaaaaaaaaaaaaaaaa

SEQ ID NO: 23349 - DNA, 1913 bp, Homo Sapiens
gcacgaggcaggccgaagtccgcagccccggctcggcgcccgctgcttgcacctcccggatggtgctgactgctccctaagcggcggcggcggcgagtcgtgaggacgcgccgcggaggctgttcggggtcgaggcttcccgtcgccggcacttcctcttgcggcgcccgtgcgcggccggcccggcaggcgggatgagcggccgcggctccgggaacggccgcgcatcggcgccccggctgcttctgctctttctggttccgctgctgtgggccccggctgcggtccgggccggcccagatgaagaccttagccaccggaacaaagaaccgccggcgccggcccagcagctgcagccgcagcctgtggctgtgcagggccccgagccggcccgggtcgagaaaatatttacaccagcagctccagttcataccaataaagaagatcctgctacccaaactaatttgggatttatccatgcatttgtcgctgccatatcagttattattgtatctgaattgggtgataagacattttttatagcagccatcatggcaatgcgctataaccgcctgaccgtgctggctggtgcaatgcttgccttgggactaatgacatgcttgtcagttttgtttggctatgccaccacagtcatccccagggtctatacatactatgtttcaactgtattatttgccatttttggcattagaatgcttcgggaaggcttaaagatgagccctgatgagggtcaagaggaactggaagaagttcaagctgaattaaagaagaaagatgaagaatttcaacgaaccaaacttttaaatggaccgggagatgttgaaacgggtacaagcataacagtacctcagaaaaagtggttgcattttatttcacccatttttgttcaagctcttacattaacattcttagcagaatggggtgatcgctctcaactaactacaattgtattggcagctagagaggacccctatggtgtagccgtgggtggaactgtggggcactgcctgtgcacgggattggcagtaattggaggaagaatgatagcacagaaaatctctgtcagaactgtgacaatcataggaggcatcgtttttttggcgtttgcattttctgcactatttataagccctgattctggtttttaacgctgtttgttcatctatatttagtttaaaataggtagtattatctttctgtacatagtgtacattacaactaaaagtgatgggaaaaatactgtattttgtaggcactggattttgtgagtttgaccccttattatgtctggaggatataatcattggattcctatcttgtgccaagggagtttttaaaaggaaaccctgactttttaagtgtgggggttttttcttctcttcccaaccttaattatggtttaatatggtcctcatttttcttttggtgcagaaccgttgtgcagtggggtctaccatgcaattttctttcagcactgacccctttttaaggaatacaaattttctccttcatcacttaggtgttttaagatgtttaccttaaagttttcttggggaaagaatgaattaatttctatttcttaaaacatttccctgagccagtaaacagtagtttaatcattggtcttttcaaaactaggtgtttaaaaaaagagacatatatgatattgctgttatatcaataacatggcacaacaagaactgtctgccaggtcattcttcctcttttttttttaattgggtaggacaccccatataaaaaccatccatatttggccatgtgggattacccaaataaaagaggaatccatggatggattcagaatttttttaaatttaataaaccaaccaacccttggttcccatatttaattaaaaggagggttgcccagt

SEQ ID NO: 23350 - DNA, 2687 bp, Homo Sapiens
ccagttagagctcgggtctcctcgccacagctccgagtctttcgttctgggaggcccaggcggcttcgcgttctgagaataaacagaacctctgttgctctgcgacttgcaggcactgggagattcgtagctaagacgccagggcatcccggaagctgggaaatgggactgttgacattcagggatgtggccgtagaattctctttggaggagtgggaacacctggaaccagctcagaagaatttgtatcaggatgtgatgttagaaaactacagaaacctggtctctctgggtcttgttgtctctaagccggacctgatcacctttttggaacaaaggaaagagccttggaatgtgaagagtgaggagacagtagccatccagccagatgtgttttcgcattataacaaggacctgttgacagagcactgcacagaagcttcattccaaaaagtgatatcgaggagacatgggagctgtgatcttgagaatttacatttaagaaaaaggtggaaaagggaggagtgtgaagggcacaatggatgttatgatgaaaagacttttaaatatgatcaatttgatgaatcctctgttgaaagtttgtttcaccagcaaatactttcttcttgtgccaaaagctataactttgatcaatataggaaggtctttactcattcatcattgcttaatcaacaagaggaaatagatatttggggaaaacatcacatatatgataaaacttcagtgttatttaggcaggtctctactctaaatagttaccgaaatgtttttattggagagaaaaattatcattgcaataattctgaaaaaaccttgaaccaaagctcaagccctaaaaatcatcaggaaaattattttctagaaaaacaatacaaatgtaaagaatttgaggaagtctttcttcagagtatgcatgggcaagagaaacaagaacagtcttacaaatgtaataaatgtgtagaagtttgtacccagtcattaaaacatattcaacatcagaccatccatatcagagaaaactcatatagctataacaaatatgataaagatcttagtcagtcatcaaatcttagaaagcagataatccataatgaagagaaaccatacaaatgtgaaaaatgtggggatagcttaaaccatagtttgcaccttactcaacatcagatcattcctaccgaagagaaaccctataaatggaaagaatgtggcaaggtctttaaccttaactgtagtttataccttactaaacagcagcaaattgatactggagaaaacctttacaaatgtaaagcatgtagcaaatcttttactcgttcctccaatcttattgtgcatcagagaattcacactggagagaaaccatacaaatgtaaagaatgtggcaaagcctttcgctgtagttcataccttactaaacataagcgaattcatactggagagaaaccttataaatgtaaagaatgtggaaaagcttttaaccgtagttcatgccttactcaacatcagacaactcatacaggagaaaaactttacaaatgtaaagtatgtagcaaatcttatgctcgttcttcaaatcttattatgcatcagagagttcatactggagagaagccttataaatgtaaagaatgtggcaaagtctttagccgtagttcttgccttactcaacatcggaaaattcatactggagaaaatctttacaaatgcaaagtatgtgctaaaccttttacttgtttctcaaatcttattgtgcatgagagaattcatactggagagaaaccctataaatgtaaagaatgtggcaaagcctttccttatagttcacaccttattcgacattatcgaattcatactggagaaaaaccatacaaatgtaaagcatgtagcaaatcttttagtgactcctcaggtctttctgtgcatcggcgaactcatactggagagaaaccctatacatgtaaagaatgtggcaaagcctttagttatagttcagatgttattcagcatcggagaattcatactggccagagaccctacaaatgtgaagaatgtggcaaagccttcaactataggtcatacctcactacacatcagagaagtcatactggagagagaccctacaaatgtgaagaatgtggcaaagccttcaactctaggtcatacctcactacacatcggagaagacatactggagagagaccctacaaatgtgatgaatgtggtaaagccttcagctataggtcatacctcactacacatcggagaagtcatagtggagagagaccctacaaatgtgaagaatgtggcaaagcctttaactctaggtcatacctcattgcacatcagagaagtcatactagagaaaaactttaaaaatgtaaaacatggagcagattttttacttgttacccatgtcttattgtgcatcagataatttatatgggagtgaaaccctacaaatgttaagaatgtggcataacctttaactattttcaagccttacacaatagcagagaatataaactgaaaaaatccatacaaatattaaaaatgtggcaaattattttaaactgtgctcaacccttactcaagataatccatactagagaaacactatagatgtaaaaatgtgaaaagttttattcaaaatatcaaacttatgagtc

SEQ ID NO: 23351 - DNA, 3227 bp, Homo Sapiens
cccgtatccgcatccacatccacatccacactctcatcctcactcgcacccacaccctcacccgcacccgcatccgcaccaaataccgcacccacacccacagccgcactcgcagccgcacgggcaccggcttctccgcagcacctccaactctgcctgaaaggggcagctcccgggcaagacaaggttttgaggacttgaggaagtgggacgagcacatttctattgtcttcacttggatcaaaagcaaaacagtctctccgccccgcaccagatcaagtagtttggacatcaccctactgaacaacttggcgattcttcttagttttctgcatacttttcatcaccgatgcaggaaacgatttcgagtcaagaagacttttatttatgaacctttgaaaggatcgtcttgtatggtgaattttctaggagcgatgatgtactgtaattttattttaatgtattttgatttatgattatttattagttttttttaaatgcttgttctaagacatttctgaatgtagaccattttccaaaaaggaaactttattttcaaaaacctaatccgtagtaattcctaatcttggagaataaaaaagggcggtggaggggaaaacattaagaatttattcattatttctcgagtactttcagaaagtctgacactttcattgttgtgccagctggttgaaattaaaactctgatattactttttttgaggatttttatttttgtttttgcttaaacactatagtttgtctagaagtttaaaaagctaaaagttaaaaatggtgtaattatgaaaatctaacactcaagatagtttctaaaaggaaatcagtagttaaggatacctgatttcaaaatatttaaagcataacctaactgatggtaggatgattgtatcttgaatatgtggtagggccacatctattgtaggaaaaccttgcttttatcatctgtgtgtaaagggcttaataaggagaagaggccttttgactgatttgtgagtataaatgcatttgctgtttcatttcaaaaatgttgtggaggaaaagagtacatttaacttgtataagagaatatttgtactcctgtccaggctgcaggacctttcttcgagagctttgcacacttgacttgaaccacattttctgatccctttactttgttttagaagcacactgaaaaatctcgttgtttaaagtacaatttgtaaatatttcaaaggtctaggagtcataacttttgttttcatactgaaaatgatgttgatcagagaaaccaactgttttgcttttcattgctctgtgagaaattgaggattctgttttgctgttaggtaagctaactcagaaattgaaaggaaagactggataaacaccggattttcagtaagaaaacaaccccagtcttgtcttagaagccacttgttgaggagtctgttgggggaaaaaagaggatatgcttttaaaggtagaacaaaccttcttctgtgttaaatcaaaaggatgttcaaaatccaccaggacagatgctacttgggtttaaatggagccatagatgatacaaagtcctcttggggctgaaaatcacttcctatttgcatggctttactaactggtttctgttttccattatctttttcacagaaagtcttggtcagtatttttccagcatttaaattgaaacggtcagtattagaccactgctaggttatgtagtcaagaaataaaaatagaattacatgctacagatgtctttattctccttccatctagaaaggagttccaaggtcaaattactttttagtgcaatagttaaatgacattttgagatcataactcatatccaaaaagttgcagggaaaattaaaatagctttcccctattaagctaatggcaaacaaaacttaagtggacccccacttccagtggttgtttaggttgcagttgtgaaaatatgctgccaacatttaaaaacttgtttcatatgtatatatgtatacacatatatgaatatgtatgtatatatacatatatgagaacatgtgtgtacacatatatgaatatgtatatatgtgtatgtatgtatatatgtatatgaaatgagagccacatctaaagatttcttaaatcaagtttggttcagcttccttagaactgtggctgtactttttgaggagtacctcatagtactatatttttaatgcatgcaaatcataatagctccaaatgaaccacagttttttcccaatggaggatttttttttaattcttgtactaaaaaaaaaaaatccataccaaatatttttacaaattaagattgatgtaggttttaaaaaaggcatttgtatgttgttagcttacatatggggctaggtaatttcattgcttaaaaagatgcgcctaggctccctcttggtggctggatttctttttcttcgcccgtggtggccatggtttttaatagggccaccggaatcatggtttcttttttttttttttttttggagatggagtctcgccctgtgacccaggctggagtgcagtggcacgatctcggctcactgcaacctctgcctcttgggttcacgccattctcctgtgtcagcctcctgagtagctgggactacaggtgaatgccaccacgcccggctgatttttgtatttttagtagagatggggtttcaccatagtggtcaggctgttctcgaactcctgacctcaggtgatccacctgccttggcctcccaaagtgctaggattacaggtgtgagccaccacacccggccccagagtaatggtttcttgactttctgtagcccttgttccttagtctgctgtgatatttatgttgacctttatcattttctattctgaacccctcttagcatttaatgtgaaatctaagaaattagaagtagaatggcttttattgttttgacacctttgaaattattattaataatttttccagagcaaaaaagcaaacacgctcaataagactaaacaaaacaaaatataaatgtacatcatttaatgtcccagtggctctattctacctgtaagaaaatgatacaaaaccacctaagatattttgaagcctgacaaatcagcttcatggaaaaaggtaaaaaatgcatttttcaaccgaaagggcagatccaatagaagacccgctccttaaataaacataaaatgtaaaaagttggaaaaaaaaa

SEQ ID NO: 23352 - DNA, 2009 bp, Homo Sapiens
gacttctccagacaggttatgttacctgcagaggctgccctgaagctccctgtggcctggagactatgtacaagaggaatggtctgatggctagcgtgttggtcacctctgccactccacagggcagcagcagctcggactctctggagggccagagctgcgactatgccagcaagagctatgatgccgttgtcttcgatgtcttgaaagtgaccccagaggagtttgctagccagattacattaatggatatacctgtgtttaaagctatccagccggaggaactagccagctgtggatggagtaagaaggagaaacacagtcttgcccctaacgttgtggcctttacccggaggtttaaccaggtcagtttttgggttgtacgagaaattctaacagcacagactttaaaaataagggcagaaatcctcagccattttgtgaaaatagccaagaaacttctagaactcaacaaccttcattctctcatgtctgtggtatcagcattacaaagtgctcccatcttcaggctgacaaaaacctgggctcttttaaatcgaaaagacaagactacctttgagaaattggactacctgatgtcgaaagaagataattacaagcggacacgggaatatatccgaagcctgaagatggttccaagtattccctatctaggaatctatcttctggatttaatctacattgattctgcatatcctgcctcaggcagtatcatggaaaatgaacaaagatccaatcagatgaacaatattcttcgaataattgctgatttacaagtttcctgcagctatgatcacctcaccaccctgccccatgtgcagaagtacctgaagtccgtacgctacattgaagagctccagaagtttgtggaagacgacaactacaaactgtcgctcagaatcgaaccaggaagcagctctccaagactagtctcttccaaggaagatcttgcaggtccctctgctggctccggttctgcgaggttcagccggaggcccacctgtcctgacacatctgttgctggcagcctccccacacctccagtccccagacacaggaagagccacagcctaggcaacaacaggggacgtctctatgccaccctggggcccaactggcgggttccagttaggaattctcccagaacccggagctgtgtctacagccccaccggcccgtgcatctgttctctggggaactccgcagctgtgcccaccatggaggggcctctgagaagaaaaaccctgctcaaggaagggcggaagcctgcgctgtcctcgtggaccaggtactgggtcatactctcaggatccaccctcctgtactacggagccaagtccttgcggggcacagacagaaaacacgtttccatcgtgggctggatggtgcagctgcccgatgaccccgagcacccagatatcttccagctgaacaaccctgacaaaggcaatgtttacaagtttcagactggttcccgatttcatgcaatactgtggcacaagcatttggatgatgcatgtaaaagcaacaggcctcaggaagccggagcagctccaggtccaacaggaactgacagccacgaggtggaccacctggagggcggtgcggggaaggaggcagggccctgtgcctgaagcctgggcaccatggtggccccagtcaggagcaacagtggtagccctgagtaaaacccattgtccctctttggaggagcggccagaggatgacagcagccccagcaggcagcagtgcctgggcaggctgatccagcagagcactaatgggtcagtttcatgtattggcagatgtggtgtagcatggcaaggctacaagttttaaggatttttgtctgattttcagacctggaagaagggatttttcttcctactttcccccttttttatttctaatttactttcaaccaaatattcccactatgtgctatatgttataataaaaattgacacactgaaaaaaaaaaaaaaaaa

SEQ ID NO: 23353 - DNA, 2353 bp, Homo Sapiens
ggcacgagaagttaagctgaagaccgaagcaagagctggttcaggtggcagccacagcagcctcagggacctcagcaactatggcctcctgcccagactctgataatagctgggtgcttgctggctccgagagcctgccagtggagacactgggcccggcatccaggatggacccagaatctgagagagccctgcaggcccctcacagcccctccaagacagatgggaaagaattagctgggaccatggatggagaagggacgctcttccagactgaaagccctcagtctggcagcattctaacagaggagactgaggtcaagggcaccctggaaggtgatgtttgtggtgtggagcctcctggcccaggagacacagtagtccagggagacctgcaggagaccaccgtggtgacaggcctgggaccagacacacaggacctggaaggccagagccctccacagagcctgccttcaacccccaaagcagcttggatcagggaggagggccgctgctccagcagtgacgatgacaccgacgtggacatggagggtctgcggagacggcggggccgggaggccggcccacctcagcccatggtgcccctggctgtggagaaccaggctgggggtgagggtgcaggcggggagctgggcatctccctcaacatgtgcctccttggggccctggttctgcttggcctgggggtcctcctcttctcaggtggcctctcagagtctgagactgggcccatggaggaagtggagcggcaggtcctcccagaccccgaggtgctggaagctgtgggggacaggcaggatgggctaagggaacagctgcaggccccagtgcctcctgacagtgtccccagcctgcaaaacatgggtcttctgctggacaagctggccaaggagaaccaggacatccggctgctgcaggcccagctgcaggcccaaaaggaagagcttcagagcctgatgcaccagcccaaagggctagaggaggagaatgcccagctccggggggctctgcagcagggcgaagccttccagcgggctctggagtcagagctgcagcagctgcgggcccggctccaggggctggaggccgactgtgtccggggcccagatggggtgtgcctcagtggggatagaggcccacagggtgacaaggccatcagggagcaaggccccagggagcaggagccagaactcagcttcctgaagcagaaggaacagctggaggctgaggcacaggcattaaggcaagagttagagaggcagcgacggctgctggggtctgtacagcaggatctggagaggagcttgcaggatgccagccgcggggacccagctcatgctggcttggctgagctgggccacagattggcccagaaactgcagggcctggagaactggggccaggaccctggggtctctgccaatgcctcaaaggcctggcaccagaagtcccacttccagaattctagggagtggagtggaaaggaaaagtggtgggatgggcagagagaccggaaggctgagcactggaaacataagaaggaagaatctggccgggaaaggaagaagaactggggaggtcaggaggacagggagccagcaggaaggtggaaggagggcaggccaagggtggaggagtcggggagcaagaaggagggcaagcgacagggcccgaaggaacccccaaggaaaagtggtagcttccactcctctggagaaaagcagaagcaacctcggtggagggaagggactaaggacagccatgaccccctgccatcctgggcagagctgttgaggcccaagtaccgggcaccccagggctgctcaggtgtggacgagtgtccccggcaggagggcttgactttctttggcacagagctagccccagtgcggcaacaggagctggcctctctgctaagaacatacttggcacggctgccctgggctgggcagctgaccaaggagctacccctctcacctgctttctttggtgaggatggcatcttccgtcatgaccgcctccgattccgggattttgtggatgccctggaggacagcttggaggaggtggctgtgcaacagacaggtgatgatgatgaagtagatgactttgaggacttcatcttcagccacttctttggagacaaagcactgaagaagaggtcagggaagaaggacaagcactcacagagcccaagagctgcggggcccagggaggggcacagccatagccaccaccaccaccaccggggctgacaccctgccccacagggaatggccttggccttggcctggcccagcccaagaacccagcgttatctaactgctggagg

SEQ ID NO: 23354 - DNA, 1723 bp, Homo Sapiens
ctgattcccgggactaggttgcgggagaaagcctgttgcgtggaagataaggcggcgcgggaagtggacacagggtgggctggagatctaactggactctcgctcctgctggctggacatggaggatttggaggaagatgtaaggtttattgtggatgagaccttggactttggggggctgtcaccatctgacagccgtgaggaggaagacataacagtgttggtgactccagagaaaccacttcgacggggcctctcccaccgaagtgacccaaatgcagtggcacctgccccccagggtgtgaggctcagcctaggccccctcagtccagagaagctggaggagatcctcgatgaggccaaccggctggccgctcagctggagcagtgtgccctgcaggatcgggagagcgcaggcgagggcctggggcctcgccgagtgaagcccagtcctcggcgggagacctttgtgctgaaggatagtcctgtccgagacctgctgcccactgtgaactctttgacgcggagcaccccctccccaagcagcctgacgcctcgactccggagtaatgataggaaggggtcagtcagggctctccgggctacatctggaaagaggccctccaacatgaagagggagtcacccacttgcaatctgttccctgcatccaaaagcccagcatcttctcctcttacccgatcgactcccccagtccgggggagagccgggcccagtgggagagcagcagccagcccacccacccccatcagatccgtcctggccccacagccttctaccagcaactctcaacgcctgccccggccgcagggagcagctgctaaatcttccagtcaactgcccattccctcggccatccccaggcctgccagccgaatgccactcaccagccggagtgtgccacctggcagaggtgccctacctccggattctctgtcaactcgaaaagggcttccaagaccaagcactgcaggacacagagtgcgggaaagtggacacaaggttcctgtttcccagcgactaaatcttcctgtcatgggtgccactcgcagcaatctgcagccccccaggaaagtggcagtcccaggacctaccaggtaaagagatcaggacagcaagcaagacttcagtagcaaaccactacagtcagtacctggactcgcctctacccagcagaccctgactccagcagattctggcccagggacaggaggaagagatgccaccagggctggtctcccaggagtagagaccatgggaaatggggtggattaggattgagctggagaagacttaaactctctgggttgaaagaagattaggggaaaagaggtcaccttccagcagtgaaatgaacaaatagaagatgagaagtacaggcaagtggtttgtctttatccacccccactgttgtggtcagccccagagaattttatcttcttccttggcattggttcactggacatttccacgtgagcggcctccgtagctaacctccctgccctctgaggagccatcttcctgaatcgcattctctactggactctggcctgcttggagaggtggcagcaggcacctggtcttcagaaattgtttcctgtgaattctgtgactcctaataggccagtttgtgataagcttactctatgagtcttcatttttctaaaataaagtgaatgtatttttataaaaaaaaaaaaaaaa

SEQ ID NO: 23355 - DNA, 1756 bp, Homo Sapiens
gacctagtgactacatttcctacgggaacaaataaatggtttttcatctcccggagatacattacaaacaaatatggtgctaaaagaactccttacctttctctgactacaatttatttggacatacttttgtattgaagagaggtatacatactgaagctacttgctgtactataggagactctgtcctgtaggatcatggaccatcctagtagggaaaaggatgaaagacaacggacaactaaacccatggcacaaaggagtgcacactgctctcgaccatctggctcctcatcgtcctctggggttcttatggtgggacccaacttcagggttggcaagaagataggatgtgggaacttcggagagctcagattaggtaaaaatctctacaccaatgaatatgtagcaatcaaactggaaccaataaaatcacgtgctccacagcttcatttagagtacagattttataaacagcttggcagtgcaggtgaaggtctcccacaggtgtattactttggaccatgtgggaaatataatgccatggtgctggagctccttggccctagcttggaggacttgtttgacctctgtgaccgaacatttactttgaagacggtgttaatgatagccatccagctgctttctcgaatggaatacgtgcactcaaagaacctcatttaccgagatgtcaagccagagaacttcctgattggtcgacaaggcaataagaaagagcatgttatacacattatagactttggactggccaaggaatacattgaccccgaaaccaaaaaacacataccttatagggaacacaaaagtttaactggaactgcaagatatatgtctatcaacacgcatcttggcaaagagcaaagccggagagatgatttggaagccctaggccatatgttcatgtatttccttcgaggcagcctcccctggcaaggactcaaggctgacacattaaaagagagatatcaaaaaattggtgacaccaaaaggaatactcccattgaagctctctgtgagaactttccagaggagatggcaacctaccttcgatatgtcaggcgactggacttctttgaaaaacctgattatgagtatttacggaccctcttcacagacctctttgaaaagaaaggctacacctttgactatgcctatgattgggttgggagacctattcctactccagtagggtcagttcacgtagattctggtgcatctgcaataactcgagaaagccacacacatagggatcggccatcacaacagcagcctcttcgaaatcaggtggttagctcaaccaatggagagctgaatgttgatgatcccacgggagcccactccaatgcaccaatcacagctcatgccgaggtggaggtagtggaggaagctaaatgtataatgtttcataaaccctggcactggtcacaaagctcagctgtgaaaatgaaatttgtagtatttttaaacatgaatgtcaatttcaagtgtatttgaaatggttcctccaggagagatatttgtgcaccattaggaaaatcttctctgcagaggaagtagccttctttggagaaaatggaaaatgggttctgatatgtgatctcagagtagcccatttcctagggcaccatggaaaacacaaatgtgatctttaagtatacctcttccccagtttggggaggaaaggactcagtttgcaccctttttgtatgtaaaataaaatgtcttacctttcttg

SEQ ID NO: 23356 - DNA, 2647 bp, Homo Sapiens
gacagctctctccatggaaggaggcggcggccgcgatgagccttcagcctgccgggcaggggacgtgaacatggatgaccctaagaaggaagacattcttcttttggccgatgaaaaatttgacttcgatctttcattgtcttcttcgagtgcaaatgaagatgatgaagtcttcttcggaccctttggacataaagaaagatgtattgctgccagcttggaattaaataatccggttcccgaacagcctccgttgcccacatctgagagtccctttgcctggagccctctggccggggagaagttcgtggaggtgtacaaagaagctcacttactggctttacacattgagagcagcagccggaaccaggcagcccaagctgccaagcctgaagaccctcggagccagggcgtggaaagattcatacaggagtcaaaattaaaaataaacctctttgagaaagaaaaggaaatgaagaaaagccccacgtctcttaaaagggagacatactacctgtcagacagccccttgctggggccccctgtgggtgagcctcggctcttggcctcctccccggccctgcccagctctggtgcccaggcccgcctcacccgggcgccggggcctccgcactctgctcatgctttgcccagggaatcatgcactgctcatgctgcaagtcaggcagcgactcagaggaagcccgggaccaaattgctgctgcctcgagcggcctctgttagaggaagaagcatccctggggctgcggagaagcccaagaaagagattccagctagtccttccaggacaaaaatcccagctgagaaggaatcccaccgggatattctccctgacaaacctgccccgggtgctgtcaatgtgccggccgccggaagccacttgggccagggcaagcgggcgatccctgttccaaacaagttggggctgaagaagaccctgttaaaagcacccggctctaccagcaatctcgcaaggaagtcctcctcggggcctgtttggagcggggcatccagtgcgtgcacatccccagcagtgggcaaagctaaatcaagtgaatttgcaagtattcctgcaaatagctcccggcctctgtcaaacatcagcaagtcaggcagaatgggacccgccatgctgcggccagctctgcctgcaggccctgtgggggcatcctcctggcaggccaagcgggtcgatgtttctgagctggcagcggagcagctcacggcacccccctcagcatcccccacccaaccccagactccggaaggtggcggccagtggctgaactccagttgcgcttggtcagaatcttctcaattgaataagactagaagtatcagacggcgagattcctgtctaaattccaagacaaaggttatgcctactcctacaaatcaatttaaaattcctaagttttctattggtgactccccggacagctcaacaccaaagctttcgcgggcacagcggccgcagtcgtgcacgtcagttggcagggtcactgtccacagcaccccggttagacgctcatctgggccagcaccacaaagcctgctgagcgcacggcgtgtgtcagccttgcccacacccgccagccggcgctgctctggccttccaccgatgacccccaaaacgatgcccagggccgtgggctctcccctgtgtgtgccagctcggagacgttcctctgagccccgcaagaactctgcaatgagaactgaaccaacaagggagagcaacagaaagacagattccaggctggtggatgtgtcccctgacaggggttctcctccttcccgtgtgcctcaggcacttaacttttctccagaggaaagcgattctactttctccaaaagtactgccacagaagtagctcgggaggaagccaagccgggtggagatgcagcccctagtgaggctcttcttgtagatatcaaactggaaccactcgcggtcactccagatgctgcaagccagcccctcattgaccttcctctcatcgacttctgcgataccccagaagcacacgtggctgtaggatctgaaagcaggcctctgatcgacctcatgacaaacactccagacatgaataaaaatgtggccaaaccttcaccggtggtgggacagctcatagacctgagctcccctctgatccagctgagccctgaggctgacaaggagaacgtggattccccactcctcaagttctaagccgaaccaaatcctttgccttgaaagaacagccctaaagtggttttcaaccctcagaaacaagctttaggctggtcgcagtggcttacacttgtaaccctagaacttgggaggctgaggtgggcggattacttgagcccaggagttcgggaccagcctgggaaatatagtgaaactcctgtccctacaaaaaatacaaaaattagccgggtgtggtagtgcatgcctgtagtcccagctacttgggaggctgaagtgggaggatggcctgagctcaaggagatgcaggctgcagtgggctgtgattgtgccactgcactccagcctgggcaccaatgtgagaacctgtcttggaaaaaaaaaaaaagaaacatgttttagtagaagttttatttgaaaaaaaaaaaaaaaaaa

SEQ ID NO: 23357 - DNA, 1357 bp, Homo Sapiens
ggagagcaacattaggatctacagcgagaccacccctcctggctgagcaaagatgacatccgaagaatgcgactcttggcggacacgcagtggcagggctccggcctgtgtcctctaggagcggagccgtttgctggtgctggaggggggcgcacctggcgctgtgctccgctgtggccctagcccctgtggcttctcaagcagcccttggacatgagtgaggtgtttgccttccacctagacaggatcctggggctcaacaggaccctgccgtctgtgagcaggaaagcagagttcatccaagatggccgcccatgccccatcattctttgggatgcatctttatcttcagcaagtaatgacacccattcttctgttaagctcacctggggaacttatcagcagttgctgaaacagaaatgctggcagaatggccgagtacccaagcctgaatcaggttgtactgaaatacatcatcatgagtggtccaagatggcactctttgattttttgttacagatttataatcgcttagatacaaattgctgtggattcagacctcgcaaggaagatgcctgtgtacagaatggattgaggccaaaatgtgatgaccaaggttctgcggctctagcacacattatccagcgaaagcatgacccaaggcatttggtttttatagacaacaagggtttctttgacaggagtgaagataacttaaacttcaaattgttagaaggcatcaaagagtttccagcttctgcagtttctgttttgaagagccagcacttacggcagaaacttcttcagtctctgtttcttgataaagtgtattgggaaagtcaaggaggtagacaaggaattgaaaagcttatcgatgtaatagaacacagagccaaaattcttatcacctatatcaatgcacacggggtcaaagtattacctatgaatgaatgacaaaagaatcttctggctagggtgttagatatatttatgcatttttggttttgtttttaaatcaagcacatcaacctcaagcccgtttagcaatgaggcagtgtagatgaatacggtaaaataaatgactttaaccaagtagctataatgggacttagcactgtatgcatacttaaaaaggttttgaaaaacaaactacttgagaaatatttgtttatatttttctctaacatcatgctatgtgtcagtctgaacatctgacaacagaaatttcagttattattctagctaagttttgaaaacatttgtcatgctgtttaatagaaaactgcaaaccagagatactgactccattaataaaccatattttgtgccgttttgaaaaaaaaaaaaaaaaaaaaaa

SEQ ID NO: 23358 - DNA, 2790 bp, Homo Sapiens
gaattcggcacgaggttgggtgctattcggcaccagaggcaagggtgcgaggaccacggccggctcggacgtgtgaccgcgcctagggggtggcagcgggcagtgcggggcggcaaggcgaccatggagcttttgcggactatcacctaccagccagccgccagcaccaaaatgtgcgagcaggcgctgggcaagggttgcggagcagactcgaagaagaagcggccgccgcagccccccgaggaatcgcagccacctcagtcccaggcgcaagtgcccccggcggcccctcaccaccatcaccaccattcgcactcggggccggagatctcgcggattatcgtcgaccccacgactgggaagcgctactgccggggcaaagtgctgggaaagggtggctttgcaaaatgttacgagatgacagatttgacaaataacaaagtctacgccgcaaaaattattcctcacagcagagtagctaaacctcatcaaagggaaaagattgacaaagaaatagagcttcacagaattcttcatcataagcatgtagtgcagttttaccactacttcgaggacaaagaaaacatttacattctcttggaatactgcagtagaaggtcaatggctcatattttgaaagcaagaaaggtgttgacagagccagaagttcgatactacctcaggcagattgtgtctggactgaaataccttcatgaacaagaaatcttgcacagagatctcaaactagggaacttttttattaatgaagccatggaactaaaagttggggacttcggtctggcagccaggctagaacccttggaacacagaaggagaacgatatgtggtaccccaaattatctctctcctgaagtcctcaacaaacaaggacatggctgtgaatcagacatttgggccctgggctgtgtaatgtatacaatgttactagggaggcccccatttgaaactacaaatctcaaagaaacttataggtgcataagggaagcaaggtatacaatgccgtcctcattgctggctcctgccaagcacttaattgctagtatgttgtccaaaaacccagaggataggcctagtttggatgacatcattcgacatgacttttttttgcagggcttcactccggacagactgtcttctagctgttgtcatacagttccagatttccacttatcaagcccagctaagaatttctttaagaaagcagctgctgctctttttggtggcaaaaaagacaaagcaagatatattgacacacataatagagtgtctaaagaagatgaagacatctacaagcttaggcatgatttgaaaaagacttcaataactcagcaacccagcaaacacaggacagatgaggagctccagccacctaccaccacagttgccaggtctggaacacccgcagtagaaaacaagcagcagattggggatgctattcggatgatagtcagagggactcttggcagctgtagcagcagcagtgaatgccttgaagacagtaccatgggaagtgttgcagacacagtggcaagggttcttcggggatgtctggaaaacatgccggaagctgattgcattcccaaagagcagctgagcacatcatttcagtgggtcaccaaatgggttgattactctaacaaatatggctttgggtaccagctctcagaccacaccgtcggtgtccttttcaacaatggtgctcacatgagcctccttccagacaaaaaaacagttcactattacgcagagcttggccaatgctcagttttcccagcaacagatgctcctgagcaatttattagtcaagtgacggtgctgaaatacttttctcattacatggaggagaacctcatggatggtggagatctgcctagtgttactgatattcgaagacctcggctctacctccttcagtggctaaaatctgataaggccctaatgatgctctttaatgatggcacctttcaggtgaatttctaccatgatcatacaaaaatcatcatctgtagccaaaatgaagaataccttctcacctacatcaatgaggataggatatctacaactttcaggctgacaactctgctgatgtctggctgttcatcagaattaaaaaatcgaatggaatatgccctgaacatgctcttacaaagatgtaactgaaagacttttcgaatggaccctatgggactcctcttttccactgtgagatctacagggaacccaaaagaatgatctagagtatgttgaagaagatggacatgtggtggtacgaaaacaattcccctgtggcctgctggactgggtggaaccagaacaggctaaggcatacagttcttgactttggacaatccaagagtgaaccagaatgcagttttccttgagatacctgttttaaaaggtttttcagacaattttgcagaaaggtgcattgattcttaaattctctctgttgagagcatttcagccagaggactttggaactgtgaatatacttcctgaaggggagggagaagggaggaagctcccatgttgtttaaaggctgtaattggagcagcttttggctgcgtaactgtgaactatggccatatataattttttttcattaatttttgaagatacttgtggctggaaaagtgcattccttgttaataaactttttatttattacagcccaaagagcagtatttattatcaaaatgtctttttctttgaccattttaaaccgttggcaataaagagtatgaaaacgcaaaaaaaaaaaaaaaaaa

SEQ ID NO: 23359 - DNA, 3277 bp, Homo Sapiens
gccggcgcttcccggccggtgtcgctccgcggcgggccatggccaacgtctctaagaaggtgtcctggtccggccgggaccgggacgacgaggaggcggcgccgctgctgcggaggacggcgcggcccggcggggggacgccgctgctgaacggggctgggcccggggctgcgcgccagtcaccacgttctgcgcttttccgagtcggacatatgagcagcgtggagctggatgatgaacttttggacccggatatggaccctccacatcccttccccaaggagatcccacacaacgagaagctcctgtccctcaagtatgagagcttggactatgacaacagtgagaaccagctgttcctggaggaggagcggcggatcaatcacacggccttccggacggtggagatcaagcgctgggtcatctgcgccctcattgggatcctcacgggcctcgtggcctgcttcattgacatcgtggtggaaaacctggctggcctcaagtacagggtcatcaagggcaatatcgacaagttcacagagaagggcggactgtccttctccctgttgctgtgggccacgctgaacgccgccttcgtgctcgtgggctctgtgattgtggctttcatagagccggtggctgctggcagcggaatcccccagatcaagtgcttcctcaacggggtgaagatcccccacgtggtgcggctcaagacgttggtgatcaaagtgtccggtgtgatcctgtccgtggtcgggggcctggccgtgggaaaggaagggccgatgatccactcaggttcagtgattgccgccgggatctctcagggaaggtcaacgtcactgaaacgagatttcaagatcttcgagtacttccgcagagacacagagaagcgggacttcgtctccgcaggggctgcggccggagtgtcagcggcgtttggagcccccgtgggtggggtcctgttcagcttggaggagggtgcgtccttctggaaccagttcctgacctggaggatcttctttgcttccatgatctccacgttcaccctgaattttgttctgagcatttaccacgggaacatgtgggacctgtccagcccaggcctcatcaacttcggaaggtttgactcggagaaaatggcctacacgatccacgagatcccggtcttcatcgccatgggcgtggtgggcggtgtgcttggagctgtgttcaatgccttgaactactggctgaccatgtttcgaatcaggtacatccaccggccctgcctgcaggtgattgaggccgtgctggtggccgccgtcacggccacagttgccttcgtgctgatctactcgtcgcgggattgccagcccctgcaggggggctccatgtcctacccgctgcagctcttttgtgcagatggcgagtacaactccatggctgcggccttcttcaacaccccggagaagagcgtggtgagcctcttccacgacccgccaggctcctacaaccccctgaccctcggcctgttcacgctggtctacttcttcctggcctgctggacctacgggctcacggtgtctgccggggtcttcatcccgtccctgctcatcggggctgcctggggccggctctttgggatctccctgtcctacctcacgggggcggcgatctgggcggaccccggcaaatacgccctgatgggagctgctgcccagctgggcgggattgtgcggatgacactgagcctgaccgtcatcatgatggaggccaccagcaacgtgacctacggcttccccatcatgctggtgctcatgaccgccaagatcgtgggcgacgtcttcattgagggcctgtacgacatgcacattcagctgcagagtgtgcccttcctgcactgggaggccccggtcacctcacactcactcactgccagggaggtgatgagcacaccagtgacctgcctgaggcggcgtgagaaggtcggcgtcattgtggacgtgctgagcgacacggcgtccaatcacaacggcttccccgtggtggagcatgccgatgacacccagcctgcccggctccagggcctgatcctgcgctcccagctcatcgttctcctaaagcacaaggtgtttgtggagcggtccaacctgggcctggtacagcggcgcctgaggctgaaggacttccgagacgcctacccgcgcttcccacccatccagtccatccacgtgtcccaggacgagcgggagtgcaccatggacctctccgagttcatgaacccctccccctacacggtgccccaggaggcgtcgctcccacgggtgttcaagctgttccgggccctgggcctgcggcacctggtggtggtggacaaccgcaatcaggttgtcgggttggtgaccaggaaggacctcgccaggtaccgcctgggaaagagaggcttggaggagctctcgctggcccagacgtgaggcccagccctgcccataatgggcactggcgctggcaccccggcccttctgcatttcctcccggagtcactggtttctcggcccaaaccatgctccccagcagtggcaatggcgagcaccctgcagctgggcgggcaggcggcaggcgcggaactgaccctctcgcgggactgaccctgttgtgggcagtggtctccccccttggcgcctccttgcgcaggcccagcctccactctcctcgtctaggtttctttacctccagggatcagctgtgtgtgtgtgacctccctaccgggctatcggcctcttgggagccagcggcagggccggcacctgcgtgcctgtgcccgtgtgcgtgagacagagcccttgcccctgctgctgccccgagggctgccctgccctggaagggcccctctgcctccacaccagtggagtcttcgagacttgggagctgcttggcctcattttcagccatgagcagacggcctgtggtccctgggcctgaggcacggactcgtagcaccagggtttggaggctgcgaccgccccggagagcagcttcacactggcgccacagaggagccccacgtgcactccccggcctgcatccggcttgggtacacaggcccagaggactggggtgactcacgggccctgtgctgtgatgttgagagctgagaaaaacctccaaggccctgagccccatgcccagccctgccttggtcccccaatccccagagcttggagtctgggccccacacccagccctgccttggtccctgagcctcaaagcgtggaattgctgccctgtggacact

SEQ ID NO: 23360 - DNA, 4766 bp, Homo Sapiens
tccatgggttccaagagaagaagagctacctccccttccagcagtgtcagcggggactttgatgatgggcaccattctgtgtcaacaccaggcccaagcaggaaaaggaggagactttccaatcttccaactgtagatcctattgccgtgtgccatgaactctataataccatccgagactataaggatgaacagggcagacttctctgtgagctcttcattagggcaccaaagcgaagaaatcaaccagactattatgaagtggtttctcagcccattgacttgatgaaaatccaacagaaactaaaaatggaagagtatgatgatgttaatttgctgactgctgacttccagcttctttttaacaatgcaaagtcctattataagccagattctcctgaatataaagccgcttgcaaactctgggatttgtaccttcgaacaagaaatgagtttgttcagaaaggagaagcagatgacgaagatgatgatgaagatgggcaagacaatcagggcacagtgactgaaggatcttctccagcttacttgaaggagatcctggagcagcttcttgaagccatagttgtagctacaaatccatcaggacgtctcattagcgaactttttcagaaactgccttctaaagtgcaatatccagattattatgcaataattaaggagcctatagatctcaagaccattgcccagaggatacagaatggaagctacaaaagtattcatgcaatggccaaagatatagatctcctcgcaaaaaatgccaaaacttataatgagcctggctctcaagtattcaaggatgcaaattcaattaaaaaaatattttatatgaaaaaggctgaaattgaacatcatgaaatggctaagtcaagtcttcgaatgaggactccatccaacttggctgcagccagactgacaggtccttcacacagtaaaggcagccttggtgaagagagaaatcccactagcaagtattaccgtaataaaagagcagtacaaggaggtcgtttatcagcaattacaatggcacttcaatatggctcagaaagtgaagaagatgctgctttagctgctgcacgctatgaagagggagagtcagaagcagaaagcatcacttcctttatggatgtttcaaatcctttttatcagctttatgacacagttaggagttgtcggaataaccaagggcagctaatagctgaacctttttaccatttgccttcaaagaaaaaataccctgattattaccagcaaattaaaatgcccatatcactacaacagatccgaacaaaactgaagaatcaagaatatgaaactttagatcatttggagtgtgatctgaatttaatgtttgaaaatgccaaacgctataatgtgcccaattcagccatctacaagcgagttctaaaattgcagcaagttatgcaggcaaagaagaaagagcttgccaggagagacgatatcgaggacggagacagcatgatctcttcagccacctctgatactggtagtgccaaaagaaaaagtaaaaagaacataagaaagcagcgaatgaaaatcttattcaatgttgttcttgaagctcgagagccaggttcaggcagaagactttgtgacctatttatggttaaaccatccaaaaaggactatcctgattattataaaatcatcttggagccaatggacttgaaaataattgagcataacatccgcaatgacaaatatgctggtgaagagggaatgatagaagacatgaagctgatgttccggaatgccaggcactataatgaggagggctcccaggtttataatgatgcacatatcctggagaagttactcaaggagaaaaggaaagagctgggcccactgcctgatgatgatgacatggcttctcccaaactcaagctgagtaggaagagtggcatttctcctaaaaaatcaaaatacatgactccaatgcagcagaaactaaatgaggtctatgaagctgtaaagaactatactgataagaggggtcgccgcctcagtgccatatttctgaggcttccctctagatctgagttgcctgactactatctgactattaaaaagcccatggacatggaaaaaattcgaagtcacatgatggccaacaagtaccaagatattgactctatggttgaggactttgtcatgatgtttaataatgcctgtacatacaatgagccggagtctttgatctacaaagatgctcttgttctacacaaagtcctgcttgaaacacgcagagacctggagggagatgaggactctcatgtcccaaatgtgactttgctgattcaagagcttatccacaatctttttgtgtcagtcatgagtcatcaggatgatgagggaagatgctacagcgattctttagcagaaattcctgctgtggatcccaactttcctaacaaaccaccccttacatttgacataattaggaagaatgttgaaaataatcgctaccgtcggcttgatttatttcaagagcatatgtttgaagtattggaacgagcaagaaggatgaatcgctgaaaagagtgaagattcctctggtgctgcaggcctctcaggcttacatcgcacatacagccaggactgtagctttaaaaacagcatgtaccatgttggagattacgtctatgtggaacctgcagaggccaacctacaaccacatatcgtctgtattgaaagactgtgggaggattcagctggtgaaaaatggttgtatggctgttggttttaccgaccaaatgaaacattccacctggctacacgaaaatttctagaaaaagaagtttttaagagtgactattacaacaaagttccagttagtaaaattctaggcaagtgtgtggtcatgtttgtcaaggaatactttaagttatgcccagaaaacttccgagatgaggatgtttttgtctgtgaatcacggtattctgccaaaaccaaatcttttaagaaaattaaactgtggaccatgcccatcagctcagtcaggtttgtccctcgggatgtgcctctgcctgtggttcgcgtggcctctgtatttgcaaatgcagataaaggtgatgatgagaagaatacagacaactcagaggacagtcgagctgaagacaattttaacttggaaaaggaaaaagaagatgtccctgtggaaatgtccaatggtgaaccaggttgccactactttgagcagctccattacaatgacatgtggctgaaggttggcgactgtgtcttcatcaagtcccatggcctggtgcgtcctcgtgtgggcagaattgaaaaagtatgggttcgagatggagctgcatatttttatggccccatcttcattcacccagaagaaacagagcatgagcccacaaaaatgttctacaaaaaagaagtatttctgagtaatctggaagaaacctgccccatgacatgtattctcggaaagtgtgctgtgttgtcattcaaggacttcctctcctgcaggccaactgaaataccagaaaatgacattctgctttgtgagagccgctacaatgagagcgacaagcagatgaagaaattcaaaggattgaagaggttttcactctctgctaaagtggtagatgatgaaatttactacttcagaaaaccaattgttcctcagaaggagccatcacctttgctggaaaagaagatccagttgctagaagctaaatttgccgagttagaaggtggagatgatgatattgaagagatgggagaagaagatagtgaggtcattgaacctccttctctacctcagcttcagacccccctggccagtgagctggacctcatgccctacacacccccacagtctaccccaaagtctgccaaaggcagtgcaaagaaggaaggctccaaacggaaaatcaacatgagtggctacatcctgttcagcagtgagatgagggctgtgattaaggcccaacacccagactactctttcggggagctcagccgcctggtggggacagaatggagaaatcttgagacagccaagaaagcagaatatgaaggcatgatgggtggctatccgccaggccttccacctttgcagggcccagttgatggccttgttagcatgggcagcatgcagccacttcaccctggggggcctccaccccaccatcttccgccaggtgtgcctggcctcccgggcatcccaccaccgggtgtgatgaaccaaggagtggcccctatggtagggactccagcaccaggtggaagtccatatggacaacaggtgggagttttggggcctccagggcagcaggcaccacctccatatcccggcccacatccagctggaccccctgtcatacagcagccaacaacacccatgtttgtagctcccccaccaaagacccagcggcttcttcactcagaggcctacctgaaatacattgaaggactcagtgcggagtccaacagcattagcaagtgggatcagacactggcagctcgaagacgcgacgtccatttgtcgaaagaacaggagagccgcctaccctctcactggctgaaaagcaaaggggcccacaccaccatggcagatgccctctggcgccttcgagatttgatgctccgggacaccctcaacattcgccaagcatacaacctagaaaatgtttaatcacatcattacgtttcttttatatagaagcataaagagttgtggatcagtagccattttagttactgggggt

SEQ ID NO: 23361 - DNA, 6597 bp, Homo Sapiens
ggataacatggaaataatttgaacaggaaaatattactccacccagaaatccaagaactggaaggatcttcaattttatttctagaataggaatcgtatagtcccacattgttgctcctccaaatgcagacaacacaaagacaatcactaaagctatctgaatttcagttacatccacttttccaaatctcaacatgcctgaaacataagtctgccaatgagcgcaataaaacacaaacatcggaattccgggtcctcccccgccccccccccccacgcctcctcccctcctcccgccctcatctctctccccacccccggagccccgcgacgctacgccgcgacgagtaggagggccgctgcggtgagccttgaagcctagggcgcgggcccgggtggagccgccgcaggtgcagatcttggtggtagtagcaaatattcaaacgagaactttgaaggggaattccccactgctccttgcaccccgctccctgcctggacacaggctcactcgctgccttcttctgggggaaaccagcttcttgccagccacagctgctgcctccgccactggccaccgcccctgtcctgggagtcccttggcccagacacccacctgacttagtggctcctctgcaggaaaggtggctgccccctgcgttcctccatccaaccatgagctggtgcccatcaccactgagaatgcaccaaagaatgtagtggacaagggagaaggagcctcccggggtggaaacacacggaaaagcctcgaggacaacggctccaccagggtcaccccgagtgtccagccccacctccagcccatcagaaacatgagtgtgagccggaccatggaggacagctgtgagctggacctggtgtacgtcacagagaggatcatcgctgtctccttccccagcacagccaatgaggagaacttccggagcaacctccgtgaggtggcgcagatgctcaagtccaaacatggaggcaactacctgctgttcaacctctctgagcggagacctgacatcacgaagctccatgccaaggtactggaatttggctggcccgacctccacaccccagccctggagaagatctgcagcatctgtaaggccatggacacatggctcaatgcagaccctcacaatgtcgttgttctacacaacaagggaaaccgaggcaggataggagttgtcatcgcggcttacatgcactacagcaacatttctgccagtgcggaccaggctctggaccggtttgcaatgaagcggttctatgaggataagattgtgcccattggccagccatcccaaagaaggtacgtgcattacttcagtggcctgctctccggctccatcaaaataaacaacaagcccttgtttctgcaccacgtgatcatgcacggcatccccaactttgagtctaaaggaggatgtcggccatttctccgcatctaccaggccatgcaacctgtgtacacatctggcatctacaacatcccaggagacagccagactagcgtctgcatcaccatcgagccaggactgctcttgaagggagacatcttgctgaagtgctaccacaagaagttccgaagcccagcccgagacgtcatcttccgtgtgcagttccacacctgtgccatccatgacctgggggttgtctttgggaaggaggaccttgatgatgctttcaaagatgatcgatttccagagtatggcaaagtggagtttgtattttcttatgggccagagaaaattcaaggcatggagcacctggagaacgggccgagcgtgtctgtggactataacacctctgaccccctcatccgctgggactcctacgacaacttcagtgggcatcgagatgacggcatggaggaggtggtgggacacacgcaggggccactagatgggagcctgtatgctaaggtgaagaagaaagactccctgcacggcagcaccggggctgttaatgccacacgtcctacactgtcggccacccccaaccacgtggaacacacgctttctgtgagcagcgactcgggcaactccacagcctccaccaagaccgacaagaccgacgagcctgtccccggggcctccagtgccactgctgccttgagtccccaggagaagcgggagctggaccgcctgctgagtggctttggcttagagcgagagaagcaaggcgccatgtaccacacccagcacctcaggtcccgcccagcagggggctcggctgtgccctcctctggacgccacgttgtcccagcccaggttcatgtcaatggtggggcgttagcatctgagcgggagacagacatcctggacgatgaattgccaaaccaggatggtcacagtgcgggcagcatgggcacactctcttctctggacggggtcaccaacaccagtgaggggggctacccagaggccctgtccccactgaccaacggtctggacaagtcctaccccatggagcctatggtcaatggaggaggctacccctacgagtctgccagccgggcggggcctgcccatgctggccacacggcccccatgcggccctcctactctgcacaggagggtttagctggctaccagagggaggggccccacccagcctggccacagccagtgaccacctcccactatgcccatgaccccagcggtatgttccgctctcaatccttttcggaagctgaaccccagctgcccccagctccggtccgagggggaagcagccgggaggctgtgcaaaggggactgaattcgtggcagcagcagcagcagcagcagcagcagcctcgcccacctccacgccagcaggaaagagcccacttggagagtcttgtagccagcaggcccagccctcagccattggcagagacccccatccccagtctccctgagttcccgcgagcagcctcccagcaggagattgaacagtccatcgaaacactcaatatgctgatgctggacctggagccagcctccgctgctgccccactacacaagtcccagagtgtccccggggcctggccaggggcttctccactctcctcccagcccctctctggatcctcccgtcagtcccatccactgacccagtccagatctggctatatccccagtgggcattcgttgggaacccctgagccagccccacgggcctctctggagtctgtccctcctggcaggtcttactcaccttatgactatcagccatgtttggctgggcctaaccaggatttccattcaaagagcccagcctcttcctccttgcctgccttccttccgaccacccacagccctccagggcctcagcaacccccagcctctctccctggcctcactgctcagcctctgctctcaccaaaggaagcgacttcagacccctcccggactccagaggaggagccattgaatttagaagggctggtggcccacagggtagcaggggtacaggctcgggagaagcagcctgcagagcccccagcccctctgcggaggcgggcggccagtgatggacagtatgagaaccagtctccagaagccacatcccctcgtagccctggggttcgctcccctgtccagtgtgtctccccggagctggctcttaccatcgctctcaatcctggagggcggcccaaagagccccatttgcacagctacaaggaggccttcgaggagatggagggaacctccccgagcagcccaccacccagtggggtgcggtcccccccgggtctggccaagacacccctgtctgctctgggcctgaaacctcacaacccagcggacatcctgttgcaccccacaggagttaccagaagacggatccagccagaggaagatgaggggaaggtggtggtcaggctgtcagaagagccccggagctatgtggagtctgtggcacggacagcggtggctggaccccgagctcaggactctgagcccaagagctttagtgctccagccacccaggcctatggccatgagatacccctgaggaacgggaccctgggtggctcctttgtctcccccagccccctctccaccagcagccccatcctcagtgctgacagcacttcagtggggagtttcccgtcgggagagagcagtgaccagggtccccggacgcccacccagcctctgttggagtctggcttccgctcaggcagcctgggacagcccagcccatctgcccagagaaactaccagagctcttctcctctcccgactgtgggcagtagctacagcagccccgactactcacttcagcatttcagctcctctccggaaagccaggcccgagctcagttcagtgtggctggcgtccacacggtgcctgggagccctcaggcgcgccacagaacagtgggcaccaacactccccctagtcctggcttcggccggcgggccatcaatcccagcatggctgcccccagcagtcccagtttgagccatcaccagatgatgggtccaccaggcactggcttccatggtagcactgtctccagcccccagagcagtgcagcgaccaccccggggagccccagcctgtgtcggcacccagcaggggtctaccaggtttctggcctccacaacaaagtggccaccaccccggggagtcccagcctgggccggcaccctggggctcaccaaggcaacctggcctccggtcttcatagcaatgcaatagccagccctggaagccccagcctgggccgtcacctcggagggtctggatctgtggttcccggcagcccctgcttggaccggcatgtggcctatggcggctattctaccccggaggatcggagacccacactgtcccggcagagcagtgcctctggctaccaggctccttccacgccctccttccctgtctcccctgcctactaccctggcctgagcagccctgccacctccccgtcaccagactccgcagccttccggcaagggagcccaacaccagccttgccagagaagcgaaggatgtcagtgggagaccgggcaggcagcctccccaactatgccaccatcaatgggaaggttgcttcgcctgtgcccagcggcatgtccagtcccagcgggggcagcaccgtctccttctcccacactctgcccgacttctccaagtactccatgccagacaacagcccggagacgcgggctaaagtgaagtttgtccaggacacttctaagtattggtacaagcctgagatctccagggagcaggccatcgcgctcctcaaggaccaggagccgggggccttcatcatccgcgacagtcactccttccgaggcgcgtacgggctggccatgaaggtgtcttcgccacctccaaccatcatgcagcagaataaaaaaggagacatgacccatgagctggtcaggcattttctgatagagactggccccagaggagtcaagctcaagggctgccccaatgagccaaacttcggatcgctgtctgccctggtctaccagcactccatcatcccattggccctgccttgcaagctggtcattccaaaccgagaccccacagatgaatcgaaagatagctccggccctgccaactcaactgcagacctgctgaaacaaggggcagcctgcaatgtgctcttcatcaactctgtggacatggagtcactcactgggccacaggccatctctaaagccacatctgagacgttggctgcagaccccacgccagctgccaccatcgttcacttcaaagtctctgcccagggaatcactctgactgacaaccagagaaagctctttttcagacgccactaccctctcaacactgtcaccttctgtgacctggatccacaggaaagaaagtggatgaaaacagagggtggtgcccctgctaagctcttcggcttcgtggcccggaagcagggcagcaccacggacaacgcctgccacctctttgctgagcttgaccccaaccagccggcctctgccatcgtcaacttcgtctccaaggtcatgctgaatgccggccaaaagagatgaaccctgccccttgcccagggccagtgccatggggaaggggcttgtggggaggggacccatgaatcctgaccactcttgaacccagaaggaggactttgggccaatttcggaggagagaagaaagtgcaacgtggggagagggaagtgaattgcagaggggagggggaaaagagagagagagagagagagagagagagagagagagagaaagatggaggagaagaacttggattcccctgggtagatggaaactgcaaaaacccaaagcctccaaaactaaccaggtccacctaacaccccctccctcccctaagaagatggatgtcctcaaaagagaaggaacaaacctccttgggaatccacattttttgggggaatggaaaagctctgtctccctaactcaactgctttgcaaggggaaatcaagctgggagaatctttttctggccacctgtagggtaggttgtcaaaccaaacagagccaccgtgggacatcaagtggaagaacttgtttgcttgaaagtatctcagacccaaggcacctcaggtctctttg

SEQ ID NO: 23362 - DNA, 5519 bp, Homo Sapiens
aagtactgactgttcaaagctcaggcaaaccatgcagatccacgtgttgttggaggaggcgctcccttcaggagaccacagagggggagtgactgtggctgaccatgtgggcagaggggctggcgggctggcccctgcgagaggcggactcagggctgctggatgctccgtccttggccgctttgatctggagccacgtgtcacccagagctttggcaaagtggtcgtccacggagcccgtgatggacacggagttgggtgccggctcgggctccttgtaattcttgcccaggctcctgcggaaatgctcctccaccacggggtcacaggtggtggcagcgctcggtggcctccggtagctggcaggcccgggcgcggcctcgtgccgaattcggcacgagggggtttcggcggccgggagggagttgtcggcgccgcggccgctgcggacggacgctcgcctgccggctgaggaaaaagaagcaactaacaaaacactgtgataataaggattattcagtatgcagtttgcaggatatccatgacgacattgaaaatgaattttttgtattcaccagatattcttatatgagaagatctattttaaacagtctaaatattttttcttctgttggaccagcatggcaggatttaagcgagggtatgatggaaagattgctggattatatgatctggataaaaccttgggtcgaggccattttgccgtggttaaacttgccaggcatgtctttacgggtgaaaaggtggcagtaaaagttattgacaagacaaaactggacactctagctactggtcatcttttccaggaagtgagatgcatgaaactagtgcagcatcctaacatcgtccgcctttatgaagttattgacacccagaccaaactatatcttattctagaacttggggatgaaggagatatgtttgattatataatgaaacatgaggagggtcttaatgaagacttgcccaagaagtattttgctcagatagttcatgctatatcttattgccataaactccatgtggttcacagagacttaaaaccagagaatgtagtcttctttgaaaaacaaggtcttgtaaagttgacagactttgggttcagcaacaaatttcaaccagggaagaagctcactacaagctgtggatctcttgcatattccgctccagaaattctgcttggtgatgagtatgatgcacctgcagtagatatttggagtctgggagtgatccttttcatgttggtgtgtgggcagccgccctttcaagaagccaatgacagtgaaacactgacaatgatcatggattgcaaatatacagtaccatcccatgtgtctaaagagtgtaaagacctaatcacacggatgctacagagagatcccaagagaagggcttctttagaagagattgaaaatcatccttggcttcagggagtggacccttcaccagctacaaagtataacattccccttgtgtcatacaaaaatctctcggaagaggagcacaacagcatcattcagcgcatggtgcttggggacatagcggatcgagacgccattgtagaagccctggaaaccaacaggtataaccatatcacagccacatacttcctgctggctgaaaggatcctgagagaaaagcaagagaaagaaatacagaccagatctgcaagcccgagcaatatcaaggcccagtttaggcagtcatggccaaccaaaattgatgtaccccaggaccttgaggatgacctcacggccactcctttgtcccacgcgactgtccctcagtctcctgctcgggctgctgacagtgtcctcaatggccacaggagcaaaggcctgtgtgactcagctaagaaagatgacctccctgagttggctggaccagcactctctacggtgccacccgcaagcttaaaacccacagccagtgggcggaagtgtctgttcagggtggaagaagatgaagaggaagatgaggaggacaagaaacccatgtccctctcaacacaagtggttttgcgccggaagccatctgtaaccaaccgcctgacatccaggaagagtgcgcccgtcctcaaccagatctttgaggaaggggaatctgatgatgagtttgacatggatgagaatctgcctcccaagttgagcaggttaaagatgaatatagcttctccaggtacagttcacaaacgctaccaccggaggaaaagtcagggccggggctccagctgcagtagttcggagaccagtgatgatgattctgaaagccggcggcggctcgataaagatagcgggttcacctactcctggcaccgacgggatagcagcgaggggccccctggcagtgagggggatggcgggggccagagcaagccgagcaatgccagtggaggggtggacaaggccagccccagtgagaacaatgctggtgggggcagtccctccagcggctcgggtggcaaccccaccaatacatcgggtaccacacgccgctgtgccggccccagcaactccatgcagctggcctctcgcagtgctggggagctcgttgagagcctcaaactcatgagcctctgcctcggctcccagcttcatgggagcaccaagtacattattgatccacagaatggcttgtcattttccagtgtgaaagtccaagagaaatctacgtggaaaatgtgcattagctccacagggaatgcagggcaggtccctgcagtgggcggcataaagtttttctctgaccacatggcagataccaccactgaattggaacggataaagagcaagaacctgaaaaataacgtgctgcagctacctctgtgcgaaaagaccatctctgtgaacatccagcggaaccctaaggaggggctgctgtgcgcatccagcccagccagctgttgccatgtcatctgactgtggccccatctggccgctagcacgcttcctgctcagagcagtgaagaccggctcacttcactgttccatttggttttactattttaaagtgggcgttaggagcaattatttattacctttccatttgttcgcctgatgatgtgacaatgcatggtctttgtgcatgctgctagacacttttctttcccagccgaaaagcctattatgtaatttttacattcataattttaatgtggatgatcaggattaaatcaagatatatatctggaacctcttataaatggagcacttagaaatttgttgttctgcacttaacctagagagagaaaaaatgcttttctttgtgaaaaatctgaattcctgtcctgaccttctgtgatgtggaaaccctaggctctgagacacactctctggtgtctgagacagaaccaaagcaataacgttgtgatgcccacaggcctggagccagctagcgaccttgtgccgcccagctgtccatggcccgtgcagagcagaggacagtgagtgtctgcactgagaaccttaaaccacagttgaacatacccacacctgtttgtcttaagctatagtgtaaaaacaaagtttgggctctgaaaatttaactgaaaaagatttccttgtttttgtaataggtgagataaagtacttagatttataaggcagcttcccctgtagtgataaattacaagcagacaatcttattttgtaatgtgatgaagtgatgatgtcttaactctacttagagagtgtatgtctgtctaacagaacaaaaagatgctctgtgtaaattccttcctgtagggcacactgcaggatttccatgtagatagaagaactatagggcctagtacagaaggtgcacacaaatgttggcaaagtcaaaccccatgaattaaaacctactggaatttggtttttaggagtttggtaattagattatctcttttgttattttcattcagttatatcctttggctcagctagctttgaaattggctgatgaaaaaatatacataaaagggtaaaattcacacatacagcaaacaaaaatgcacaaagcctgcttcgtaacttttttttctggaattgtttttcactttgcctttttctgccaaaacaataatcaaagaactcttgctttaacctattcctgtacaaagactgtttttgaccagataatcatctgttgtggcattctatcttgtaggacactgtatattgcaaattgctgattatggaaggggccagttgctgttttttcatgcagtgccctgggagtcttaaaagcagtgcttagcaacattggtgatagcatgtggctgggacccagggcccttccccactcttcagccccgagtcatgtgtctgaggtgacggactgagacgcatctggtcctgtaattcagagagtgggcacatcaccaaagaactgcattgctgtggtcactgtttcttcaagtacacactgactctgctactttaggataaatatattttactcagaactctgaatttcacagtatacttactaaactaagtaaaaatgatacttaaaatacttattttactttctagacctaggctagatgttttaagctacagctctagttcattgtgatatttataatttgaaagctatgagaatagatgtgtgggtgaagccatagaacatatttgcttgaaattcttgagcagggatcttataaagggccagaaataagatgtgtggttcacatagatagtgagcgtaacatctgtattaaacataggagagaagtttataaagggcattggcaataaactctttgttgcagctgttttccaagcagtgtaaatactttttcctgtgattatgtatagccttggaatggcaccttttaactaacccatatgtgtttggtttcaatggttttttatattcagatgtatatatggtgctcactttaggatcagcagtgttgaccatttatgctgcatagctgtattatagccttattagttgtgtggttgacccttggggtatacaaatgtcagtctgagtggtgtcttactcctttgtttataagtgaatgattgtgcatgttttgtatgtcatagtatgtcgtcacataaaagggagggagcgaaaaaccattacattaagataatattggaccaaactacttacttgctctaaacagttacttgtaccccttaacctgtcttcaaaagttgcatatagttacagtagtgtataaattaaatattgtggaaaaacagtcttgtatttttctgtatgtgtgtatatatatataattatgtacttctggcaattctatctgtatttaaagatgtgacaatcttgacaccaattttaagaatagctgtgagaccgaattaaagataatccctaccaagtgaaaattgatgtgtgttaagagggtacagaattatcaactgatttggtcagttgcttccaatgctggttgatttccctcattgtgtaaacattgacaggtatgtgacaaatgggaaaaaaaatccaaataataaagtgacatattggtgttcagcaat

SEQ ID NO: 23363 - DNA, 1335 bp, Homo Sapiens
atggcccccgacccggtggccgccgagaccgcggctcagggacctaccccgcgctacttcacctgggacgaggtggcccagcgctcagggtgcgaggagcggtggctagtgatcgaccgtaaggtgtacaacatcagcgagttcacccgccggcatccagggggctcccgggtcatcagccactacgccgggcaggatgccacggatccctttgtggccttccacatcaacaagggccttgtgaagaagtatatgaactctctcctgattggagaactgtctccagagcagcccagctttgagcccaccaagaataaagagctgacagatgagttccgggagctgcgggccacagtggagcggatggggctcatgaaggccaaccatgtcttcttcctgctgtacctgctgcacatcttgctgctggatggtgcagcctggctcaccctttgggtctttgggacgtcctttttgcccttcctcctctgtgcggtgctgctcagtgcagttcaggcccaggctggctggctgcagcatgactttgggcacctgtcggtcttcagcacctcaaagtggaaccatctgctacatcattttgtgattggccacctgaagggggcccccgccagttggtggaaccacatgcacttccagcaccatgccaagcccaactgcttccgcaaagacccagacatcaacatgcatcccttcttctttgccttggggaagatcctctctgtggagcttgggaaacagaagaaaaaatatatgccgtacaaccaccagcacaaatacttcttcctaattgggcccccagccttgctgcctctctacttccagtggtatattttctattttgttatccagcgaaagaagtgggtggacttggcctggatgattaccttctacgtccgcttcttcctcacttatgtgccactattggggctgaaagccttcctgggccttttcttcatagtcaggttcctggaaagcaactggtttgtgtgggtgacacagatgaaccatattcccatgcacattgatcatgaccggaacatggactgggtttccacccagctcctggccacatgcaatgtccacaagtctgccttcaatgactggttcagtggacacctcaacttccagattgagcaccatctttttcccacgatgcctcgacacaattaccacaaagtggctcccctggtgcagtccttgtgtgccaagcgtggcatagagtaccagtccaagcccctgctgtcagccttcgccgacatcatccactcactaaaggagtcagggcagctctggctagatgcctatcttcaccaataa

SEQ ID NO: 23364 - DNA, 1114 bp, Homo Sapiens
gcctgttctgagcctcaccctatcagtcagtagagagagatgtccagaaaaaatatctttcaggaaagttctcccctgcagaattttttttccttgttaaatatcaggaatataggcgtgagccaccgcgcccggcagcctcaggctcttcaaggccctccgtcaagcaatgatgccatggtcatggatgaaaaggtcaagagaagctttgtgctggacacggcttctgccatctgcaactacaatgcccactacaagaatcaccccaaatactggtgccgaggctatttccgtgactactgcaacatcatcgccttcttccctaacagcaccaatcatgtggccctgagggacacagggaaccagctcattgtcactatgtcctgcctgaccaaagaggacacgggctggtactggtgtggcatccagcgggactttgccagggatgacatggattttacagagctgattgtaactgacgacaaaggaaccctggccaatgacttttggtctgggaaagacctatcaggcaacaaaaccagaagctgcaaggctcccaaagttgtccgcaagctgaccgctccaggacgtccattctcatcatttgcatactgatcacgggtttgggaatcatctctgtaatcagtcatttgaccaaaaggaggagaagtcaaaggaatagaagggtaggcaacactttgaagcccttctcgcgtgtcctgactccaaaggaaatggctcctactgaacagatgtgactgaagattttttttaatttagttcataaagtgatgctacaacagaataatcaccatgacaactggccccacacctcagagactgattctgatctcccaggaattctgaaggaccctctatccttgacaacaatcatttgcagccaggtagcaacggcggtagtcagaggagctatgatagaccacacccaagcaaggctgccctcaaataacatctcaagatcttagttcttatgcattccatcagtcagaagtgaagaagaggtggagaatctggattggggaccaggaaatcacttgtattttgttagccaataaattcctagccagtgttgaatgaaaaaaaaaaaaaaaaa

SEQ ID NO: 23365 - DNA, 5515 bp, Homo Sapiens
cttttttcccttcttcaggtcaggggaaagggaatgcccaattcagagagacatgggggcaagaaggacgggagtggaggagcttctggaactttgcagccgtcatcgggaggcggcagctctaacagcagagagcgtcaccgcttggtatcgaagcacaagcggcataagtccaaacactccaaagacatggggttggtgacccccgaagcagcatccctgggcacagttatcaaacctttggtggagtatgatgatatcagctctgattccgacaccttctccgatgacatggccttcaaactagaccgaagggagaacgacgaacgtcgtggatcagatcggagcgaccgcctgcacaaacatcgtcaccaccagcacaggcgttcccgggacttactaaaagctaaacagaccgaaaaagaaaaaagccaagaagtctccagcaagtcgggatcgatgaaggaccggatatcgggaagttcaaagcgttcgaatgaggagactgatgactatgggaaggcgcaggtagccaaaagcagcagcaaggaatccaggtcatccaagctccacaaggagaagaccaggaaagaacgggagctgaagtctgggcacaaagaccggagtaaaagtcatcgaaaaagggaaacacccaaaagttacaaaacagtggacagcccaaaacggagatccaggagcccccacaggaagtggtctgacagctccaaacaagatgatagcccctcgggagcttcttatggccaagattatgaccttagtccctcacgatctcatacctcgagcaattatgactcctacaagaaaagtcctggaagtacctcgagaaggcagtcggtcagtcccccttacaaggagccttcggcctaccagtccagcacccggtcaccgagcccctacagtaggcgacagagatctgtcagtccctatagcaggagacggtcgtccagctacgaaagaagtggctcttacagcgggcgatcgcccagtccctatggtcgaaggcggtccagcagccctttcctgagcaagcggtctctgagtcggagtccactccccagtaggaaatccatgaagtccagaagtagaagtcctgcatattcaagacattcatcttctcatagtaaaaagaagagatccagttcacgcagtcgtcattccagtatctcacctgtcaggcttccacttaattccagtctgggagctgaactcagtaggaaaaagaaggaaagagcagctgctgctgctgcagcaaagatggatggaaaggagtccaagggttcacctgtatttttgcctagaaaagagaacagttcagtagaggctaaggattcaggtttggagtctaaaaagttacccagaagtgtaaaattggaaaaatctgccccagatactgaactggtgaatgtaacacatctaaacacagaggtaaaaaattcttcagatacagggaaagtaaagttggatgagaactccgagaagcatcttgttaaagatttgaaagcacagggaacaagagactctaaacccatagcactgaaagaggagattgttactccaaaggagacagaaacatcagaaaaggagacccctccacctcttcccacaattgcttctcccccaccccctctaccaactactacccctccacctcagacaccccctttgccacctttgcctccaataccagctcttccacagcaaccacctctgcctccttctcagccagcatttagtcaggttcctgcttccagtacttcaactttgcccccttctactcactcaaagacatctgctgtgtcctctcaggcaaattctcagccccctgtacaggtttctgtgaagactcaagtatctgtaacagctgctattccacacctgaaaacttcaacgttgcctcctttgcccctcccacccttattacctggaggtgatgacatggatagtccaaaagaaactcttccttcaaaacctgtgaagaaagagaaggaacagaggacacgtcacttactcacagaccttcctctccctccagagctccctggtggagatctgtctcccccagactctccagaaccaaaggcaatcacaccacctcagcaaccatataaaaagagaccaaaaatttgttgtcctcgttatggagaaagaagacaaacagaaagcgactgggggaaacgctgtgtggacaagtttgacattattgggattattggagaaggaacctatggccaagtatataaagccagggacaaagacacaggagaactagtggctctgaagaaggtgagactagacaatgagaaagagggcttcccaatcacagccattcgtgaaatcaaaatccttcgtcagttaatccaccgaagtgttgttaacatgaaggaaattgtcacagataaacaagatgcactggatttcaagaaggacaaaggtgccttttaccttgtatttgagtatatggaccatgacttaatgggactgctagaatctggtttggtgcacttttctgaggaccatatcaagtcgttcatgaaacagctaatggaaggattggaatactgtcacaaaaagaatttcctgcatcgggatattaagtgttctaacattttgctgaataacagtgggcaaatcaaactagcagattttggacttgctcggctctataactctgaagagagtcgcccttacacaaacaaagtcattactttgtggtaccgacctccagaactactgctaggagaggaacgttacacaccagccatagatgtttggagctgtggatgtattcttggggaactattcacaaagaagcctatttttcaagccaatctggaactggctcagctagaactgatcagccgactttgtggtagcccttgtccagctgtgtggcctgatgttatcaaactgccctacttcaacaccatgaaaccgaagaagcaatatcgaaggcgtctacgagaagaattctctttcattccttctgcagcacttgatttattggaccacatgctgacactagatcctagtaagcggtgcacagctgaacagaccctacagagcgacttccttaaagatgtcgaactcagcaaaatggctcctccagacctcccccactggcaggattgccatgagttgtggagtaagaaacggcgacgtcagcgacaaagtggtgttgtagtcgaagagccacctccatccaaaacttctcgaaaagaaactacctcagggacaagtactgagcctgtgaagaacagcagcccagcaccacctcagcctgctcctggcaaggtggagtctggggctggggatgcaataggccttgctgacatcacacaacagctgaatcaaagtgaattggcagtgttattaaacctgctgcagagccaaaccgacctgagcatccctcaaatggcacagctgcttaacatccactccaacccagagatgcagcagcagctggaagccctgaaccaatccatcagtgccctgacggaagctacttcccagcagcaggactcagagaccatggccccagaggagtctttgaaggaagcaccctctgccccagtgatcctgccttcagcagaacagatgacccttgaagcttcaagcacaccagctgacatgcagaatatattggcagttctcttgagtcagctgatgaaaacccaagagccagcaggcagtctggaggaaaacaacagtgacaagaacagtgggccacaggggccccgaagaactcccacaatgccacaggaggaggcagcagcatgtcctcctcacattcttccaccagagaagaggccccctgagccccccggacctccaccgccgccacctccaccccctctggttgaaggcgatctttccagcgccccccaggagttgaacccagccgtgacagccgccttgctgcaacttttatcccagcctgaagcagagcctcctggccacctgccacatgagcaccaggccttgagaccaatggagtactccacccgaccccgtccaaacaggacttatggaaacactgatgggcctgaaacagggttcagtgccattgacactgatgaacgaaactctggtccagccttgacagaatccttggtccagaccctggtgaagaacaggaccttctcaggctctctgagccaccttggggagtccagcagttaccagggcacagggtcagtgcagtttccaggggaccaggacctccgttttgccagggtccccttagcgttacacccggtggtcgggcaaccattcctgaaggctgagggaagcagcaattctgtggtacatgcagagaccaaattgcaaaactatggggagctggggccaggaaccactggggccagcagctcaggagcaggccttcactgggggggcccaactcagtcttctgcttatggaaaactctatcgggggcctacaagagtcccaccaagagggggaagagggagaggagttccttactaacccagagacttcagtgtcctgaaagattcctttcctatccatccttccatccagttctctgaatctttaatgaaatcatttgccagagcgaggtaatcatctgcatttggctactgcaaagctgtccgttgtattccttgctcacttgctactagcaggcgacttaggaaataatgatgttggcaccagttccccctggatgggctatagccagaacatttacttcaactctaccttagtagatacaagtagagaatatggagaggatcattacattgaaaagtaaatgttttattagttcattgcctgcacttactggtcggaagagagaaagaacagtttcagtattgagatggctcaggagaggctctttgatttttaaagttttggggtggggggttgtgtgtggtttctttcttttgaattttaatttaggtgttttgggtttttttcctttaaagagaatagtgttcacaaaatttgagctgctctttggcttttgctataagggaaacagagtggcctggctgatttgaataaatgtttctttcctctccaccatctcacattttgcttttaagtgaacactttttccccattgagcatcttgaacatactttttttccaaataaattactcatccttaaagtttactccactttgacaaaagatacgcccttctccctgcacataaagcaggttgtagaacgtggcattcttgggcaagtaggtagactttacccagtctctttccttttttgctgatgtgtgctctctctctctctttctctctctctctctctctctctctctctctgtctgtctcgcttgctcgctctcgctgtttctctctctttgaggcatttgtttggaaaaaatcgttgagatgcccaagaacctgggataattctttactttttttgaaataaaggaaaggaaattcaaaaaaaaaaaaaaaaaaaaaaaaaaaaaaaaaaaaaaaaaaaaaaaaaaaaaaaaaaaaaaaaaa

SEQ ID NO: 23366 - DNA, 5323 bp, Homo Sapiens
ctggtttatcaacttgacgagaatcatttcaaaattttaggaaaaaaatttatgtctcagtaaaactttgtttagaattaggtttttcagtagcaaggataaggtgaagggattaaaaatgtacgtaaaattagtagtcaatgaattctggaatgcagtctgtataatcctattcagagattatgctatttactgaatatagctttggttgtgtttaaatctgcactagtattaggtgctccttaaaagttgaaaatatatagccaataaggtataaagaagaattgacagataaatctaaacagtttctttgtatagtactaacttctgaaatgttcagtggtggcatttgataaagtaagttgtaatatgatcacattgaggaatgttatataattattaaactcaatttttataaaaggcatcattttataaaagtatcataagaaagtgccaatgtttcaatgaataaattgaggcaacatgataccaacttagtgaaaaatatacaagaccagaaggaagtaacctaaaatattactagtgattgcctctgggtaataggatatgggctttttgtctttctatatttttcattttcccactgccgtgttcctggtacctcagtgaaatgaagtgctcagttcttttaacagttgtcagtttttaaaacaaatatagtcttctggaaatgttttaggtagcattttcaattttatgtttttaagccatctcttgaatttgaataaattatttgaactgcataaatatttgcaatccattgagaacaccaaaacaaaaagtaaaaagcagaaacctaaatttttctaaattttttttaatatctagaagttgtatctcaaagtttttgtaattttcttcattgtcagattttattttttactgtcaaatatccaatgacagaggccacctcttttaaaatagaaactttaaatggaaatatacattatactaagtcttatattttatagccttgaaagtttctattcatgtaattaagctttttctgatttttagaggaacagaaagaaagtgaaaagatgaaaagtgaggagcagcctatggatttagaaaaccgttctacagccaatgttctagaagagactactgtgaaaaaagaaaaagaagatgaaaaggaacttgtgaaactgccagtcatagtgaagctagaaaaacctttgccagaaaatgaagaaaaaaagattatcaaagaagaaagtgattccttcaaggaaaatgtcaaacccattaaagttgaggtgaaggaatgtagagcagatcctaaagataccaaaagtagcatggagaagccagtggcacaggagcctgaaaggatcgaatttggtggcaatattaaatcttctcacgaaattactgagaaatctactgaagaaactgagaaacttaaaaatgaccagcaggccaagataccactaaaaaaacgagaaattaaactgagtgatgattttgacagtccagtcaagggacctttgtgtaaatcagttactccaacaaaagagtttttgaaagatgaaataaaacaagaggaagagacttgtaaaaggatctctacaatcactgctttgggtcatgaagggaaacagctggtaaatggagaagttagtgatgaaagggtagctccaaattttaagacagaaccaatagagacaaagttttatgagacaaaggaagagagctatagcccctctaaggacagaaatatcatcacggagggaaatggaacagagtccttaaattctgtcataacaagtatgaaaacaggtgagcttgagaaagaaacagcccctttgaggaaagatgcagatagttcaatatcagtcttagagatccatagtcaaaaagcacaaatagaggaacccgatcctccagaaatggaaacttctcttgattcttctgagatggcaaaagatctctcttcaaaaactgctttatcttccaccgagtcgtgtaccatgaaaggtgaagagaagtctcccaaaactaagaaggataagcgcccaccaatcctagaatgtcttgaaaagttagagaagtccaaaaagacttttcttgataaggacgcacaaagattgagtccaataccagaagaagttccaaagagtactctagagtcagaaaagcctggctctcctgaggcagctgaaacttctccaccatctaatatcattgaccactgtgagaaactagcctcagaaaaagaagtggtagaatgccagagtacaagtactgttggtggccagtctgtgaaaaaagtagacctagaaaccctaaaagaggattctgagttcacaaaggtagaaatggataatctggacaatgcccagacctctggcatagaggagccttctgagacaaagggttctatgcaaaaaagcaaattcaaatataagttggttcctgaagaagaaaccactgcctcagaaaatacagagataacctctgaaaggcagaaagagggcatcaaattaacaatcaggatatcaagtcggaaaaagaagcccgattctccccccaaagttctagaaccagaaaacaagcaagagaagacagaaaaggaagaggagaaaacaaatgtgggtcgtactttaagaagatctccaagaatatctagacccactgcaaaagtggctgagatcagagatcagaaagctgataaaaaaagaggggaaggagaagatgaggtggaagaagagtcaacagctttgcaaaaaactgacaaaaaggaaattttgaaaaaatcagagaaagatacaaattctaaagtaagcaaggtaaaacccaaaggcaaagttcgatggactggttctcggacacgtggcagatggaaatattccagcaatgatgaaagtgaagggtctggcagtgaaaaatcatctgcagcttcagaagaggaggaagaaaaggaaagtgaagaagccatcctagcagatgatgatgaaccatgcaaaaaatgtggccttccaaaccatcctgagctaattcttctgtgtgactcttgcgatagtggataccatactgcctgccttcgccctcctctgatgatcatcccagatggagaatggttctgcccaccttgccaacataaactgctctgtgaaaaattagaggaacagttgcaggatttggatgttgccttaaagaagaaagagcgtgccgaacgaagaaaagaacgcttggtgtatgttggtatcagtattgaaaacatcattcctccacaagagccagacttttctgaagatcaagaagaaaagaaaaaagattcaaaaaaatccaaagcaaacttgcttgaaaggaggtcaacaagaacaaggaaatgtataagctacagatttgatgagtttgatgaagcaattgatgaagctattgaagatgacatcaaagaagccgatggaggaggagttggccgaggaaaagatatctccaccatcacaggtcatcgtgggaaagacatctctactattttggatgaagaaagaaaagaaaataaacgaccccagagggcagctgctgctcgaaggaagaaacgccggcgattaaatgatctggacagtgatagcaacctggatgaagaagagagcgaggatgaattcaagatcagtgatggatctcaagatgagtttgttgtgtctgatgaaaacccagatgaaagtgaagaagatccgccatccaatgaggacagtgacactgacttttgtagccgtagactgaggcgacacccctctcggccaatgaggcagagcaggcgtttgcgaagaaagaccccaaagaaaaaatattccgatgatgatgaagaggaggaatctgaggagaatagtagagactctgaaagtgacttcagtgatgattttagtgatgattttgtagaaactcggcgaaggcggtcaaggagaaatcagaaaagacaaattaactacaaagaagactcagaaagtgacggttcccagaagagtttgcgacgtggtaaagaaataaggcgagtacacaagcgaagactttccagctcagagagtgaagagagctatttgtccaagaactctgaagatgatgagctagctaaagaatcaaagcggtcagttcgaaagcggggccgaagcacagacgagtattcagaagcagatgaggaggaggaggaagaggaaggcaaaccatcccgcaaacggctacaccggattgagacggatgaggaggagagttgtgacaatgctcatggagatgcaaatcagcctgcccgtgacagccagcctagggtcctgccctcagaacaagagagcaccaagaagccctaccggatagaaagtgatgaggaagaggactttgaaaatgtaggcaaagtggggagcccattggactatagcttagtggacttaccttcaaccaatggacagagccctggcaaagccattgagaacttgattggcaagcctactgagaagtctcagacccccaaggacaacagcacagccagtgcaagcctagcctccaatgggacaagtggtgggcaggaggcaggagcaccagaagaggaggaagatgagcttttgagagtgactgaccttgttgattatgtctgtaacagtgaacagttataagactttttttccatttttgtgctaatttattccacggtagctctcacaccagcgggccagttattaaaagctgtttaatttttcctagaaaactccactacagaatgacttttagaagaaaaatttcaacaaatcctgaagtctttctgtgaagtgaccagttctgaactttgaagataaataattgctgtaaattccttttgattttctttttccaggttcatggtccttggtaatttcattcatggaaaaaaatcttattataataacaacaaagatttgtatatttttgactttatatttcctgagctctcctgactttgtgaaaaagggtggatgaaaatgcattccgaatctgtgagggcccaaaacagaatttaggggtgggtgaaagcacttgtgctttagctttttcatattaaatatatattatatttaaacattcatggcatagatgatgatttacagacaatttaaaagttcaagtctgtactgttacagtttgagaattgtagataacatcatacataagtcatttagtaacagcctttgtgaaatgaacttgtttactattggagataaccacacttaataaagaagagacagtgaaagtaccatcataattaacctaaatttttgttatagcagagtttcttgtttaaaaaaaaataaaatcatctgaaaagcaaaaa

SEQ ID NO: 23367 - DNA, 2306 bp, Homo Sapiens
tcatcatccaagtttgtagttcatttaaaaatacaacattaaacacattttgctaggatgtcaaatagtcacagttctaagtagttggaaacaaaattgacgcatgttaatctatgcaaagagaaaggaaaggatgaggtgatgtattgactcaaggttcattcttgctgcaattgaacatcctcaagagttgggatggaaatggtgatttttacatgtgtcctggaaagatattaaagtaattcaaatcttccccaaaggggaaaggaagagagtgatactgacctttttaagtcatagaccaaagtctgctgtagaacaaatatgggaggacaaagaatcgcaaattcttcaaatgactattatcagtattattaacatgcgatgccacaggtatgaaagtcttgccttatttcacaattttaaaaggtagctgtgcagatgtggatcaacatttgtttaaaataaagtattaatactttaaagtcaaataagatatagtgtttacattctttaggtcctgaggggcagggggatctgtgatataacaaaatagcaaaagcggtaatttccttaatgttatttttctgattggtaattatttttaacagtacttaattattctatgtcgtgagacactaaaatcaaaaacgggaatctcatttagactttaatttttttgagattatcggcggcacaatcactttgtagaaactgtaaaaaataaaagtatctcctagtcccttaattttttcataaatatttctggcttttgagtagtgtatttatattgtatatcatactttcaactgtagacaattatgatgctaatttattgtttcttggtttcacctttgtataagatatagccaagactgaagaaaccaaatatatgtgtttactgtagcatgtcttcaaattagtggaacttagttcagggacatagaagagtcttaatgaattaaaatcattcacttgattaaatgtctgtaaatcttcatcattcctactgtagtttatttaatatctattgtaaattatgtgacttgtagcttcctctggttttcaagtaaactcaacaaggtggagtcttacctggttttcctttccaagcattgtaaattgtataccaaagatattagttattacttctgtgtgtacaaagaggattattttattatgtttattaatcacctctaatactcatccacatgaagggtacacattaggtaagctgggcgttgactcatgcgcagtctcagtcacccgtgttatcttcgtggctcaaaggacaatgcaaaatcgccgatcagagctcatacccaaagcattacagagaacagcagcatcattgccctccccagctgaaaaacaagttggctagaagatacatggagaggaatggtgtggtcaacagttaatgaaacggttctatcatgcatgtgtaatgtggatggagacaattataagatttgactataactatttggagggtctttaacattgccaaaaaaacaaatatgttgatttttattttattttattttttattttaagaggcgggatcttgatctcacatgttgcccaggctggccttgaactcctgggctcaagcattcctcctgcctcagcctcccccatagctgggactaggggtgcatgccagcatacctggctacgttgactcttaaaatctatgttctcttattttaaagatacagtgctccccactgaaaattaaacctaaaaaatgtcacatattggtatgttgttaacctggtagattaaatcatgagaatgattagaaagacgggcaacacagcgggttacatccacactgctgatcacaccaacgacaggagctgataagcaagaaagcgtcacagccagcgtctgttcacccaaggttgacaagtgaagtttctctaatgttgattgttagccgatttgtaacctggcatttacttagcaactgccttatcaattacaggatttgccggtaaaagcagactcaaatataaaggtttttggcttaacttggtttattatagttgctctatgtttgtaaacagacaatctctaatgtctgattatttgtatcacagatctgcagctgccttggacttgaatccatgcaatgtttagagtgtgaagtcagttacttgttgatgttttcttactgtatcaatgaaatacatattgtcatgtcagttcttgccaggaacttctcaacaaaatggaattttttttttcagtatttcaataaatattgatatgcccagcctgataaaaaaaaaaaaaaaaaa

SEQ ID NO: 23368 - DNA, 2558 bp, Homo Sapiens
tgtggcactgcctgcgtacccaaccccagccctgggtagcctgcagcatggcccagctgttcctgcccctgctggcagccctggtcctggcccaggctcctgcagctttagcagatgttctggaaggagacagctcagaggaccgcgcttttcgcgtgcgcatcgcgggcgacgcgccactgcagggcgtgctcggcggcgccctcaccatcccttgccacgtccactacctgcggccaccgccgagccgccgggctgtgctgggctctccgcgggtcaagtggactttcctgtcccggggccgggaggcagaggtgctggtggcgcggggagtgcgcgtcaaggtgaacgaggcctaccggttccgcgtggcactgcctgcgtacccagcgtcgctcaccgacgtctccctggcgctgagcgagctgcgccccaacgactcaggtatctatcgctgtgaggtccagcacggcatcgatgacagcagcgacgctgtggaggtcaaggtcaaaggggtcgtctttctctaccgagagggctctgcccgctatgctttctccttttctggggcccaggaggcctgtgcccgcattggagcccacatcgccaccccggagcagctctatgccgcctaccttgggggctatgagcaatgtgatgctggctggctgtcggatcagaccgtgaggtatcccatccagaccccacgagaggcctgttacggagacatggatggcttccccggggtccggaactatggtgtggtggacccggatgacctctatgatgtgtactgttatgctgaagacctaaatggagaattgttcctgggtgaccctccagagaagctgacattggaggaagcacgggcgtactgccaggagcggggtgcagagattgccaccacgggccaactgtatgcagcctgggatggtggcctggaccactgcagcccagggtggctagctgatggcagtgtgcgctaccccatcgtcacacccagccagcgctgtggtgggggcttgcctggtgtcaagactctcttcctcttccccaaccagactggcttccccaataagcacagccgcttcaacgtctactgcttccgagactcggcccagccttctgccatccctgaggcctccaacccagcctccaacccagcctctgatggactagaggctatcgtcacagtgacagagaccctggaggaactgcagctgcctcaggaagccacagagagtgaatcccgtggggccatctactccatccccatcatggaggacggaggaggtggaagctccactccagaagacccagcagaggcccctaggacgctcctagaatttgaaacacaatccatggtaccgcccacggggttctcagaagaggaaggtaaggcattggaggaagaagagaaatatgaagatgaagaagagaaagaggaggaagaagaagaggaggaggtggaggatgaggctctgtgggcatggcccagcgagctcagcagcccgggccctgaggcctctctccccactgagccagcagcccaggaggagtcactctcccaggcgccagcaagggcagtcctgcagcctggtgcatcaccacttcctgatggagagtcagaagcttccaggcctccaagggtccatggaccacctactgagactctgcccactcccagggagaggaacctagcatccccatcaccttccactctggttgaggcaagagaggtgggggaggcaactggtggtcctgagctatctggggtccctcgaggagagagcgaggagacaggaagctccgagggtgccccttccctgcttccagccacacgggcccctgagggtaccagggagctggaggccccctctgaagataattctggaagaactgccccagcagggacctcagtgcaggcccagccagtgctgcccactgacagcgccagccgaggtggagtggccgtggtccccgcatcaggtaattctgcccaaggctcaactgccctctctatcctactccttttcttccccctgcagctctgggtcacctgacctgtagtcctttaacccaccatcatcccaaactctcctgtcctttgccttcattctcttacccacctctacctatgggtctccaatctcggatatccaccttgtgggtatctcagctctccgcgtctttaccctgtgatcccagccccgccactgaccatctgtgacccttccctgccattgggccctccacctgtggctcacatctcgccagccccacagagcatcctcaggcctctccaagggtcctcatcacctattgcagccttcagggctcggcctattttccactactcccttcatccgcctgtgtgccgtcccctttagctgcctcctattgatctcagggaagcctgggagtcccttctcacccctcaacctccggagtccaggagaacccgtacccccacagagccttaagcaactacttctgtgaagtattttttgactgtttcatggaaaacaagccttggaaataaatctctattaaaccgc

SEQ ID NO: 23369 - DNA, 612 bp, Homo Sapiens
tccggttccggcctggcgagagtttgtgcggcgacatgaaactgcttacccacaatctgctgagctcgcatgtgcggggggtggggtcccgtggcttccccctgcgcctccaggccaccgaggtccgtatctgccctgtggaattcaaccccaacttcgtggcgcgtatgatacctaaagtggagtggtcggcgttcctggaggcggccgataacttgcgtctgatccaggtgccgaaagggccggttgagggatatgaggagaatgaggagtttctgaggaccatgcaccacctgctgctggaggtggaagtgatagagggcaccctgcagtgcccggaatctggacgtatgttccccatcagccgcgggatccccaacatgctgctgagtgaagaggaaactgagagttgattgtgccaggcgccagtttttcttgttatgactgtgtatttttgttgatctataccctgtttccgaattctgccgtgtgtatccccaacccttgacccaatgacaccaaacacagtgtttttgagctcggtattatatatttttttctcattaaaggtttaaaaccaaaaaaaaaaaaaaaaaaaaaaaaaaaaaaaaa

SEQ ID NO: 23370 - DNA, 1964 bp, Homo Sapiens
  misc_feature (1134)..(1134): n is a, c, g, or t
  misc_feature (1237)..(1237): n is a, c, g, or t
aagcttaagttgctcattaaacatttaacccataaatgttctaggcaatggttaacatatattgtttggaagaaatctgggaccaaatggtcactacagagctaaatcaatccttggcattcagtgatagggatgggcccagaaggtgctacgagctgtattaaactccttagtagcagggtgaatacagtaggtaaggaatacaaatgactaaaacttagcggtaggagatttcataagtagagtcaacaggagaaggctgaatgagatagagctagagactcagatttctgtctgtggtgacttggtggtgatgccatgtccctgaggaagcacatggaaggataatattttctttgaggcagaggtaggtgggaagagataatcttgagtttggatatgccgaactaaaggtgcctatgggttggtaagatacaaatatttattaagaattggagaaatatgggtccctataaagatcagggaatactcagggaatatttaggactgatttgggagtcttagttatatagataattgaaattttttgtattttattttttctatgagctttgtttatctttaaatgaaaatagtaattggaatattttatgtttatgcttttcgtatttagacatatgtcgccaacattctgattgcagtgaatccatactttgacatacctaaaatatattcttcagaagcaataaagtcatatcaaggaaaatctcttgggacaagaccacctcatgtctttgcaattggtaagtgattttaaatgtattttaattcttgtctttctttatattgtacaaatttactcaatttttcttttggattaataaaagataccataaattgaatatatattttgggagaaactgtatacctcttggatatatcaacattgttaggagcaagtattttacacagggtgaggaagaatacttttgtagtcaactaatggggcaggcttaccatacatcattatctgtgttaaatgcctgtgtcctctaagagatgtctgcccaggtgaaagcaggatataataaaagctgacctaatggtacttttagactttttaataccatcagctccatcttaaaattgtcctccttcacaattttgaggttntggccttcatctcttacccagctcatcccttatgagtgtgttacttgggctagatttcagctgtaagagcagacttstgggcatcatcttgcatcaggggttnataaaataaaaggattaaaagtagtaaatgcttcataccagtggagaatctatgtgggaagacagtagtgtctctttgcctttctcagcctcatttatatcgaagtcctccagctctgagtcatagaggttggaggttttagatcagaatgagcaattacccctcttcccaccaaatgcggaggtgttagctaaccctttgcattcagacataaagcagctaaatgacatgtattggaactagttcgtagtgcatcctgtttctctttgggctttcccttcatgcttgtgttttggcctaaccagagttcacttccagatttggttgacctgtatgttgtctgctactaggtagagtgaatatggctgacataattactctaccagggcagcagcagatttacttttggcttgaagaactatgacaggcatcgttgtgttgcagcctgcaaaacggtgccccatcccttagaacctgaatacgagcaaacatcactggagaaaagttacatgtttaaaatgtaaataaactagcttttatttttagctttttactgcgaaaaaacaagtgtttggaatgattctttaaaaatgtgtggagatgggtgtggtggcttatgcctgtaatccaagcacttcgggaaggcggatcgcttgagcctgggaagtcaagacagcctgggcaaacatgcaaaatcttgtctctataaaaaaaatgaaaaaattac

SEQ ID NO: 23371 - DNA, 3098 bp, Homo Sapiens
gactcggaagattcgaggcggcgggggacaagtcggcgccccagagcggacgagtcaccaggtgtcaagatgctgcaagtacataggactggactgggcaggctgggggtcagcctctccaagggtcttcaccacaaagctgtgttggccgtccggagggaggatgtgaacgcctgggagagaagggccccgctagctcccaagcacatcaaaggcatcaccaatctgggatacaaggtcttgatacagccttcgaatcggcgggccattcatgataaggactatgtcaaagctggtggcattcttcaggaggatatttctgaagcttgtctaattttaggagttaaaagacctccagaggaaaaattaatgtccaggaagacttatgcatttttctcccacacaataaaagctcaggaggccaatatgggcttgttggatgagattctaaaacaggaaattcgccttattgattatgagaaaatggtggatcatagaggagtacgggtagtggcatttggacagtgggctggtgtggcaggaatgatcaacattttacatggaatgggtttaaggctccttgctttgggacatcacacaccttttatgcacattggcatggctcataactacaggaatagcagtcaggctgtgcaagctgtccgtgatgctggctatgaaatatctttgggtttgatgcctaagtcaataggacccttaacatttgtgttcacaggaactggtaatgtttctaagggagcccaagcaatctttaatgagctaccttgtgaatatgtggagccccatgaattaaaagaagtttcccaaactggagacctcagaaaagtgtatgggacggtgttaagtcgtcatcatcatcttgtcaggaaaacagatgctgtgtatgatcctgcagagtatgacaaacatccggagcgctacataagtcgttttaatactgatattgcaccctatacaacttgcttaattaatggaatctactgggaacaaaacactcctcgcctcctaacccgccaagatgctcagagtctcctggctccgggcaagttctcacctgctggtgtggaaggctgccctgcattaccacacaaactcgtggcaatatgtgacatttcagctgacacaggagggtctatagagtttatgactgagtgtacaacaatagagcatcccttttgcatgtatgatgcagaccagcatattattcatgacagtgttgaaggctcggggatcctgatgtgttccattgacaatttgccggcacagctcccaattgaagctacagaatgctttggagacatgctttacccttatgttgaagaaatgatattatcagacgcgacacagcctcttgaaagtcagaatttttctcctgtggtgagagatgcagtgattacatccaacggtacattacctgataaatataaatatatccagacactccgggagagcagggaacgtgctcagtcactttcaatgggcaccaggagaaaggttttggttcttggatctggctacatatctgagcctgtattagaatatttatcaagagatggcaatatagaaataacagtaggatctgacatgaagaatcaaattgaacagttaggcaagaaatataatattaatcctgttagcatggacatttgtaaacaagaagagaagctgggcttcttggtggcaaaacaggatcttgtcatcagcttgttgccttatgtattgcaccctcttgtggccaaggcctgcatcacaaacaaagttaacatggtcactgcaagctacatcacaccagcactaaaagaattggaaaagagtgtggaagatgctggcatcacaatcattggtgaattgggattggaccctggtctggatcacatgttagcaatggaaacaatagataaagccaaggaagtgggagccacgattgaatcatatatttcctactgtggtgggcttccagcccctgaacattcaaacaatccattgagatataaatttagctggagtccagtgggagttttgatgaatgtaatgcagtctgccacctatctgctcgatggaaaggttgtgaatgttgcaggaggcatctcctttcttgatgccgttacgtccatggatttttttccaggattaaatttggaaggctatcctaacagagacagtacgaaatatgctgagatttatggcatttcttctgctcacactttgttgcgggggacactgagatataagggatatatgaaagctttgaatggatttgtaaaattaggtcttataaacagagaagcgcttcctgcctttagacctgaggccaaccctctcacctggaaacaactcctctgtgacctagttgggatttcaccctcctctgagcatgatgtgttgaaggaagctgttcttaagaaactaggaggagacaatacccagttggaggctgctgaatggttgggcttacttggggatgaacaagttcctcaggcagagtccattctggatgccctctccaagcatttggtcatgaagctttcctatggtcctgaagaaaaagatatgattgtgatgagagacagctttggaatcagacatccttctggacatttagaacataaaacgattgatcttgtggcttatggggacatcaatggcttttcagccatggctaaaaccgtggggttacccaccgccatggcagccaaaatgttgcttgatggtgaaattggagccaaaggcctaatggggcccttttcaaaggagatctatggaccaatattggagcgaattaaagcagaaggcattatatatactacacagagtacaattaaaccataattgggaattatattttgtttttttcttcccaggcaatacacctctgaacatgtgtgtgataaatgggtttgctaatgtgctgttttaaagtataaagcataatatgttttggttaacacaatgtactttttgaactataaatctttattttaatatggaaatgtttggaacaggagatgcaagccactaacagagaactttaataattctaccctgtattttataaatacgtatgtgaaagtgatgaa

SEQ ID NO: 23372 - DNA, 1817 bp, Homo Sapiens
gcggcagctggaggtgtaatagtgcgggtagtgggtttggagaagttccgaggcggcggtggcgccggtcaggacaaggatagcggaaccgggccctgggcttgtcgctcaccatgccgacagtagaggagctttaccgcaattatggcatcctggccgatgccacggagcaagtgggccagcataaagatgcctatcaagtgatattggatggtgtgaaaggtggtactaaggaaaagcgattagcagctcaatttattccgaaattctttaagcattttccagaattggctgattctgctatcaatgcacagttagacctctgtgaggatgaagatgtatctattcgacgtcaagcaattaaagaactgcctcaatttgccactggagaaaatcttcctcgagtggcagatatactaacgcaacttttgcagacagatgactctgcagaatttaacctagtgaacaatgccctattaagtatatttaaaatggatgcaaaagggactttaggtgggttgttcagccaaatacttcaaggagaggacattgttagagaacgagcaattaaattcctttctacaaaacttaagactttaccagatgaagtcttaacaaaggaagtggaagagcttatactaactgaatccaaaaaggtcctagaagatgtgactggtgaagaatttgttctatttatgaagatactgtctgggttaaaaagcttacagacagtgagtggaagacagcaacttgtagagttggtggctgaacaggccgacctagaacagaccttcaatccctcggatcctgactgtgtggacaggctcttacagtgcactcggcaggcagtacccctcttctctaaaaatgtccattccacaaggtttgtgacatatttctgtgagcaggttctccctaacctcggtaccttgactaccccagtggaaggtcttgatatacagttggaggtattgaaattgttggcggagatgagttcattttgtggtgacatggaaaaactagaaacaaatttaaggaaactatttgataagttattggaatacatgcccctccctccagaagaggcagaaaatggagagaatgctggtaatgaagaacccaagctacagttcagttatgtggaatgtttgttgtacagttttcaccagttgggccgaaaacttccagatttcttaacagccaaactgaatgcagaaaagctcaaagatttcaaaatcaggctgcagtactttgcacggggcctgcaagtttatatcagacaacttcgcttagctctccagggtaaaacgggtgaggccttaaaaacagaagagaacaagattaaagtcgttgcattgaaaataacaaacaatatcaatgttttaatcaaggatctcttccacattcctccttcttataagagcacagtaacactatcctggaaacctgtacaaaaggttgagattgggcaaaagagagccagtgaagatacaacttcaggttcaccacccaagaaatcttcagcaggaccaaaaagagatgccaggcagatttataaccctcccagtgggaaatatagcagcaatttgggcaactttaattatgagaggagccttcaggggaagtagaggtggccgaggttggggcacacgaggaaatcgtagtcggggaagactctactgaataagacatcagcattcttcagcattgtcatgagcttaatatacttaaattctactactcattggattgccggggatgtccctttaaacagactgctgccttcagctaaaaacttaatgttctttatacctttg

SEQ ID NO: 23373 - DNA, 874 bp, Homo Sapiens
agccggagccgtggcctgcggggccggcgacatggatcccctgttccagcaaacgcacaagcaggtccacgagatccagtcttgcatgggacgcctggagacggcagacaagcagtctgtgcacatagtagaaaacgaaatccaagcaagcatagaccagatattcagccgtctagaacgtctggagattttgtccagcaaggagccccctaacaaaaggcaaaatgccagacttcgggttgaccagttaaagtatgatgtccagcacctgcagactgcgctcagaaacttccagcatcggcgccatgcaagggagcagcaggagagacagcgagaagagcttctgtctcgaaccttcaccactaacgactctgacaccaccataccaatggacgaatcactgcagtttaactcctccctccagaaagttcacaacggcatggatgacctcattttagatgggcacaatattttagatggactgaggacccagagactgaccttgaaggggactcagaagaagatccttgacattgccaacatgctgggcttgtccaacacagtgatgcggctcatcgagaagcgggctttccaggacaagtactttatgataggcacccaaggatcctgccagacagcacactttggaggaaggtctgcagggagcagctgagccatttgttcttgaactctgggaggcagaagtccccgcacccatcatgcgtggactgataggacatcttttcgtggtgtgcaccagtgctttccacacttgacagtggttggctttgatgaaccctcatgctgcaccttcagagccagtcctctagtttggaataaaaattgcagaggtggaaaaaaaaaaaaaaaaaaa

SEQ ID NO: 23374 - DNA, 2677 bp, Homo Sapiens
cagcgttccggatcctagacgctttttgacggctggtcctccccagaaaatgcgccgtgtgagcccaaacatggtggggtttacgctggaccccgagcttgcaatctgtgcttgacaaaacacaaacatcgcgtgcctgtctcctccccctgagatcgagtagtaacagccactccaactctccacctccagcttctagcaccagggaccgcctccaccaccccatgtgccaagtggagttcgagctgcgcggccctcaagcagctgaagggtcccgtgagcgatcaggagaagctgctggtctacggcttgtacaaacaggccacccagggcgactgcgacatccccggccctccggcctcagacgtgagagccagggccaagtgggaggcttggagcgcgaamaaaggggcgtccaagatggacgccatgaggggctacgcggccaaagtggaggagctgacgaagaaggaagtggggggcgtggagcgcgaacaaaggggcgtgcaagatggacgccatgaggggctacgcggccaaagtggaggagctgacgaagaaggaagtggggggcgtggagcgcgaacaaaggggcgtccaagatggackccatgakgggctacgcggccaaagtggaggagctgacgaagaaggaagtggggggcgtggagcgcgaacaaaggggcgtccaagatggacgccatgaggggctacgcggccaaagtggaggagctgacgaagaaggaagtggggggcgtggagcgcgaacaaaggggcgtccaagatggacgccatgaggggctacscggccaragtgaggagatgaggaagaaggaggctggctgagggctcctcgggaatggaaagggcttcttagaccttgatggctgaaatgtcctgaaactgtcgcaagcttagccgagacatcaataaatcacttaaactgcatgagagtgactgctgttggaaaggagaaactcggtgactgagtgctggggaggcgtccaaatacacagactaactttttgtatggttttgggtggagttcccagctctcctattacaagagcgtatgtaggtatttggaaggacgagggggacagtgtgctgtggaaatgcccaagatctgagggcaggagaccattctccagtgacagcctcttgggaggttgaggccccagccccttatctcttcaaggctgatttactaataccccagcaccacagaggggagagggactctgtcctcctaaacactaaagtcaagtccaaaagcccccactggaacacagggcctacccggttcatgttttgagggagaccaagctttccgtgatgataatgtgatgaaacaattgatgcgccagaacacagcagtttagaaacaatggagcagatggtgtcaaaatcccagccccagaaaggctcacctaaggccgggcaaccaaaatgttcccgggactattctgtacttaaccctggtttctgcttaggggacggtgggacaatatgcatatggatgtctatgtgggatttgttgcaagagcacaacacaccccttgacctatgcaagtgccagagtgtctgagcccagcttctactcctgttaatgatcacaggagcctcatacacaaccattgtgcatggcggctggagtatggagtagtaaatggtatccagaaaggcaggtctacggtggcatatgggatttcctggtacttcttctttaatagaaactatcttcacagatcatgacatcaggtcagctgcagttctcactgggaccaataaacaatagaagcamcaaccataaagacttaagaggacaaaggaaaccaaacctcactgtgtgtcttcaagatctgttcacatagttgcaggaagttgctgtagacaaagtacattactaaagaatgaagcccacccaggacatcacagcaacgaaagaactatttctggtaactgtggaccaggtgagagccacactgtagaacagcagtgctgccctctcttctttggcgaatgttatgaagacattctgatgcacttaggatcatgattcatgttaaatgtaaattaattgtaaaaataatacatcttgctccaaaatgtggtgacaatttagaagctgtccacatagccagaccactctgtaaatcacagaacctagaaagtaaaaatgtgccataattaggacagcagaaagtaacagtaaaataaagttttaaaaaaaaaaacagaaaataaggatttatctatttgtatttgcttaagaagaggttacctataggatgcagggggaatgggattgatgggcatggggtatactgtgaaaggaaaataaaatcttgggaccaaattcactaagcgaaaaggaaaagttaagcttgggaattgagtcatggaatatgcaaaaaacttccttttgttcctaaacagataaggtacaagacaaaaggccacaaatctctccaggtggtttccctcacctgacaatataaattaacagcttatcttcataggtaagggacaaagacaacaccagaaaccatccctcaccagccgagacaaaacatagatgtactgagctgaaagcaaaactgttcctctgcctgctgctttcactgtaacatatagatttggtgagcagtaaatgtagatttactgagctgaatgc

SEQ ID NO: 23375 - DNA, 5549 bp, Homo Sapiens
caacccaccgtgttctttgacatcaccatcaacagcaagcccttgggccacgtctccttcaagctgtttgcagacaagtttccaaagacggcagaaaactttcctgctctgagcactggagagaaagggtttggttataagagttcctgctttcacagaattattccagggtttatgtgtcagggtggtgacttcacacaccataatggcactggtgtcaagtccatctatggggagaaatttgatgatgagaacttcattctgaagcatacaggtcctggcatcttttccatggcaaatgctggacccaacacaaatggttcccagttttgcaactgcactgccaagactgcgtggttggatggcatgcatgtggtccttggcaaagtgaaagaaggcatgaatattgcggaggctatggagcgctttgggtccaggaatggcaagaccagcaagaagatcaccattgccgactgtggacaactctactaagtttgacttgtgttttatcttaaccaccagatcattccttttgtagctcaggagagcaccctccacctcatttgctcacagtagcctctaatctttgtgctatctctcagttccctttgggttccatgtttgccttattctcctccatgcctagctgggtttcagagttaagtttatgattatgagataaaaactaaataacaactgcaaaaaagtaaaataaaaagaaagaagaggctgggagcggtggctcactcctctaatcccagcactttgggaggccgaggtgggcctaccaaaggtcaggagatcgagaccaccctggctaacacggtgaaatcccatgtctactaaaaatacaaaaaaaattagccaggcgtcgtggcgtgcacctgcggtcccagctactcggaaggctgaggcagaggaatggcgtgaacccagggggtggagcttgcagtgagccgagatcgcaccactgcactccagcctgggcaacagagcaagactctatctcaaaaaaaaaaaaaaaagacggaaaaggcattatatatttgtgaagacatggacagaaatgtgtcctgattgtggtgccacaaagcactgagcctactagaagacgtcagcaaaagatcccctgaaaagtgactccaagccattcactgcaagggatggttacacagatgcagaatacagaaggtcaatagtagcttaatgctacatcacagcttaacactacatcatccacctcacttcctctcaccccatcgtatcgtgtcactgtgctcaccatcacaagaacagggaggatagcacaggaagatattctgacagagaaagagagagaccacatttacataacttttattacagtatattgttataattgttctattttattattagttattgctaatctcttactgcacctaatttataaattaaaccttgttattggtatgtatgtatagaaaaaaatatagtgtatatagggcttggtactttcttcaatttcaggcatccattgagagtcttggaatgtacccactgaggataagggggggctgctgtacatactttgcaaatatcttctctcatcccatgggttgtctttccattttctttctttctttttttgagacggagttttgctcttgttgcccaggctggagtgcagtggcacaatctcggctcaccacaatctctgcctcccgggttcaagcgattctcctgcctcagcctcccgagtagctgggattacaggcatgaaccaccacgcctggctaatttttgtatttttagtagagatggggtttctccatattggccagcctggtctcgaactcccgacctcaggcgatctacccacctcggcctcccaaagtgctgggattacaggtgtgagccactgtgcctggccgtcttttcattttcttgatggtgtcattgaagcacaaaagttttaaattttgatgaagaccaatttatctgttttttctttcatcacttatgcttttggtgtcatatctaagaaaccattgactaatccaaggtcacaaagatttattgcctatgttttcttctaaaagttttatgattttagttcttacatcaaggtctattttaagtcttttgttttgttttttgttttttgttttgagacagggtcttactctgtcacccaggctggagtgcagaggcacaatcatggctcactgcagcctcaacctcttggcctcaagcaatcctcccacttcagcctcccaagtagctggtattatagacatgcgcaaccatgcccagctaatttttttgtagagatagggtttcaccatattgcccagactggtctcaaactcctaagctccagtgatccgcccacctcagcttcccaaagttctgggattataggcatgagccactgcacccagccccaaattttgtatatggtattagaaaggggtccaacttcattcttttacatgtggaaatccaattgccccagcaccatttgttaaaaatattttctttcccatttaattgtcctagtgttcttgtcaaaaacaattgaacataattgtatgggttcatttctggactcccaattctattccattgttgagcatatttttaagggctgtttttctctcctgtggtaactggtgacctgtacttcctggaagagagatgaaaagattcccaagccaactgagttacctcacgtgggtcaggtctctgtgactctctgcactggcctattcataatgatatcctcctgcaggatttgagccttctcctttgttgtgacggcagccgaggaggtggctgactgcccagacagccttatctctttcctacctttcaaggttattgtaaataccaaattagattgtttatacacaagaatttagcactaaagcactatacaaatgtaagctatttatttctatttatccttctccttcatgaataagaccctaaaaatagaagatatttttaatttttactcactgggctcaaggttgcagtgtctgtattattgcaaattccaaattaatgaagtctggctcttcttatattattcctgcaaaaggctgtgtgctcaccccccggagtgtgaatacgagtgtgggtcatttcctctttcctctgcacccttccttcgatgaggttttgccctgtgctaggcaccatgcaaaactctgagaaaaccgcagagaacaaggcagacgccatccctgccctccagtaacatacaatttagtgatgaagctgggggatttaacaagccattctaataaagcgttacagtgagggaggtgcagggtgatgcctccagcagccctggtgtcagctgctccaggtccaggggaagacttccattatcttccaaccctgtcggaagtggaggcggaggctgtttattgctgacacagtccctaacccagggtctatagacattgtggaaatgccttggagtcagacgggagaatgaaccagcagaagcaatgcccgccctccaccctcctgaagagggttctcaggaactctttggaggcgaggccagcctctggctgagggcctctggatacaggttaggcctcaggctcttctcctctctactcatctctcctcccttggcccctccttcagaggctgacagagccccactctcatctcttccccgcccaagcctctttccacagaaagactgcttcctcccaggagacagcagctcattcgcacacagacacccacagccctcaaagcctggaaggccaagctgttaggacccctgagagcagggtggctcctgggaggagagcccaggccaccaccttgccctccctggcccctggccttcgatggggctgctctgatcacaaacgtccaccaacgtagccggcccagaagtgcacccatgtcctctggtatccactggctctccaagccaaactgggcagggaggagttgtgagggaaaactgcaggtcaggagggaggctggcaaagcgggccagggccaggcctgaccccagctctcctttcccggccccactgccggccagtgtttaacaaggccctgccttctccctctagtgctagggacagccaccttcttcctctccccaccgccccctctcccctgcaacacgtcatctgacaagtcagtgcgatctcactggaggtgcatctcacaggaacgcggggtcacggcctcctgcacacactccatgctgcacagcaaggtgcacgtgtccctcagagccccagacaccatcccccactcacccagaagcccaagtgattcccaacagcccccagcagcctaatgggttggggtcttgggagcagctgtccctggctccttccctgatcccaccgcccagcctcaccccacggttcctccattgccccacctcccactgcgccgccgggcctctgccagggtcaaggggcttcccccctctggcagcagacgccatggtgccgaggtggcctccacaaccgccctgtgcgccaataggacaagactgtcctccctcccccacacttgtcactttgagggacacgtggatgagacaggaaaacacaggggagtgtggagacctgaggtgacttggagcaagcctctcaacctgagcggcaatttcttcatctgtaaaatgagggggttgttctcatctctgaggctttgtgtcgctctcaaagcctgctagcctcgggttctaggactctgttgggatcgtgtgtgatgttttctgctgagcgactggcagcctgtgtcctcggggggaaagagggcaggcgctccaaagctcctgcgctctgtggctccccctccctcgcagccccaagccccaggtgtgccggccgccctgagcccctccagcacctcccggaggcgcctgcaagacacctaaggtccccgcctccctcctctcccccccgccacacccctacccccggcaggcgacgtccccgcccctcgaccatggcctggtgaagaagccggccaggcccgatcagccccatccccgccgcacgagcggcgcctgcggacagctcctggggccccggccttgtcactccggaggcgggaggctccggggggtcgggctgggaagatcgagccggaggccgctaggctcccaggccccggccgaggctgcgcggccgcacggtgggcaggctcgggtgttccggcaaactgccgggtccccatcttctaaagagaggaggccctttctccagcttcctctgcgggagcccgacccagccccatcccgccacccccgggctgcacctcggcccctccccggcccgcgcccctgcccggggcgggccaggaacctcggcccgcgccgctggggactctggagcggaggaggaagcgcggcggggcgggggcgggggtgtgtcgggttttataacccgcagggcggccgcggcgcaggagaaggggcagagccgagcaccgcgcaccgcgtcatgggggccgcctcgggccgccgggggccggggctgctgctgccgctgccgctgctgttgctgctg

SEQ ID NO: 23376 - DNA, 679 bp, Homo Sapiens
  misc_feature (634)..(634): n is a, c, g, or t
  misc_feature (652)..(652): n is a, c, g, or t
cgggtaaggagggaaaaagtaaatgaagttccaggaatgtcattctgaagtaatgaggcatggacagaaaatatacccctcacatcatcggattgagatggcagtcgaaatagcttcattgaagtgccagcactcatccatcaatcaatcacccacaaggaaaaatagcaacagtacaacggggtggcttttatgggatttactcatgggcatagggaatagcggctcaaatgtagttctgacatgaaaagcaaggtgctgatattattttttatgatgggaggatcataaagtgaattgagaacagtgaggtctgtctttgcttaacctattcaaccagaaatgaatggagctcgactggaaaggaacagtcttcagatgggttaagattgaagggtggactggactctactgagcaccgtccttcaacaaggaaattctattaaaggaaaatcaatgcattagtattggggttcttgtagcttgttaaaaattgtctgctccaatccagggttattaggccaaagttacataattcagatctcactgcaaccatccaaaagtggattctcgagcccttgctccaatggggggaggagatcaatacaattccccaatttccatggaaaatttntttcccttcttaaggaangaaaaaataaatcatcctgctttcaac

SEQ ID NO: 23377 - DNA, 5693 bp, Homo Sapiens
ggctagctgcagaggcaccggacgagagagggctccgcgggcccagctggcagccaggccggagacaagttgcagtcccgggctctggtgacgccgtggccgcagctggaagaggaaaacaaggatcagattggagaagtgatttatctaagatcccacagtggactgggagcagcactgagacctcagcctagtctcctgatccccaagcagggccctgcctaaggaacacactctgcagagtgctgggccaaagcagggttttccaactaatcttagaaggtaaagtccatgaagggtctccattttgggacattctaatccctgagcccctattattttcatcatgggcttctgcctggctctagcatggacacttctggttggggcatggacccctctgggagctcagaaccccatttcgtgggaggtgcagcgatttgatgggtggtacaacaacctcatggagcacagatggggcagcaaaggctcccggctgcagcgcctggtcccagccagctatgcagatggcgtgtaccagcccttgggagaaccccacctgcccaacccccgagaccttagcaacaccatctcaaggggccctgcagggctggcctccctgagaaaccgcacagtgttgggggtcttctttggctatcacgtgctttcagacctggtgagcgtggaaactcccggctgccccgccgagttcctcaacattcgcatcccgcccggagaccccatgttcgaccccgaccagcgcggggacgtggtgctgcccttccagagaagccgctgggaccccgagaccggacggagtcccagcaatccccgggacccggccaaccaggtgacgggctggctggacggcagcgccatctatggttcctcgcattcctggagcgacgcgctgcggagcttctccaggggacagctggcgtcggggcccgaccccgcttttccccgagactcgcagaaccccctgctcatgtgggcggcgcccgaccccgccaccgggcagaacgggccccgggggctgtacgccttcggggcagagagagggaaccgggaacccttcctgcaggcgctgggcctgctctggttccgctaccacaacctgtgggcgcagaggctggcccgccagcacccagactgggaggacgaggagctgttccagcacgcacgcaagagggtcatcgccacctaccagaacatcgctgtgtatgagtggctgcccagcttcctgcagaaaacactcccggagtatacaggataccggccatttctggaccccagcatctcctcagagttcgtggcggcctctgagcagttcctgtccaccatggtgccccctggcgtctacatgagaaatgccagctgccacttccagggggtcatcaatcggaactcaagtgtctccagagctctccgggtctgcaacagctactggagccgtgagcacccaagcctacaaagtgctgaagatgtggatgcactgctgctgggcatggcctcccagatcgcagagcgagaggaccatgtgttggttgaagatgtgcgggatttctggcctgggccactgaagttttcccgcacagaccacctggccagctgcctgcagcggggccgggatctgggcctgccctcttacaccaaggccagggcagcactgggcttgtctcccattacccgctggcaggacatcaaccctgcactctcccggagcaatgacactgtactggaggccacagctgccctgtacaaccaggacttatcctggctagagctgctccctgggggactcctggagagccaccgggaccctggacctctgttcagcaccatcgtccttgaacaatttgtgcggctacgggatggtgaccgctactggtttgagaacaccaggaatgggctgttctccaagaaggagattgaagaaatccgaaataccaccctgcaggacgtgctggtcgctgttatcaacattgaccccagtgctctgcagcccaatgtctttgtctggcataaaggagacccctgtccgcagccgagacagctcagcactgaaggcctgccagcgtgtgctccctctgttgttcgtgactattttgagggcagtggatttggcttcggggtcaccatcgggaccctctgttgcttccctttggtgagcctgctcagtgcctggattgttgcccggctccggatgagaaatttcaagaggctccagggccaggaccgccagagcatcgtgtctgagaagctcgtgggaggcatggaagctttggaatggcaaggccacaaggagccctgccggcccgtgcttgtgtacctgcagcccgggcagatccgtgtggtagatggcaggctcaccgtgctccgcaccatccagctgcagcctccacagaaggtcaacttcgtcctgtccagcaaccgtggacgccgcactctgctgctcaagatccccaaggagtatgacctggtgctgctgtttaacttggaggaagagcggcaggcgctggtggaaaatctccggggagctctgaaggagagcgggttgagcatccaggagtgggagctgcgggagcaggagctgatgagagcagctgtgacacgggagcagcggaggcacctcctggagacctttttcaggcaccttttctcccaggtgctggacatcaaccaggccgacgcagggaccctgcccctggactcctcccagaaggtgcgggaggccctgacctgtgagctgagcagggccgagtttgccgagtccctgggcctcaagccccaggacatgtttgtggagtccatgttctctctggctgacaaggatggcaatggctacctgtccttccgagagttcctggacatcctggtggtcttcatgaaaggctctcctgaggaaaagtctcgccttatgttccgcatgtacgactttgatgggaatggcctcatttccaaggatgagttcatcaggatgctgagatccttcatcgagatctccaacaactgcctgtccaaggcccagctggctgaggtggtggagtccatgttccgggagtcgggattccaggacaaggaggaactgacatgggaagattttcacttcatgctgcgggaccacaatagcgagctccgcttcacgcagctctgtgtcaaaggggtggaggtgcctgaagtcatcaaggacctctgccggcgagcctcctacatcagccaggatatgatctgtccctctcccagagtgagtgcccgctgttcccgcagcgacattgagactgagttgacacctcagagactgcagtgccccatggacacagaccctccccaggagattcggcggaggtttggcaagaaggtaacgtcattccagcccttgctgttcactgaggcgcaccgagagaagttccaacgcagctgtctccaccagacggtgcaacagttcaagcgcttcattgagaactaccggcgccacatcggctgcgtggccgtgttctacgccatcgctggagggcttttcctggagagggcctactactacgcctttgccgcacatcacacgggcatcacagacaccacccgcgtgggaatcatcctgtcgcggggcacagcagccagcatctctttcatgttctcctacatcttgctcaccatgtgccgcaacctcatcaccttcctgcgagaaaccttcctcaaccgctacgtgcccttcgacgccgccgtggacttccatcgcctcattgcctccaccgccatcgtcctcacagtcttacacagtgtgggccatgtggtgaatgtgtacctgttctccatcagccccctcagcgtcctctcttgcctctttcctggcctcttccatgatgatgggtctgagctcccccagaagtattactggtggttcttccagaccgtaccaggcctcacgggggttgtgctgctcctgatcctggccatcatgtatgtctttgcctcccaccacttccgccgccgcagtttccggggcttctggctgacccaccacctctacatcctgctctatgtcctgctcatcatccatggtagctttgccctgatccagctgccccgtttccacatcttcttcctggtcccagcaatcatctatgggggcgacaagctggtgagcctgagccggaagaaggtggagatcagcgtggtgaaggcggagctgctgccctcaggagtgacccacctgcggttccagcggccccagggctttgagtacaagtcagggcagtgggtgcggatcgcttgcctggctctggggaccaccgagtaccaccccttcacactgacctctgcgccccatgaggacacgcttagcctgcacatccgggcagcagggccctggaccactcgcctcagggagatctactcagccccgacgggtgacagatgtgccagatacccaaagctgtaccttgatggaccatttggagagggccaccaggagtggcataagtttgaggtgtcagtgttagtgggagggggcattggggtcaccccttttgcctccatcctcaaagacctggtcttcaagtcatccgtcagctgccaagtgttctgtaagaagatctacttcatctgggtgacgcggacccagcgtcagtttgagtggctggctgacatcatccgagaggtggaggagaatgaccaccaggacctggtgtctgtgcacatctacatcacccagctggctgagaagttcgacctcaggaccactatgctgtacatctgtgagcggcacttccagaaggttctgaaccggagtctattcacaggcctgcgctccatcacccactttggccgtcccccctttgagcccttcttcaactccctgcaggaggtccacccccaggtccggaagatcggggtgtttagctgtggcccccctggcatgaccaagaatgtggaaaaggcctgtcagctcatcaacaggcaggaccggactcacttctcccaccattatgagaacttctaggccccttcccgggggttctgcccactgtccagttgagcagaggtttgagcccacacctcacctctgttcttcctatttctggctgcctcagccttctctgatttcccacctcccaaccttgttccaggtggccatagtcagtcaccatgtgtgggctcagggacccccaggaccaggatgtgtctcagcctggagaaatggtgggggggcagtgtctagggactagagtgagaagtaggggagctactggtttggggcaaagtgaaacctctgcttccagacttcagaaacaaatctcagaagacaagctgacctgacaagtactatgtgtgtgcatgtctgtatgtgtgttggggcgttgagtgtaaggatgcagtgggagcatggatgctggcatcttagaaccctccctactcccatacctcctcctcttttgggctccccactgtcagacgggctggcaaatgccttgcaggaggtagaggctggacccatggcaagccatttacagaaacccactcggcaccccagtctaacaccacaactaatttcacccaaggttttaagcacgttctttcatcagaccctggcccaatacctatgtatgcaatgctcctcagccctcttctccctgctccagtagtctcccttccaaataaatcacttttctgccttaaaaaaaaaaaaaaaa

SEQ ID NO: 23378 - DNA, 6410 bp, Homo Sapiens
acctgcacagtggcgagaccaaggacccagagagaaaggtgagagtgcagccggggaggctgaggatcggcggagctggaagagtgagggtgaaggcaagaagtagagcacagaagcaaagattttaagaggaaagaagacatctgaacccaacaccaccctaaaccacaggctgcagggttggcatgctccgtgcaagaccagaggcactgatgctcctgggagctcttctgactggatccctgggtccatcgggcagtcaggacgcactctcactgccctgggaagtgcagcgctatgacggctggtttaacaacctgaggcaccacgagcgtggtgctgttggctgccggttgcagcgccgcgtaccagccaattacgccgacggtgtgtatcaggctctggaggagccgcagctgcccaacccgcgccggctcagcaacgcagccacgcggggcatagccggcctgccgtcgctccacaaccgcaccgtactgggggtcttctttggctaccatgttctttccgacgtggtgagcgtggaaacgcccggttgccccgccgagttcctcaacatccgcatcccacctggagaccccgtgttcgaccccgaccagcgcggggacgtggtgctgcccttccagaggagccgctgggaccccgagaccggacggagtcccagcaacccccgggacctggccaaccaggtgacgggctggctggacggcagcgccatctatggctcctcgcactcctggagcgacgcgctgcggagcttctcggggggacagctggcgtcggggcccgaccccgctttcccccgagactcgcagaaccccctgctcatgtgggcggcgcccgaccccgccaccgggcagaacgggccccgggggctgtacgccttcggggcagagagagggaaccgggaacccttcctgcaggcgctgggcctgctctggttccgctaccacaacctgtgggcgcagaggctggcccgccagcacccagactgggaggacgaggagctgttccagcacgcacgcaagagggtcatcgccacctaccagaacatcgctgtgtatgagtggctgcccagcttcctgcagaaaacactcccggagtatacaggataccgtcctttcctagaccccagcatctccccggaatttgtggtggcctctgagcagttcttctctaccatggtgccccctggtgtctacatgagaaatgccagctgtcatttccggaaggtcctgaacaagggttttcaaagctcccaagctctcagggtctgcaacaactactggattcgggagaaccccaatctgaacagtacccaggaggtgaatgagctgctgctgggaatggcctcccagatttcggagttggaggacaacatagtggttgaagatctgagggattactggcctggccctggcaaattctcccgtacagactatgtggccagcagcatccaacgtggccgagatatggggctgcccagctatagccaggccctgctggcctttgggctggacatcccaaggaactggagtgatctcaaccctaatgtggacccccaggtgctggaggccacagctgccctgtacaaccaggacctatcccagctagagctgctccttggcgggctcctggagagccatggggaccctggacccctgttcagtgccattgtcctcgaccagtttgtacggctgcgggatggtgaccgctactggtttgagaacaccaggaatgggctgttctccaagaaggagattgaagacatccgaaataccaccctgcgggacgtgctggtcgctgttatcaacattgaccccagtgccctgcagcccaatgtctttgtctggcataaaggtgcaccctgccctcaacctaagcagctcacaactgacggcctgccccagtgtgcacccctgactgtgcttgacttctttgaaggcagcagccctggttttgccatcaccatcattgctctctgctgccttcccttagtgagtctgcttctctctggagtggtggcctatttccggggccgagaacacaagaagctacaaaagaaactcaaagagagcgtgaagaaggaagcagccaaagatggagtgccagcgatggagtggccaggccccaaggagaggagcagtcccatcatcatccagctgctgtcagacaggtgtctgcaggtcctgaacaggcatctcactgtgctccgtgtggtccagctgcagcctctgcagcaggtcaacctcatcctgtccaacaaccgaggatgccgcaccctgctgctcaagatccctaaggagtatgacctggtgctgctgtttagttctgaagaggaacggggcgcctttgtgcagcagctatgggacttctgcgtgcgctgggctctgggcctccatgtggctgagatgagcgagaaggagctatttaggaaggctgtgacaaagcagcagcgggaacgcatcctggagatcttcttcagacacctttttgctcaggtgctggacatcaaccaggccgacgcagggaccctgcccctggactcctcccagaaggtgcgggaggccctgacctgcgagctgagcagggccgagtttgccgagtccctgggcctcaagccccaggacatgtttgtggagtccatgttctctctggctgacaaggatggcaatggctacctgtccttccgagagttcctggacatcctggtggtcttcatgaaaggctccccagaggataagtcccgtctaatgtttaccatgtatgacctggatgagaatggcttcctctccaaggacgaattcttcaccatgatgcgatccttcatcgagatctccaacaactgcctgtccaaggcccagctggccgaggtggtggagtctatgttccgggagtcgggattccaggacaaggaggagctgacatgggaggattttcacttcatgctgcgggaccatgacagcgagctccgcttcacgcagctctgtgtcaaaggtggaggtggaggtggaaatggtattagagatatctttaaacaaaacatcagctgtcgagtctcgttcatcactcggacacctggggagcgctcccacccccagggactggggccccctgccccagaagccccagagctgggaggccctggactgaagaagaggtttggcaaaaaggcagcagtgcccactccccggctgtacacagaggcgctgcaagagaagatgcagcgaggcttcctagcccaaaagctgcagcagtacaagcgcttcgtggagaactaccggaggcacatcgtgtgtgtggcaatcttctcggccatctgtgttggcgtgtttgcagatcgtgcttactactatggctttgccttgccaccctcggacattgcacagaccaccctcgtgggcatcatcctgtcacgaggcacggcggccagcgtctccttcatgttctcttatatcttgctcaccatgtgccgcaacctcataaccttcctgcgagagactttcctcaaccgctatgtgccttttgatgccgcagtggacttccaccgctggatcgccatggctgctgttgtcctggccattttgcacagtgctggccacgcagtcaatgtctacatcttctcagtcagcccactcagcctgctggcctgcatattccccaacgtctttgtgaatgatgggtccaagcttccccagaagttctattggtggttcttccagaccgtcccaggtatgacaggtgtgcttctgctcctggtcctggccatcatgtatgtcttcgcctcccaccacttccgccgccgcagcttccggggcttctggctgacccaccacctctacatcctgctctatgccctgctcatcatccatggcagctatgctctgatccagctgcccactttccacatctacttcctggtcccggcaatcatctatggaggtgacaagctggtgagcctgagccggaagaaggtggagatcagcgtggtgaaggcggagctgctgccctcaggagtgacctacctgcaattccagaggccccaaggctttgagtacaagtcaggacagtgggtgcggatcgcctgcctggctctggggaccaccgagtaccaccccttcacactgacctccgcgccccatgaggacacactcagcctgcacatccgggcagtggggccctggaccactcgcctcagggagatctactcatccccaaagggcaatggctgtgctggatacccaaagctgtaccttgatggaccgtttggagagggccatcaggagtggcataaatttgaggtgtcagtgttggtgggagggggcattggggtcaccccctttgcctccatcctcaaagacctggtcttcaagtcatccttgggcagccaaatgctgtgtaagaagatctacttcatctgggtgacacggacccagcgtcagtttgagtggctggctgacatcatccaagaggtggaggagaacgaccaccaggacctggtgtctgtgcacatttatgtcacccagctggctgagaagttcgacctcaggaccaccatgctatacatctgcgagcggcacttccagaaagtgctgaaccggagtctgttcacgggcctgcgctccatcacccactttggccgtccccccttcgagcccttcttcaactccctgcaggaggtccacccacaggtgcgcaagatcggggtgttcagctgcggccctccaggaatgaccaagaatgtagagaaggcctgtcagctcgtcaacaggcaggaccgagcccacttcatgcaccactatgagaacttctgagcctgtcctccctggctgctgcttccagtatcctgccttctcttctgtgcacctaagttgcccagccctgctggcaatctctccatcagaatccaccttaggcctcagctggagggctgcagagcccctcccaatattgggagaatattgacccagacaattatacaaatgagaaaaggcaggagactatgttctacaattgcagtgcatgatgattataagtccacctgtttatcaacggcaccattcctgcagccctccagacttcctgcccttagcaagtgcgcaaccagtcaggatctcccaaagaagataaagaccactcctcaccccagctcaagccatggcaggcgtggcaagcaaagtggggaggagacagtccctgcttgtgacaagtgtggaggtgaaaaggtacaatagtgcttgtctccgatagctccccacatctctaattgacttccacaaaatcgatgcgttgctttggtatttgcttggactgacatttgagggaggaggaggctgggatcctctggctgagaatctcctcagagcccagtgcagaagctgtgatgcttagaacctggacagcccgactgcctcaactctgtctccaggtctattccctccagctccaaaaggagcagccctacttctaccccttcccgtccccaaagtgtcagcaactttgaggagggcaccaggaaacaaagatgcctccccagccctgatattcttgatgtcaccagtgatacccactgccctgacccctgggcaggcccctctctgcatctactggagtggtccctgggctctggggctgaaggattccagcctctctgccagatattcagtactcgatctcaattcccctcttccacaagagttgggtgaccagctgtcctagtttgcccaggactctccctgttttagcactgaaagtctcttgccccaggaaaccccatcagtcccaggcagattgggacagctggtcaccttacgcaagagccaggctgaaacatcccctccatactcagctctttaacttttcttttcctttttcatcgggctctttcctaaaaagctgagctgtaaaatattttacatcgaggtataataaataatcatgtacatgttttaccaccacccaggtcaagacatagaatgtttcaacatttccatcaccccagaaactccccttgtacccccttccacttcgtctcccctagctcctagaagcaaccactgatgtgatttctaccaaatccagttttggtcctactaaatatactcttttgagactggcctcttttactcaccataatgcctttgtaattcatccatgctgttgtgtgtatcagcagtttgttccttttcattgctgagtagtattctattgtagagatgtaccacagtttgtttattcttctgttgatggacgtttgggttgtttctaattttgaatgattataaataaaaattctgtgagtgttcttgtaaaaaaaaaaaaaaaaaaaaaaaaaaaaaaaaaaaaaaaaaaaaaaaaaaaaaaaaaaaaaaaaaaaaaaaaaaaaaaaaaaa

SEQ ID NO: 23379 - DNA, 11956 bp, Homo Sapiens
agcgaaccatcggggcggccgggagccatgttggagcggcgggaggcggcagcagcgtcggggatgctgtggtgggggcggaaaaagccagggccgcacgccggaggggctccggccgcggagtagatggtgcccagagggcggcgggggtgcggagagacaggcggaggggcgggggcccggggcggcggcaggggcccgggagggggcccgagcggcggggccagcccaaggcccggaccggggcggggggcggtggaggccgtgcagggaggcgggagatgatggcgaggcggccgccgtggcggggcctcggggaacggtcgacccccatactcctgctccttctcctctctttgttccccctcagccaggaggagctggggggcggtgggcaccagggctgggacccaggcttagctgccactacggggccaagggcgcatatcggtggcggagccttagctctttgtccggagtcttccggggtccgggaggatggggggcctggcctgggggtcagggagcctatcttcgtggggctccgagggagaaggcaaagcgcccggaatagtcgagggccccctgagcagccgaatgaggagctggggattgaacacggcgtccagccattgggcagccgcgaacgagagacaggacagggaccagggtctgtgttatactggcgcccagaggtctcctcttgcgggcggacaggacctttgcaaagaggtagtctgtcaccaggggctctgtcctcaggggtcccgggctcggggaacagctcgcccctcccttcagactttttgattcggcaccacggtcccaagccggtgtcctcccagcggaacgctgggacaggctcccgcaaaagagtgggcaccgcgcgctgctgtggggaattatgggcaacagggagcaagggtcagggcgagagagccacgacatccggagcagaaaggacagccccccggcggaactgtcttccaggggcctcgggatctggccccgagctggattcagcaccacgcacggcgaggacagctcctgcatcaggttcagcaccccgcgagtctcggacagctcccgagccggcgcccaagcgcatgcgctcccggggtctcttccgctgccgcttcctcccgcagcgccccgggccgcgtcccccgggactcccggcccgtcctgaagccaggaaagtaacctcggcgaaccgggcacgctttcgtcgcgccgcaaaccgccacccgcagtttccgcagtacaactaccagacgctggtgccggagaatgaggcagcaggcaccgcggtgctacgcgtggttgctcaggacccggacgccggcgaggccgggcgcctagtctactcgctggcggcactcatgaacagccgctcgctggagctgttcagcatcgacccgcagagcggccttatccgtacggcggcagctctggaccgcgagagcatggagcgtcactacctgcgtgtgaccgcgcaggaccacgggtcgccgcgcctctcggccaccacgatggtggccgtgacagtagccgaccgcaacgaccactcgccggtttttgagcaagcgcagtaccgggagacccttcgcgagaatgtggaggagggctaccctatcctgcagctgcgtgccactgacggcgacgcgccccccaacgccaacctgcgctaccgcttcgtggggccgccagctgcgcgcgctgcagctgccgccgccttcgagattgatccacgctccggcctcatcagcaccagcggccgagtggaccgcgagcacatggaaagctatgagctggtggtggaagccagcgaccagggccaggaacccgggccgcgctcggccactgtgcgcgtacacataactgtgctagacgagaacgacaatgctcctcagttcagcgagaagcgctacgtggcgcaggtgcgcgaggatgtgcgcccccacacagtcgtgctgcgcgtcacggccactgaccgggacaaggacgccaacggattggtgcactacaacatcatcagtggcaatagccgtggacactttgccatcgacagcctcactggcgagatccaggtggtggcacctctggacttcgaggcagagagagagtatgccttgcgcatcagggcgcaggatgctggccggccaccgctgtccaacaacacgggcctggccagcatccaggtggtggacatcaatgaccacattcctatttttgtcagcacgcccttccaagtttctgtcttggaaaatgctcccttgggtcactcagtcatccacattcaggcagtcgatgcagaccatggggagaatgccagattggagtactccctaactggtgtggcacctgatactccttttgtgataaacagcgccactggctgggtctctgtgagtggtcccctggaccgtgagtctgtggagcattacttctttggtgtggaggctcgagaccatggctcacccccactctctgcctcagccagtgtcaccgtgactgtgctggacgttaatgacaatcggcctgagttcacaatgaaggagtaccacctacgactgaatgaggatgcagctgtgggcaccagtgtggtcagcgtgaccgcagtagaccgtgatgccaacagtgccatcagctaccagatcacaggcggcaacacccggaatcgctttgccatcagcacccaggggggtgtgggtctggtgactctggctctgccactggactacaagcaggaacgctacttcaagctggtactaactgcatctgaccgtgcccttcatgatcactgctatgtgcacatcaacatcacagatgccaacactcatcggccggtctttcaaagtgcccactactcagtgagtgtgaatgaagatcggccaatgggtagcaccatagtggtcatcagtgcctctgatgatgacgtgggtgagaatgctcgtatcacctatctcctggaggacaacctgccccagttccgcattgatgcagactcaggagccattacattacaggccccattagactatgaggaccaggtgacctacaccctggctatcacagctcgggacaatggcatcccacagaaggcagacactacttatgtggaggtgatggtcaatgacgtgaatgacaatgctccacaatttgtggcctcccactatacagggctggtctctgaggatgccccacctttcaccagtgtcctgcagatctcagccactgaccgggatgctcatgccaatggccgggtccagtacactttccagaatggtgaagatggggatggagattttaccattgagcccacctctggaattgtccgtacagtaaggcggctagaccgggaggcagtatcagtgtatgagttgactgcctacgcagtggacagaggtgtgcccccactccggactccagtcagtatccaggtgatggtgcaggatgtgaacgacaatgcacctgtcttcccagctgaggagtttgaggtgcgggtgaaagagaatagcattgtgggctcagtggtggcccagatcactgcagtggaccctgacgaaggccccaatgcccatataatgtaccagatcgtggaggggaacatccctgagctgttccaaatggacatcttctctggagaactgacggcactcattgacctagactatgaggctcgccaagaatatgtgattgtggtgcaggccacatctgctcctttggtcagccgggccactgtgcacgtccgcctggttgaccagaatgacaacagccctgtgctcaacaacttccagatcctcttcaacaactatgtatccaaccgttcagacaccttcccgtcgggcattattgggcgcatcccagcttatgaccccgatgtctccgaccacctcttctactcctttgagcgtggcaatgagctgcagctgctggtagtcaaccagaccagtggggagctgcgactcagccgaaagctagacaataaccgcccactggtggcctccatgttggtgactgtcacagatggcctgcacagcgtgacggcgcagtgtgtgctgcgcgtggtcatcatcacggaggagttgctggccaacagcctgaccgtgcgccttgagaacatgtggcaggagcgcttcctgtcaccgctgctgggccgcttcctcgagggcgtggctgcggtgctcgctacgcccgctgaggacgtcttcatcttcaacatccagaacgacacagacgtagggggcaccgtgctcaatgtgagtttctcggcgctagctccacgtggggccggggcgggcgctgcagggccctggttcagctccgaggagctgcaggagcagttgtacgtgcgccgggcggcgctggcggctcgctccctgctcgacgtactgcccttcgacgacaacgtgtgcctgcgagagccctgtgagaactacatgaaatgcgtgtccgtgctccgctttgactcgtccgcgcccttcctggcctcggcctccacgctgttccgacccatccagcccatcgctggcctgcgctgccgctgcccgcccggattcacgggagacttttgcgagaccgagctcgacctctgctactccaacccatgtcgcaacggcggagcctgcgcgcggcgcgagggaggctacacgtgcgtctgccgcccgcgcttcaccggagaggactgcgagctggacaccgaggccggccgctgcgtgccgggcgtctgccgcaacgggggcacctgcaccgacgcgcccaacggcggctttcgctgccagtgcccggcaggcggcgccttcgagggcccgcgctgcgaggtggctgcgcgctccttcccgcccagttcgttcgtcatgtttcgcggcctgcggcagcgattccaccttacgctgtccctctcgttcgcgacagtgcagcagagcgggctgctcttctacaacgggcgcctgaacgagaagcacgacttcctggccctggaactcgtggctggccaagtgcggctcacatattccacgggtgaatccaacaccgtggtcagccccacagttccagggggcttgagtgacgggcaatggcatacagtgcatctgagatactacaacaagccccggacagatgccctagggggtgcacagggcccctccaaggacaaggtggctgtgctaagcgtggatgattgtgatgtggccgtggctctgcagtttggtgctgagattggcaactactcatgcgcggctgctggtgtgcaaacaagctccaagaagtccctggacctgacgggccctcttcttctgggaggtgtccccaacctccccgagaacttccccgtatcccataaggacttcatcggctgtatgcgggacctgcacattgatggccgccgagtggacatggcggcttttgtcgcaaataatggcaccatggcaggctgccaagccaagctacacttttgtgactcaggcccctgcaagaacagtggcttctgctcggagcgctggggcagcttcagctgcgactgccctgtgggcttcggcggcaaagactgtcagcttactatggcccatccccaccatttccgtggcaacggcacactgagctggaactttggaagtgacatggctgtgtctgtgccatggtacctggggctggcatttcggacacgggcaacgcagggggtcctgatgcaagtgcaggctgggccacacagcacgctcctttgccagctagatcgggggttactgtctgtgacagtgaccaggggctcgggccgtgcttcccatctccttctggaccaggtgactgtcagtgatggccggtggcacgatctgcggctggagttgcaggaggaaccaggtggccggcggggccaccatgtccttatggtctcactggactttagcctcttccaggacaccatggcggtggggagtgagctgcagggcctgaaggtaaagcagctccacgtgggaggcctgccccccggcagtgcagaggaggctcctcagggtctggttggctgcatccagggggtgtggctcggctccacaccctctggctccccggccctgctaccccccagccaccgagtgaatgcggagcctggctgtgttgtgaccaacgcctgtgcctctgggccctgcccacctcacgcagactgccgggacctctggcagaccttttcttgcacctgccagccaggttactacggcccaggctgtgtggatgcctgcctcctgaacccctgtcagaaccagggatcatgccggcacctgccaggagccccccatggctatacctgtgactgtgtgggtggctatttcgggcaccactgtgagcacaggatggaccagcagtgcccacggggctggtgggggagcccaacctgtggcccctgcaactgtgatgttcacaaaggttttgatcccaactgcaacaagacaaatgggcagtgtcactgcaaggagttccactaccgaccgcggggcagtgactcttgcctcccatgtgactgctaccctgtgggctccacctcgcgctcatgtgcaccccacagcgggcagtgcccctgtcgcccaggagcccttggccgccagtgcaacagctgtgacagtcccttcgcagaggtgacagccagcggctgccgggtgctctatgatgcctgccctaagtccctgagatctggtgtgtggtggccccagacaaagtttggcgtcctggccacagtgccctgtccccggggggccctgggtgctgctgtgcggctgtgtgatgaggcccagggttggctggagcccgacctcttcaactgtacctcccctgcctttcgagagctcagtctgctgctggatggcctagagctgaacaagacggcactggataccatggaggccaagaagctggctcagcggctacgggaggtgactggccacactgaccactattttagccaagatgttcgagtcactgcccgcctgctggcccacctgctggccttcgagagccatcagcagggcttcgggctgacagccacacaggatgcccacttcaatgagaatctgctgtgggccggctctgcactgcttgccccagagacaggggacttgtgggcggcgctggggcagcgggcccctgggggctccccaggcagcgcgggactggtgaggcacctggaggagtatgcagccacactcgcaaggaatatggaactcacatacctgaatcccatggggctggtgacgcctaatatcatgctcagcattgaccgcatggagcaccccagttctccccggggggcccgtcgctaccctcgctaccatagcaacctctttcgaggccaggatgcctgggatcctcacacccatgtgctgctgccttcccagtccccacggccatccccatctgaagttctgcccacaagcagcagcatagaaaactccaccacctcaagtgtggtccccccaccagccccgccagagccagagcctgggatctccattatcattctcctcgtttaccgcaccttagggggactgctccctgcccagttccaggcagaacgccgaggtgccaggcttcctcagaaccccgtcatgaactccccggtggtcagcgtggctgtgttccacggacgcaacttcctaaggggaatcctggagtcccccatcagcctagagtttcgcctgctacagacagcgaatcggagcaaggcgatctgtgtgcagtgggacccacctggcctggcggagcagcatggtgtgtggacagcacgggactgcgagctggtgcacaggaatgggtcccacgcacggtgtcgctgcagccggacagggacctttggggtcctcatggatgcctctccccgtgagaggctggagggcgacctggagctgctggctgtgttcacccacgtggtcgtggctgtgtctgtggctgcgctggtgctgactgcagccatcctgctgagcctgcgcagcctcaagtccaatgtgcgtgggatccatgccaatgtggcagccgccctgggggtggcagagctcctcttcctgctggggattcacaggacccacaatcagctggtgtgcactgcagtcgccatcctcctgcactacttcttcctcagcaccttcgcgtggctcttcgtgcaggggctgcacctctaccgcatgcaggttgagccacgcaacgtggaccgcggcgccatgcgcttctaccatgccctgggctggggcgtccctgctgtgctgctgggccttgctgtgggcctggaccctgagggctatgggaaccctgacttctgctggatctcagtccacgagcccctcatctggagctttgctggccctgttgtcctggtcatagtgatgaacgggaccatgtttctcctcgctgcccgcacatcctgctccacagggcagagggaggccaagaagacctctgcactgacccttcgcagctccttcctgctgcttctgctggtcagtgcctcctggctctttgggctcctggcagtcaaccacagcatcctagccttccactacctccatgctggactctgcggcctccagggcctggcggtgctgctgctcttctgtgtcctaaatgcagatgctcgggctgcctggatgccagcctgtctgggcaggaaggcagcgcctgaggaggcaaggccagcacctgggctgggacctggggcctacaacaacacggctctctttgaggagagtggcctcatccgcatcactctgggcgcctccaccgtctcctctgtgagcagtgcccgctccggccggacccaggaccaggacagccagcggggccgcagctacctcagggacaatgtcctggttcgacatggctcagccgctgaccacactgaccacagcctccaggctcatgctggccccactgacctggacgtggccatgttccatcgagatgctggcgcagactccgactctgacagtgacctgtccttggaggaggagaggagtctctccattccatcttcagaaagcgaggacaatggccggacgcgggggcgcttccaacggccactctgccgagcagcccagagtgagaggctcctcacccaccccaaagatgtggatggcaatgacctcctgtcctactggccagccctgggggagtgcgaggcagccccctgtgctctgcagacttggggctctgaaaggcgcctggggctggacaccagcaaggatgcagctaacaacaaccagccagacccggccctgaccagtggggatgagacttctctgggccgggcccagcgccagaggaaaggcatcctgaagaaccggttgcaatacccactggtgccacagacccgaggtgcccctgagctgtcctggtgccgtgcagccaccttgggccaccgtgcagtgccagctgcctcttacggtcgcatctatgctggcgggggcacgggcagcctttcacagccagccagccgctactcttctagagaacagctggacctgctcctccggcggcaactgagccgtgagcgactagaggaagcccctgcccctgttctacgtcccctgagccggccagggtcccaggaatgcatggatgctgcaccaggccgactggagcccaaagatcggggcagcaccctgccacggaggcagccacctcgggactaccctggcgccatggctggccgcttcgggtcacgggatgcgctcgacttaggggcacctcgagagtggttgagcacgctgcctccgccccgccgcacccgggaccttgacccacagcccccacctctgcccctgtctccccagcggcaactctcaagggaccccctcttgccatcccggccgctggactctctgtctaggagctcgaactctcgggagcagctggaccaggtgcctagccggcacccctcacgagaagcccttgggccactcccgcagctgctcagagctagggaggactcggtcagtggccccagccatggcccctccacagaacagttggacattctttcctccatccttgcctctttcaactcctcggccctctcctctgtgcaatcttcaagcacacccttgggccctcacaccactgccacaccttctgccacagcctctgtgcttgggccctccacgccacgttctgccacgtctcacagcatctcggagctgtcgccagactcagaagttcccagaagtgagggtcactcctgaggggatgacggcgtggacgaggaacagctgagggcgacagaggatctaggctaacaggagagactccaggagtgggggcagatcccaaggcagcctcctgctccccagtggtgggtgccccagctctacctggtgtggcagggctgaggctccatgtgcatctgtgagcatgcgtgtgacaggtgcagagacgggggactggagggagacttttatacgttttgtacctttgtaaccagagagatgcttatgttatttttcagcttttctgtctcctggggggtttgaggctgggctgggagggggagggagatagagggagagatgcagtttgaccccatttgggtcctgagcaaaccctatgctcatctctctctccttcctggggtggactcagatgggtgggacacatgccttcctccccctattccacccccaagttgatctgagtatcgtcaggggcccaaagtacagaattgttctttgctttttattgaatgctccaaaggccaaacttctggggctgggggttggtcttggaaacaggggtcctctgacttcctcatgggggcttgctcataccgcccctcctggtggatgtgtgtgtttattatgtggagtccctgccacttactgccttatgacctaggactgatgctgtggggtgctggtggagcagctgatgtcgtgtttacagagcaaggcttccctgtctcccacggggaggggctcgggcctctagtcagacattcctgcagagggtcggtggaggggtcattcacctgcccctgcagcaagcaaaagttgtctgtggtgccatttgattccctgacactgccccctgcttgaattgattccgaagggtagggtgggaaggtgagcaaagggagcagaaacaagggaattcaagacccagaatgtaggtgccactgcctcctatgtttacaggatcctccgtggccctaggcacctgggctgcaggaagtgactccgttccactcctcctttattcccttaaaaagggaaaaatgactgttacgaccctgttcacaaaactcttacttttgctattttgtctgctgtccagaactgaagactttaaaattttgttactgtttacaagtccagattcaaaaaatgtttttactttgtttacaactcaaaactttgagttttacactttgtttacagtagataattttttttcctttgtttccaagtgaaaggtagggaaagtgggagagggacttggaggacccacctgtgaggaccctgacctggccatcttgaggggttttctaacccccaggtctcccaggccgaaggtcagccttgagtcccgtttaacagcagatccagaagaccttgagagtaggcgtcctctaaccacgggggagagtggctgtgcagggctggggggtggtctgtgcagacacctcctcacccaccaccccatgcatactcttgggaagcagcttcctgggagattagaaattctacttccctgactggagctaaatcccaccagccaggacccaaactctccttaccgagaaggaccccagctcttgaagggctgagtggcctgctgggggtgggagggtgtctttactatgtcctaggtttcgtagatgcccctctctggggttcccctcctccagcccagcggccctctttcctgtctgtgtaaattgttccgtgaagccgcgctctgttttgggaataaacttctatag

SEQ ID NO: 23380 - DNA, 11389 bp, Homo Sapiens
atggcgccgccgccgccgcccgtgctgcccgtgctgctgctcctggccgccgccgccgccctgccggcgatggggctgcgagcggccgcctgggagccgcgcgtacccggcgggacccgcgccttcgccctccggcccggctgtacctacgcggtgggcgccgcttgcacgccccgggcgccgcgggagctgctggacgtgggccgcgatgggcggctggcaggacgtcggcgcgtctcgggcgcggggcgcccgctgccgctgcaagtccgcttggtggcccgcagtgccccgacggcgctgagccgccgcctgcgggcgcgcacgcaccttcccggctgcggagcccgtgcccggctctgcggaaccggtgcccggctctgcggggcgctctgcttccccgtccccggcggctgcgcggccgcgcagcattcggcgctcgcagctccgaccaccttacccgcctgccgctgcccgccgcgccccaggccccgctgtcccggccgtcccatctgcctgccgccgggcggctcggtccgcctgcgtctgctgtgcgccctgcggcgcgcggctggcgccgtccgggtgggactggcgctggaggccgccaccgcggggacgccctccgcgtcgccatccccatcgccgcccctgccgccgaacttgcccgaagcccgggcggggccggcgcgacgggcccggcggggcacgagcggcagagggagcctgaagtttccgatgcccaactaccaggtggcgttgtttgagaacgaaccggcgggcaccctcatcctccagctgcacgcgcactacaccatcgagggcgaggaggagcgcgtgagctattacatggaggggctgttcgacgagcgctcccggggctacttccgaatcgactctgccacgggcgccgtgagcacggacagcgtactggaccgcgagaccaaggagacgcacgtcctcagggtgaaagccgtggactacagtacgccgccgcgctcggccaccacctacatcactgtcttggtcaaagacaccaacgaccacagcccggtcttcgagcagtcggagtaccgcgagcgcgtgcgggagaacctggaggtgggctacgaggtgctgaccatccgcgccagcgaccgcgactcgcccatcaacgccaacttgcgttaccgcgtgttggggggcgcgtgggacgtcttccagctcaacgagagctctggcgtggtgagcacacgggcggtgctggaccgggaggaggcggccgagtaccagctcctggtggaggccaacgaccaggggcgcaatccgggcccgctcagtgccacggccaccgtgtacatcgaggtggaggacgagaacgacaactacccccagttcagcgagcagaactacgtggtccaggtgcccgaggacgtggggctcaacacggctgtgctgcgagtgcaggccacggaccgggaccagggccagaacgcggccattcactacagcatcctcagcgggaacgtggccggccagttctacctgcactcgctgagcgggatcctggatgtgatcaaccccttggatttcgaggatgtccagaaatactcgctgagcattaaggcccaggatgggggccggcccccgctcatcaattcttcaggggtggtgtctgtgcaggtgctggatgtcaacgacaacgagcctatctttgtgagcagccccttccaggccacggtgctggagaatgtgcccctgggctaccccgtggtgcacattcaggcggtggacgcggactctggagagaacgcccggctgcactatcgcctggtggacacggcctccacctttctggggggcggcagcgctgggcctaagaatcctgcccccacccctgacttccccttccagatccacaacagctccggttggatcacagtgtgtgccgagctggaccgcgaggaggtggagcactacagcttcggggtggaggcggtggaccacggctcgccccccatgagctcctccaccagcgtgtccatcacggtgctggacgtgaatgacaacgacccggtgttcacgcagcccacctacgagcttcgtctgaatgaggatgcggccgtggggagcagcgtgctgaccctgcaggcccgcgaccgtgacgccaacagtgtgattacctaccagctcacaggcggcaacacccggaaccgctttgcactcagcagccagagagggggcggcctcatcaccctggcgctacctctggactacaagcaggagcagcagtacgtgctggcggtgacagcatccgacggcacacggtcgcacactgcgcatgtcctaatcaacgtcactgatgccaacacccacaggcctgtctttcagagctcccattacacagtgagtgtcagtgaggacaggcctgtgggcacctccattgctaccctcagtgccaacgatgaggacacaggagagaatgcccgcatcacctacgtgattcaggaccccgtgccgcagttccgcattgaccccgacagtggcaccatgtacaccatgatggagctggactatgagaaccaggtcgcctacacgctgaccatcatggcccaggacaacggcatcccgcagaaatcagacaccaccaccctagagatcctcatcctcgatgccaatgacaatgcaccccagttcctgtgggatttctaccagggttccatctttgaggatgctccaccctcgaccagcatcctccaggtctctgccacggaccgggactcaggtcccaatgggcgtctgctgtacaccttccagggtggggacgacggcgatggggacttctacatcgagcccacgtccggtgtgattcgcacccagcgccggctggaccgggagaatgtggccgtgtacaacctttgggctctggctgtggatcggggcagtcccactccccttagcgcctcggtagaaatccaggtgaccatcttggacattaatgacaatgcccccatgtttgagaaggacgaactggagctgtttgttgaggagaacaacccagtggggtcggtggtggcaaagattcgtgctaacgaccctgatgaaggccctaatgcccagatcatgtatcagattgtggaaggggacatgcggcatttcttccagctggacctgctcaacggggacctgcgtgccatggtggagctggactttgaggtccggcgggagtatgtgctggtggtgcaggccacgtcggctccgctggtgagccgagccacggtgcacatccttctcgtggaccagaatgacaacccgcctgtgctgcccgacttccagatcctcttcaacaactatgtcaccaacaagtccaacagtttccccaccggcgtgatcggctgcatcccggcccatgaccccgacgtgtcagacagcctcaactacaccttcgtgcagggcaacgagctgcgcctgttgctgctggaccccgccacgggcgaactgcagctcagccgcgacctggacaacaaccggccgctggaggcgctcatggaggtgtctgtgtctgatggcatccacagcgtcacggccttctgcaccctgcgtgtcaccatcatcacggacgacatgctgaccaacagcatcactgtccgcctggagaacatgtcccaggagaagttcctgtccccgctgctggccctcttcgtggagggggtggccgccgtgctgtccaccaccaaggacgacgtcttcgtcttcaacgtccagaacgacaccgacgtcagctccaacatcctgaacgtgaccttctcggcgctgctgcctggcggcgtccgcggccagttcttcccgtcggaggacctgcaggagcagatctacctgaatcggacgctgctgaccaccatctccacgcagcgcgtgctgcccttcgacgacaacatctgcctgcgcgagccctgcgagaactacatgaagtgcgtgtccgttctgcgattcgacagctccgcgcccttcctcagctccaccaccgtgctcttccggcccatccaccccatcaacggcctgcgctgccgctgcccgcccggcttcaccggcgactactgcgagacggagatcgacctctgctactccgacccgtgcggcgccaacggccgctgccgcagccgcgagggcggctacacctgcgagtgcttcgaggacttcactggagagcactgtgaggtggatgcccgctcaggccgctgtgccaacggggtgtgcaagaacgggggcacctgcgtgaacctgctcatcggcggcttccactgcgtgtgtcctcctggcgagtatgagaggccctactgtgaggtgaccaccaggagcttcccgccccagtccttcgtcaccttccggggcctgagacagcgcttccacttcaccatctccctcacgtttgccactcaggaaaggaacggcttgcttctctacaacggccgcttcaatgagaagcacgacttcatcgccctggagatcgtggacgagcaggtgcagctcaccttctctgcaggcgagacaacaacgaccgtggcaccgaaggttcccagtggtgtgagtgacgggcggtggcactctgtgcaggtgcagtactacaacaagcccaatattggccacctgggcctgccccatgggccgtccggggaaaagatggccgtggtgacagtggatgattgtgacacaaccatggctgtgcgctttggaaaggacatcgggaactacagctgcgctgcccagggcactcagaccggctccaagaagtccctggatctgaccggccctctactcctggggggtgtccccaacctgccagaagacttcccagtgcacaaccggcagttcgtgggctgcatgcggaacctgtcagtcgacggcaaaaatgtggacatggccggattcatcgccaacaatggcacccgggaaggctgcgctgctcggaggaacttctgcgatgggaggcggtgtcagaatggaggcacctgtgtcaacaggtggaatatgtatctgtgtgagtgtccactccgattcggcgggaagaactgtgagcaagccatgcctcacccccagctcttcagcggtgagagcgtcgtgtcctggagtgacctgaacatcatcatctctgtgccctggtacctggggctcatgttccggacccggaaggaggacagcgttctgatggaggccaccagtggtgggcccaccagctttcgcctccagatcctgaacaactacctccagtttgaggtgtcccacggcccctccgatgtggagtccgtgatgctgtccgggttgcgggtgaccgacggggagtggcaccacctgctgatcgagctgaagaatgttaaggaggacagtgagatgaagcacctggtcaccatgaccttggactatgggatggaccagaacaaggcagatatcgggggcatgcttcccgggctgacggtaaggagcgtggtggtcggaggcgcctctgaagacaaggtctccgtgcgccgtggattccgaggctgcatgcagggagtgaggatgggggggacgcccaccaacgtcgccaccctgaacatgaacaacgcactcaaggtcagggtgaaggacggctgtgatgtggacgacccctgtacctcgagcccctgtccccccaatagccgctgccacgacgcctgggaggactacagctgcgtctgtgacaaagggtaccttggaataaactgtgtggatgcctgtcacctgaacccctgcgagaacatgggggcctgcgtgcgctcccccggctccccgcagggctacgtgtgcgagtgtgggcccagtcactacgggccgtactgtgagaacaaactcgaccttccgtgccccagaggctggtgggggaaccccgtctgtggaccctgccactgtgccgtcagcaaaggctttgatcccgactgtaataagaccaacggccagtgccaatgcaaggagaattactacaagctcctagcccaggacacctgtctgccctgcgactgcttcccccatggctcccacagccgcacttgcgacatggccaccgggcagtgtgcctgcaagcccggcgtcatcggccgccagtgcaaccgctgcgacaacccgtttgccgaggtcaccacgctcggctgtgaagtgatctacaatggctgtcccaaagcatttgaggccggcatctggtggccacagaccaagttcgggcagccggctgcggtgccatgccctaagggatccgttggaaatgcggtccgacactgcagcggggagaagggctggctgcccccagagctctttaactgtaccaccatctccttcgtggacctcagggccatgaatgagaagctgagccgcaatgagacgcaggtggacggcgccagggccctgcagctggtgagggcgctgcgcagtgctacacagcacacgggcacgctctttggcaatgacgtgcgcacggcctaccagctgctgggccacgtccttcagcacgagagctggcagcagggcttcgacctggcagccacgcaggacgccgactttcacgaggacgtcatccactcgggcagcgccctcctggccccagccaccagggcggcgtgggagcagatccagcggagcgagggcggcacggcacagctgctccggcgcctcgagggctacttcagcaacgtggcacgcaacgtgcggcggacgtacctgcggcccttcgtcatcgtcaccgccaacatgattcttgctgtcgacatctttgacaagttcaactttacgggagccagggtcccgcgattcgacaccatccatgaagagttccccagggagctggagtcctccgtctccttcccagccgacttcttcagaccacctgaagaaaaagaaggccccctgctgaggccggctggccggaggaccaccccgcagaccacgcgcccggggcctggcaccgagagggaggccccgatcagcaggcggaggcgacaccctgatgacgctggccagttcgccgtcgctctggtcatcatttaccgcaccctggggcagctcctgcccgagcgctacgaccccgaccgtcgcagcctccggttgcctcaccggcccatcattaataccccgatggtgagcacgctggtgtacagcgagggggctccgctcccgagacccctggagaggcccgtcctggtggagttcgccctgctggaggtggaggagcgaaccaagcctgtctgcgtgttctggaaccactccctggccgttggtgggacgggagggtggtctgcccggggctgcgagctcctgtccaggaaccggacacatgtcgcctgccagtgcagccacacagccagctttgcggtgctcatggatatctccaggcgtgagaacggggaggtcctgcctctgaagattgtcacctatgccgctgtgtccttgtcactggcagccctgctggtggccttcgtcctcctgagcctggtccgcatgctgcgctccaacctgcacagcattcacaagcacctcgccgtggcgctcttcctctctcagctggtgttcgtgattgggatcaaccagacggaaaacccgtttctgtgcacagtggttgccatcctcctccactacatctacatgagcacctttgcctggaccctcgtggagagcctgcatgtctaccgcatgctgaccgaggtgcgcaacatcgacacggggcccatgcggttctactacgtcgtgggctggggcatcccggccattgtcacaggactggcggtcggcctggacccccagggctacgggaaccccgacttctgctggctgtcgcttcaagacaccctgatttggagctttgcggggcccatcggagctgttataatcatcaacacagtcacttctgtcctatctgcaaaggtttcctgccaaagaaagcaccattattatgggaaaaaagggatcgtctccctgctgaggaccgcattcctcctgctgctgctcatcagcgccacctggctgctggggctgctggctgtgaaccgcgatgcactgagctttcactacctcttcgccatcttcagcggcttacagggccccttcgtcctccttttccactgcgtgctcaaccaggaggtccggaagcacctgaagggcgtgctcggcgggaggaagctgcacctggaggactccgccaccaccagggccaccctgctgacgcgctccctcaactgcaacaccaccttcggtgacgggcctgacatgctgcgcacagacttgggcgagtccaccgcctcgctggacagcatcgtcagggatgaagggatccagaagctcggcgtgtcctctgggctggtgaggggcagccacggagagccagacgcgtccctcatgcccaggagctgcaaggatccccctggccacgattccgactcagatagcgagctgtccctggatgagcagagcagctcttacgcctcctcacactcgtcagacagcgaggacgatggggtgggagctgaggaaaaatgggacccggccaggggcgccgtccacagcacccccaaaggggacgctgtggccaaccacgttccggccggctggcccgaccagagcctggctgagagtgacagtgaggaccccagcggcaagccccgcctgaaggtggagaccaaggtcagcgtggagctgcaccgcgaggagcagggcagtcaccgtggagagtaccccccggaccaggagagcgggggcgcagccaggcttgctagcagccagcccccagagcagaggaaaggcatcttgaaaaataaagtcacctacccgccgccgctgacgctgacggagcagacgctgaagggccggctccgggagaagctggccgactgtgagcagagccccacatcctcgcgcacgtcttccctgggctctggcggccccgactgcgccatcacagtcaagagccctgggagggagccggggcgtgaccacctcaacggggtggccatgaatgtgcgcactgggagcgcccaggccgatggctccgactctgagaaaccgtgaggcaagcccgtcaccccacacaggctgcggcatcaccctcagaccttggagcccaaggggccactgcccttgaagtggagtgggcccagagtgtggcggtccccatggtggcagccccccgactgatcatccagacacaaaggtcttggttctcccaggagctcagggcctgtcagacctggtgacaagtgccaaaggccacaggcatgagggaggcgtggaccactgggccagcaccgctgagtcctaagactgcagtcaaagccagaactgagaggggaccccagactgggcccagaggctggccagagttcaggaacgccgggcacagaccaaagaccgcggtccagccccgcccaggcgggcatctcatggcagtgcggacccgtggctggcagcccgggcagtcctttgcaaaggcaccccttgtcttaaaatcacttcgctatgtgggaaaggtggagatacttttatatatttgtatgggactctgaggaggtgcaacctgtatatatattgcattcgtgctgactttgttatcccgagagatccatgcaatgatctcttgctgtcttctctgtcaagattgcacagttgtacttgaatctggcatgtgttgacgaaactggtgccccagcagatcaaaggtgggaaatacgtcagcagtggggctaaaaccaagcggctagaagccctacagctgccttcggccaggaagtgaggatggtgtgggccctccccgccggccccctgggtccccagtgttcgctgtgtgtgcgtttgtcctctgctgccatctgccccggctgtgtgaattcaagacagggcagtgcagcactaggcaggtgtgaggagccctgctgaggtcactgtggggcacggttgccacacggctgtcatttttcacctggtcattctgtgaccaccaccccctcccctcaccgcctcccaggtggcccgggagctgcaggtggggatggctttgtcctttgctcctgctccccgtgggacctgggaccttaaagcgttgcaggttcctgatttggacagaggtgtggggccttccaggccgttacatacctcctgccaattctctaactctctgagactgcgaggatctccaggcagggttctcccctctggagtctgaccaattacttcattttgcttcaaatggccaattgtgcagagggacaaagccacagccacactcttcaacggttaccaaactgtttttggaaattcacaccaaggtcgggcccactgcaggcagctggcacagcgtggcccgaggggctgtggaacgggtcccggaactgtcagacatgtttgattttagcgtttcctttgttcttcaaatcaggtgcccaaataagtgatcagcacagctgcttccaaataggagaaaccataaaataggatgaaaatcaagtaaaatgcaaagatgtccacactgttttaaacttgaccctgatgaaaatgtgagcactgttagcagatgcctatgggagaggaaaagcgtatctgaaaatggtccaggacaggaggatgaaatgagatcccagagtcctcacacctgaatgaattatacatgtgccttaccaggtgagtggtctttcgaagataaaaaactctagtccctttaaacgtttgcccctggcgtttcctaagtacgaaaaggtttttaagtcttcgaacagtctcctttcatgactttaacaggattctgccccctgaggtgtaatttttttgttctatttttttccacgtactccacagccaacatcacgaggtgtaatttttaatttgatcagaactgttaccaaaaaacaactgtcagttttattgagatgggaaaaatgtaaacctatttttattacttaagactttatgggagagattagacactggaggtttttaacagaacgtgtatttattaatgttcaaaacactggaattacaaatgagaagagtctacaataaattaagatttttgaatttgtacttctgcggtgctggtttttctccacaaacacccccgcccctccccatgcccagggtggccgtggaagggacggtttacggacgtgcagctgagctgtccgtgtcccatgctccctcagccagtggaacgtgccggaactttttgtccattccctagtaggcctgccacagcctagatgggcagtttttgtctttcaccaaatttgaggactttttttttttgccattatttcttcagttttcttttcttgcactgatctttctcctctccttctgtgactccagtgactcagacgttagacctcttgatgttttcccactggtccctgaggctctgttc

SEQ ID NO: 23381 - DNA, 11389 bp, Homo Sapiens; identical to SEQ ID NO: 23380

SEQ ID NO: 23382 - DNA, 1922 bp, Homo Sapiens
gcacgagaatgtccctgagacccagaagggcctgcgctcagctgctctggcaccccgctgcagggatggcctcctgggctaagggcaggagctacctggcgcctggtttgctgcagggccaagtggccatcgtcaccggcggggccacgggcatcggaaaagccatcgtgaaggagctcctggagctggggagtaatgtggtcattgcatcccgtaagttggagagattgaagtctgcggcagatgaactgcaggccaacctacctcccacaaagcaggcacgagtcattcccatacaatgcaacatccggaatgaggaggaggtgaataatttggtcaaatctaccttagatacttttggtaagatcaatttcttggtgaacaatggaggaggccagtttctttcccctgctgaacacatcagttctaagggatggcacgctgtgcttgagaccaacctgacgggtaccttctacatgtgcaaagcagtttacagctcctggatgaaagagcatggaggatctatcgtcaatatcattgtccctactaaagctggatttccattagctgtgcattctggagctgcaagagcaggtgtttacaacctcaccaaatctttagctttggaatgggcctgcagtggaatacggatcaattgtgttgcccctggagttatttattcccagactgctgtggagaactatggttcctggggacaaagcttctttgaagggtcttttcagaaaatccccgctaaacgaattggtgttcctgaggaggtctcctctgtggtctgcttcctactgtctcctgcagcttccttcatcactggacagtcagtggatgtggatgggggccggagtctctatactcactcgtatgaggtaccagatcatgacaactggcccaagggagcaggggacctttctgttgtcaaaaagatgaaggagacctttaaggagaaagctaagctctgagctgaggaaacaaggtgtcctccatcccccagtgccttcacatcttgaggatatgcttctgtactttttaaaagcttatagttggtatggaaaacatttttcttatttttaagtgttattaattatatctatggaaaaactattcctgaaatatatacagtcttatgtcccaatcagagtcttttaacctatgatttaaaaatgtataagtaacagaaattaacatattttaatgactttactttttatttctaagaaaagtatttgaaaaatggaataattttaaatcaatgataattctagggatcatgaactcccagaagattttattatttaattgtaaaggtagaggccggacgcagtggctcacgcctgtaattccagcactttgggaggccgaggtgggcgggtcagttgaggtcaggagttcaagaccaggctggccaacatggtaaaaccctgtctctactgaaaaacaacaaaaacaaaaacacaaattagtcgggtgtggtggcacacacctgtagtcccaggtacttgggaggctgaggcaggaggatcgcttgaacccaggaagcagaggttgcagtgagctgagatcgtgctactgcagtccagcctgggctacagagtgagactgcatctcaaaaaaaacccmaaaaaacaaaaacaaacaacaacaacaaaattataaaggtagaaaataaatctaaattgtgtcgtaattaagattattaaaatgagaattatacaatgacttatttttggtggcaaatactttaggagcaataatgccttatggtaattattgatgtatagttttttttgtttatgaagtcaaatttgtataaatttttttaattcaaaggaaaagttttatgtgattttaaaaaaaaaaaaaaaaaaaaaaaaaaaaaaaaaaaaaaaaaaaaaaaaaaaaaaaaa

SEQ ID NO: 23383 - DNA, 3538 bp, Homo Sapiens
cctcttgtcatggatgaagagactcggcacagccttgagtgcatccaggccaatcagatctttcccaggaagcagctgatccgggaggatgagaatcttcaggttcctttccttgaacttcatggagagagcacagagtttgtgggccgtgccgaggatgccatcattgccctttccaattacagacttcacatcaagttcaaggagtctcttgttaatgttccattacagcttatagaaagtgttgaatgccgagatatatttcagcttcatttgacttgcaaagactgcaaagttatcaggtgtcagttttcaacctttgagcagtgtcaagagtggctgaagagactgaacaacgcaatccgaccacctgctaaaatagaagatctcttctcatttgcataccatgcttggtgcatggaggtctatgccagtgaaaaagagcaacatggagacctgtgcagaccaggggagcatgtaacttcaaggtttaaaaacgaggtggagaggatgggttttgatatgaacaacgcctggaggatttccaacatcaatgagaagtacaaattatgtggtagctatcctcaagagctcatagtgcctgcctggatcactgacaaagaactggaaagtgtatcaagtttcaggtcctggaagcgcatccctgccgtcatctacaggcaccagagcaatggagctgtcattgcccgctgtggacagccagaggttagctggtggggctggcgaaatgcagatgatgagcatctggtacagtcagtagccaaagcttgtgcctctgactcccgatcgagtggcagcaagctgtcaactaggaacacttctcgagactttcccaatgggggagacctttctgacgtggagttcgattcttctctgtcaaatgcttcaggagcagagagtttagccatccaaccgcagaagcttttgatcttggatgcacgctcctatgcagctgctgtggcaaaccgagccaaaggaggaggctgcgaatgcccagagtattacccaaactgtgaagttgtgtttatggggatggcaaacattcattctattcggaggagttttcagtctctgcggttgctgtgcactcagatgccagatccgggaaattggctatcagctcttgaaagcacaaaatggctccatcacttgtctgtgcttctgaaatcagcgcttctggtagtgcatgctgtggatcaggatcagcggccggtgctagtacactgctcagatggctgggaccgcaccccccagattgtggcattggctaagctcttgctggacccttattaccgaaccatagagggtttccaggtcctcgtggaaatggagtggctggattttggccataaatttgctgaccggtgtggtcatggggagaactcggatgatctgaatgaacgttgcccagtgtttctgcagtggcttgactgtgttcatcagcttcagaggcaatttccttgctcttttgagttcaatgaagcattccttgtgaaactggtgcagcatacctattcctgcctgtttggaacattcctgtgcaacaacgccaaggagagaggggaaaagcatactcaggaacggacatgttccgtgtggtcacttcttcgggcaggcaacaaggctttcaaaaacctactgtattcctctcagtcagaagccgtgctgtaccctgtgtgccatgtgcgtaacctgatgctgtggagtgcagtgtacctgccctgcccatccccaaccacccctgtggacgacagctgtgcaccatacccagccccaggcaccagccctgatgatccccccctgagccggctaccaaagactagatcatacgacaatctgaccacagcctgtgacaacacagtgcctctggccagccggcgctgcagcgaccccagcctgaacgagaagtggcaggagcaccggcgctcactagagctgagcagcctggctggccctggagaggatcccctttctgccgacagcctagggaagcccaccagagtgccggggggtgccgagctttctgttgcagccggagtagctgaggggcagatggagaacatcttgcaggaggccaccaaagaggagagtggagtagaggaacctgcccacagggcaggcattgagatacaggagggtaaagaggaccctctcttagaaaaggagagcaggaggaagacacctgaggcctcagccattggacttcaccaagacccagaactgggtgatgctgctctgaggagccatctggatatgagctggcctctgttctcacagggcatttctgaacagcagagtgggctcagtgttctcctcagttctctccaggtcccccccaggggagaggattccctggaggtccctgtggagcagtttcgaatagaagagattgcagagggtagggaggaagcagttcttccaatcccagtagatgcaaaagttggctatggtacctcacagtcatgttctctgctaccttcccaagtcccttttgagaccagaggaccaaacgtggacagttctacagacatgttagtggaagataaggtgaagtcagtaagtgggccccaaggtcatcatagatcttgccttgtaaatagtggcaaggacaggcttcctcagaccatggaacccagcccttcagagacaagcctggtcgagaggccccaagtggggtctgtggtgcataggacttcccttggcagcactctcagcctgacacgttccccttgtgccttgcctttagccgaatgtaaagaggggcttgtgtgcaatggtgccccagagactgaaaacagggcctcagagcagcccccaggtcttagcaccctccagatgtaccccacacccaatgggcattgcgccaatggggaggctggtaggagcaaggactcactgagccgtcagctgtctgctatgagctgcagctctgcccacttacactcaaggaacttgcaccacaagtggctgcatagccactcaggaaggccatctgcaaccagcagccccgaccagccttcccgcagccacctggacgatgatggcatgtcagtgtacacagacacgatccaacagcgcctgcgtcagattgagtcaggccaccagcaggaagtagaaactttgaagaaacaagtccaggagctgaagagtcgcctggagagccagtacctgaccagctccctacactttaatggagactttggggatgaggtgatgacccgttggcttcctgaccacctggccgcccactgctatgcgtgcgacagtgccttctggcttgccagcaggaagcaccactgcagggacactgaccgtgttgatcaaacgtggaattgtgggaacgtattctgctccagttgttgtaaccagaaggttccagttcccagccagcagctctttgaacccagtcgagtatgcaagtcttgctatagcagcctacatcccacaagctccagcattgaccttgaactggataagcccattgctgccacttccaactgaagctcagtgacctggg

SEQ ID NO: 23384 - DNA, 2141 bp, Homo Sapiens
atggcggcggccgctgcggcgggacgagtctgggcaacggctgcggctaaagctgcagcggcccacgggggggctgcacgggggtagtagggggtggccctgaactggggcctggccctggctggcctctcccgccgcctcactgggggacaggtccagcctgtggtgtccacaatgccccaggcctctgagcaccgcctgggccgtacccgagagccacctgttaatatccagccccgagtgggatccaagctaccatttgcccccagggcccgcagcaaggagcgcagaaacccagcctctgggccaaaccccatgttacgacctctgcctccccggccaggtctgcctgatgaacggctcaagaaactggagctgggacggggacggacctcaggccctcgtcccagaggcccccttcgagcagatcatggggttccctgcctggctcaccacccccaacagtggctttgcctctcccatctcggaccaacttagcccgttccaagtctgtgagcagtggggacttgcgtccaatggggattgccttgggagggcaccgtgggcaccggagagcttggggctgcactgagccgcttggccctccggcctgagccacccactttgagacgtagcacttctctccgccgcctagggggctttcctggaccccctaccctgttcagcatacggacagagccccctgcttcccatggctccttccacatgatatccgcccggtcctctgagcctttctactctgatgacaagatggctcatcacacactccttctgggctctggtcatgttggccttcgaaacctgggaaacacgtgcttcctgaatgctgtgctgcagtgtctgagcagcactcgacctcttcgggacttctgtctgagaagggacttccggcaagaggtgcctggaggaggccgagcccaagagctcactgaagcctttgcagatgtgattggtgccctctggcaccttgactcctgcgaagctgtgaatcctactcgattccgagctgtcttccagaaatatgttccctccttctctggatacagccagcaggatgcccaagagttcctgaagctcctcatggagcggctacaccttgaaatcaaccgccgaggccgccgggctccaccgatacttgccaatggtccagttccctctccaccccgccgaggaggggctctgctagaagaacctgagttaagtgatgatgaccgagccaacctaatgtggaaacgttacctggagcgagaggacagcaagattgtggacctgtttgtgggccagttgaaaagttgtctcaagtgccaggcctgtgggtatcgctccacgaccttcgaggttttttgtgacctgtccctgcccatccccaagaaaggatttgctgggggcaaggtgtttttgcgggattgtttcaaccttttcactaaggaagaagagctagagtcggagaatgccccagtgtgtgaccgatgtcggcagaaaactcgaagtaccaaaaagttgacagtacaaagattccctcgaatcctcgtgctccatctgaatcgattttctgcctcccgaggctccatcaaaaaaagttcagtaggtgtagactttccactgcagcgactgagcctaggggactttgccagtgacaaagccggaagtcctgtataccagctgtatgccctttgcaaccactcaggcagcgtccactatggccactacacagccctgtgccggtgccagactggttggcatgtctacaatgactctcgtgtctcccctgtcagtgaaaaccaggtggcatccagcgagggctacgtgctgttctaccaactgatgcaggagccaccccggtgcctgtgacacctctaagctctggcacctgtgaagccctttaaacacccttaagccccaggctccccgtttacctcagagacgtctatttttgtgtctttttaatcggggaggggggagggggtggttgtagctccattattttttttattaaaaaatacccttccacctggaggctcccttgtctcccagccccatgtacaaagctcaccaagcccctgcccatgtacagcccccagaccctctgcaatatcactttttgtgaataaatttattaa

SEQ ID NO: 23385 - DNA, 7690 bp, Homo Sapiens
gaggaggagctggagggggcgcggcttcctctcggtcgctccctggcgccgggcctctttctctgcctggcccagggctggcggccggcgggggtcgcggcggcggcagtgggggcgctggcgggccgcgggtggcgggggccgggccgcggctccgggtgttaggagacaagatggcggcggctctcagaaggccggtctcctcctctccgccgtcctccgccccgccgctcgccgcctcctcctctcgggtctcctcctcctcgtttgctgcctcctcctcctcctgcagcagcaccagcgaccgccgaagcgccggctcgctcacccggagctccggaggtggatagacggggcagctgcaggctccggcgaccgaggccgagctggggccggggcggggacggcggcggcggcggcggcgacggcggcggcgccgggtggggatggggtcgcagacgctgcagatcctccgacagggggtgtgggccgcgctcagcgggggctggtactacgacccgcaccaggccaccttcgtgaacgcgctgcacctctacctgtggctctttctgctgggcctacccttcaccctctacatggcccttccttctaccatgattatagtagcagtttattgtcctgtgatagctgctgttttcattgttctgaagatggtcaactatcgactacacagagcacttgatgctggagaagttgtagataggactgcaaatgagttcacggatcagcgaaccaaagctgaacaaggcaactgttcaaccaggagaaaagacagcaatggaccgagtgatcctggtggagggattgaaatgtctgagttcatccgagaggccacacccccagttggttgcagttccagaaattcttatgccggtctagatccaagcaaccagattggatctggttcctcgcgtcttggaacagcagcaactattaaaggagatacagacactgctaagacttctgatgatatcagtttaagtctgggccaaagttctagtctttgtaaggaaggaagtgaagaacaagatttggcagctgatcggaagctctttcgtcttgtctccaatgactccttcatctctattcagccttccttatcctcttgtggacaggacttgccaagggacttcagtgacaaagtgaacctgccaagtcataaccaccaccaccatgttgatcagtctctgtccagcgcctgtgacacagaagtagcttctcttgtacctttacactcacactcttatagaaaagaccaccggccgcgaggtgtaccacggacttctagctctgctgtggcttttccagacacttcactgaatgattttcccctttatcagcaaagacgtggattagatccagttagtgagttagaatcttccaagcctctttctggatccaaagaatccttggtggaaaattctggtttatctggggaatttcagcttgctggtgacttgaaaatcaatacttctcagccacccacaaaaagtgggaagagcaaacctttgaaagcagagaaaagcatggacagcttgaggagcctgagcacacggagtagtgggtcaacagaaagctactgcagtggaacggaccgggacactaacagtactgtcagcagctataaaagtgagcagaccagctcaactcacatagagagcatcctgtcagagcatgaggagtctcctaaagcaggaacaaaaagtgggaggaagaaagagtgctgtgcaggcccagaggagaagaatagctgtgccagtgacaaaaggactagcagtgaaaagattgctatggaagcgagtaccaacagtggggttcacgaggccaaggaccccaccccctctgatgagatgcacaaccagagaggtctcagcacctctgcatctgaagaagccaataaaaatccccatgcaaatgaatttacttcccaaggggacagaccacctgggaacactgcagaaaacaaagaagagaagagtgataagtcagctgtttctgtggattccaaagtgcgtaaagatgttggtggaaagcaaaaggaaggggatgttcgacctaaatcttctagcgtaatccatcggacagcttctgcccacaagtcaggcaggagacgcacaggaaaaaaacgggctagcagttttgattcaagccggcatagggactatgtttgctttcgaggtgtttctggtaccaagccacacagtgctatattttgtcatgacgaagactctagtgatcagagtgacttgagtagagcatcaagtgttcagtctgctcaccagttcagcagtgatagctcttctagcaccacttctcattcctgtcagtctcctgagggcagatacagtgctctaaagaccaaacacactcataaagaaaggggcacagactctgaacacacacacaaagctcatttggttcctgaaggaaccagcaaaaagcgtgcaacacgacggacttctagcacaaatagtgccaagactcgtgcccgagtgttgagcctggacagtggcacagtagcatgtttgaatgactcaaacaggttaatggcacctgaaagtataaagcccttaaccacttcaaaatcagatcttgaggccaaagagggagaggtgctagatgagctatctttattaggacgggcttcccagttagagacagtcactcgatctaggaatagcttgccaaaccaggttgcatttcctgaaggggaagagcaagatgcagtcagtggagcagcacaagccagcgaggaggcagtgtcatttcgccgtgaacgcagcacatttaggcgccaggcagtacggcgccggcacaatgcagggagtaaccctacccctcctacattgctcatcggatcacccctaagccttcaagatggtcagcaaggccagcagtccacagcccaggtcaaagtccagtcccgccccccttcccaggctgcagtgctcagtgctagtgcctccttgctggtgagaaatgggagtgtccacttagaagcatcacatgacaatgcatctgctgtaggcggtagcagtttgcacgatgaacttggtaagttctcttctacgctgtatgagactggtggctgtgatatgtcacttgtgaattttgaaccagcagcaagaagagcatccaatatctgtgacacagattctcatgtatccagttctacctcagttcgattttatccacatgatgtgctctctctcccacagattcgattgaatagactattgaccattgatacagatttgttggagcaacaggacattgatctaagccctgacttggcagctacttacggcccaacagaagaagctgcccaaaaggttaaacactattatcgcttttggatcctaccccagctgtggattggcattaactttgacagactcacacttttggccctgtttgatagaaatcgtgagatcctggaaaatgtgttagctgtcatcctggctattctcgtggcctttttgggatctattcttctcatacaaggattcttcagagatatctgggtcttccagttctgcctcgtcatagccagctgtcaatactcactgcttaagagtgttcaaccagattcttcttctcccagacatggtcataatcgtatcattgcctacagtagaccagtttatttctgcatatgttgcggtcttatttggctcttggattatggtagcagaaacctgactgcaaccaagttcaaattatatggaataactttcaccaatccactggtgtttatatcagccagggatttagttatagtgtttacactctgtttcccaatagtgtttttcattggtctcctgcctcaggtgaatacatttgtaatgtacctttgtgaacaattggatattcatatttttggtggtaatgccactacaagcctgcttgcagcactttacagttttatctgtagcattgttgcagtagccttattgtatggattatgttatggggctttaaaggattcttgggatggccagcatattccagtacttttctccattttttgtggtttattagtggcagtgtcttaccatctcagccgacaaagcagtgatccatctgtacttttctctttagtgcaatccaagatttttccaaaaacggaagagaaaaatccagaagaccctctatctgaagtaaaagatccactgcctgaaaaacttagaaattctgttagtgagcgattacagtctgacctggtagtatgcattgtaattggtgtgctgtattttgctattcatgtaagcacagtcttcacagtattgcagcctgccctcaagtatgtgttgtatacattggttggctttgtgggttttgtaacccattatgtgctgcctcaagttagaaaacagctaccatggcactgtttctctcatcctctgctaaagacactagagtataatcagtatgaagttcgaaatgcagccactatgatgtggtttgagaaacttcatgtgtggcttctttttgtggagaagaatataatctatccattgattgttctcaatgaactgagcagcagtgcagagacaattgctagtccaaagaaactgaatacagaattaggtgctttaatgatcactgttgctggtttgaagttgctacgatcctcttttagcagccctacatatcagtatgttacagtcatctttactgtgctgtttttcaaatttgactatgaagctttttcagagaccatgctgttggatctcttctttatgtccatactcttcaacaagctttgggaactactttataaattgcagtttgtgtatacctatattgccccatggcagatcacatggggttctgctttccatgcttttgctcagccttttgcagtgcctcattcagccatgctgtttattcaggctgctgtctcggccttcttctctactccactgaacccctttctgggaagtgcaatattcatcacttcatatgtccgacctgtgaaattctgggagagagactataacacaaaacgagtggatcattcaaataccagattggcttcccagcttgatagaaatccaggatcagatgacaacaatctgaattccatcttttatgagcatttaactagatccctacagcacagcctctgtggtgatttgctactaggacggtggggaaactacagtacaggggactgtttcatccttgcctctgactatctcaatgcattagtacaccttatagagataggcaatggtctggtcacttttcagctgcggggacttgaattcagaggtacctactgtcaacaacgggaagtggaggccattactgaaggtgtagaggaagatgaaggattttgctgttgtgaacctggccatattcctcacatgctttcatttaatgctgcatttagccagcgatggctagcttgggaagtgatagtcacaaagtacattctggagggttatagcatcactgataacagtgctgcttctatgcttcaagtctttgatcttcggaaagtactcaccacttactatgtcaagggtatcatttattatgttacgacctcgtctaagctagaggagtggctagctaatgagacaatgcaggaaggacttcgtctgtgtgctgatcgcaattatgtcgatgtggacccgacctttaatccaaacattgatgaagactatgaccaccgactggcaggcatatctagggagagtttctgtgtgatttacctcaactggatagagtactgctcttcccgaagagcaaagcctgtggatgtggacaaagattcatccctagtgactctctgttatggactctgtgttctgggacggagagctttggggactgcatcccatcatatgtccagtaatttagagtcattcctctatggattgcatgccctatttaaaggagatttccgtatttcttcaattcgagatgaatggatctttgctgacatggaattgctaagaaaagtagtagtccctgggatccgtatgtccattaaacttcatcaggatcattttacttctccagatgaatatgatgaccctactgtgctctatgaagccatagtatctcatgagaagaacctcgtaatagcccatgaaggggaccctgcatggcggagtgcagtacttgccaactctccctccttgcttgctctgcggcatgtcatggatgatggcaccaatgaatataaaatcatcatgctcaacagacgctacctgagcttcagggtcattaaagtgaataaggaatgtgtccgaggtctttgggcagggcaacagcaggagcttgtttttctacgtaaccgtaacccagagagaggtagcatccaaaatgcaaagcaagccctgagaaacatgataaactcatcttgtgatcaacctattggctacccaatctttgtctcacccctgacaacttcttactctgacagccacgaacagcttaaagacattcttgggggtcctatcagcttgggaaatatcaggaacttcatagtgtcaacctggcacaggcttaggaaaggttgcggagctggatgtaacagtggtggcaatattgaagattctgatactggaggtgggacttcctgcactggtaacaatgcaacaactgccaacaatccccacagcaacgtgacccagggaagcattggaaatcctgggcagggatcaggaactggactccacccacctgtcacatcttatcctccaacactaggcactagccacagctctcactctgtgcagtcgggcctggtcagacagtctcctgcccgggcctcagtagccagccagtcttcctactgctatagcagccggcattcatccctccggatgtccaccactgggtttgtgccttgtcggcgctcttctactagtcagatatcgcttcgaaacttgccatcatccatccaatcccgactgtcgatggtgaaccaaatggaaccctcaggtcagagcggcctggcctgtgtgcagcacggcctgccttcctccagcagctccagccaaagcatcccagcctgcaaacatcacactctcgtgggctttcttgcgacagagggaggtcagagcagtgccactgatgcacagccaggcaacaccttaagtcctgccaacaattcacactccaaaaaggcagaagtgatttacagagtccaaattgtggatcccagtcaaattctggaagggatcaacctgtctaaaaggaaagagctacagtggcctgatgaaggaatccggttaaaagctgggagaaatagctggaaagactggagtccgcaggagggcatggaaggccatgtgattcaccgatgggtgccttgcagcagagatccaggtaccagatcccacatcgacaaggcagtgcttctggtccagattgatgataaatatgtgactgtaattgaaactggggtactagaacttggggctgaagtgtgagccagtgtttattataaagacatttctttttccctctcaattccaaggcattggaaaaagagaggaacaagcagaagatgcctgcaggtatcactttgatcctatgtgggagcgactgaaaatagaatgagcttggttaagcacctctcctttgcccttcaccctgactcctgtcactgtctccatccccaaataaagctgaaatatttttttaagtt
